United States Patent Application Publication US 2022/0102000 A1 - sequence listing, part 8

SEQ ID NO: 1523 - DNA, 14111 bp, Unknown
  16S sequences of unknown bacteria
acgagatctagtacggtctcgtgggctcggagatgtgtataagagacagcaacggcgtagtcgaaaaggtgtcggctaccgaaattgtcatccgaaccgacgagggctcgctggaaacttacaaaattctgaaatttatgcgttccaaccagggtacttgtatcaaccagcgcccgattgtggaaaaaggagagagagttaccaaaggcatggtcattgcagatggaccggctaccagcaatggcgaaatcagcttgggtaaaaatgcactggtcggttttatgacttgggaaggctacaactacgaggatgcagtcctcatcaatgaaaagattgtgcgcgacgatgtatatacctccatccacattgaggaatacgagatcgaagcaagagataccaagttgggtgcagaagaaattacccgtgatattccaaacgtaggcgaagacgcgctgaaggagttggatgagcggggtattatccgtgtcggcgcagaggttcgcgccggagatattttggtcggaaaggtcaccccgaaaggtgagaccgaactgaccgcagaagaacgtcttctgcgcgcgatctttggtgaaaaagcccgcgaggtacgtgatacctctttgcgtgttccccacggtgagtacggcattatcgtggatgtaaaagtatttacccgcgagaattgcgacgagctgaaccccggggtcaacatggttgtccgctgctacattgcgcagaagagaaaaatctcggtgggcgacaaaatggctggacgtcacggtaataagggtgttgtttcccgtattctcccgcaggaggatatgcctttcctgccggacggcacgcctttggacattgtattgaacccgttgggcgtaccttcccgtatgaacatcggtcaggtgctggaagtgcatttgggccgtgccgctgctgctttgggctggaagattatgacgccggtattcgacggtgcgcatgaggaagatatccgcgagtgtttaaaagaagcaggtctgcgggaagacggtaaaaccatcctgtacgatggacgtaccggcgagaagttcgacaacccggtaacagtcggctatatgtattatttgaagctgcatcacttggttgatgataagatccatgcccgttctactggcccgtactcgttggtaacacagcagcctttgggaggtaaagcccagtttggcggtcagcgtttcggagagatggaagtttgggcgctggaggcttatggtgccgcttatactctgcaggaaattctgactgtcaaatctgatgatactgtaggacgggttaaaacctttgaggcgattgtgaaaggcaacaacattccgaaaccgggcgtgccggagtccttcaaggtattgatcaaagaattgcagagcttggcgctggatgtcaaagtattggataaagacgatcaggagatcgatctgaaacagacctttgatgatgatgaggacgtaggtctgggccatatggacgacgatctgatggatatggaacacgtgaagaatgaggatgaattggcggactcttataccattgatgaaccagagaccgatgaagcggacagtttactggatgctaacgatttgctgggattggatgatgccgacgatttgttcgaagatgaaaatttttaaccggtgatttggccgggcgatcttttgaaatctgagatactgcccggcaaaacctgttttggattgccactcacgagtttatacaggaagaaggatcgcacttggaatttaatgtttttgaatcgatcaaaattggtttggcttcccccgatcagatccgccagtggtcgcacggtgtggtggaaaaaccggaaacaatcaattatcgtaccttaaaaccggagcgggacggcctgttttgcgagcgtatttttggaccgacaaaggactgggaatgctactgcggcaaatacaagcgtctgcgctacaaaggcaaagtttgtgagcgctgcggcgtagaagtgactcgcgccaaagtccgccgggaacggatgggccatatcgaacttgctgcaccggtttctcatatttggtattttaaaggaatcccctcccggatgggcctgattctggatatgtccccccgtctgttggagaaagtattgtattttgcatcttatgttgtgatcgatccaggccagacgcctttggagccgaaacagcttttgaacgaaaaagaataccgcgaaatgcgggaaaaatatgaagacgatttcagagccgggatgggtgcagaagcaatcaaagagctgctggcccaaatcgacctggagaagctttataatgaattgatggaagaattggaaaatgcttccggtcaaaaacgtatccggttactcaagcggctggaagtagtagaagcgttcaaaaaatctggcaataatcctacgtggatgattctggatgtggttccggttattcctccggatatccgtcccatggtgcagctggatggtggccgctttgccaccagtgatttaaacgatctgtatcgccgggtgatcaaccgcaataaccgtttaaaacgcttgctggaactgggtgcgccggatatcattgttcgcaacgaaaaacgtatgctgcaggaagcggtagacgcgctgattgataacggccgccgcggccgtccggttaccggaccgaacaaccggccgttgaaatctctgtccgatatgctgaaaggtaagcagggccgattccgccagaaccttttgggtaaacgtgttgactactccggccgttcggttatcgtcgtgggtccggaactgaaaatgtatcagtgcggtctgcccaaagagatggcgctggaactattcaagcctttcgttatgaagcgcctggtagataccggggcggcgacgaatatcaaaaacgccagaaaaatggtggaacgtgcccgcaccgaggtttgggatgcgttggatattgtaatcaaagaccatccggttttgttgaaccgtgcgcctacgttgcatagattgggcattcaagcgtttgagccagttttggtagaaggccgtgctcttaagctgcatccgttggtatgtactgcttacaacgccgacttcgacggcgatcagatggcggttcacgtgccgctatctgcagaagcacaggcggaagcccgctttctgatgttggccgccaacaacctgttgaaaccttccgacggtcgccctgtagcggttccaacgcaggatatggtgcttggttcttattatctgacattggaaaaagatggagaacccggcgagggaaaagcttttaccagcgtggaagaggcgatgatggcctataacgaaggtgtcattggtctgcacgcgaaaattaaagttcgcaaaacgaaagtaatcgacggcgaaacttactcgcaactgattgaaacgaccatgggtcgaatcattttcaatgatccgattccgcaggatttgggttatgttgaccgcagcaagccggagaatatgttcaagctggaagtcgagtttttggtcggcaaaaagcagttgggtcagattattgaaaaatgtatccggatgcatggcaccgctaccacagcggaagtgttggacagaattaaggcacagggctttaaatattctactcgcagcgctatcactgttgcagtttgtgacgcagtcattccgccgcagaaaaaggaactgatggaagaagccgatcagaagatcgaaaagattaccaagcagtaccgcagaggtttgatttccaatgatgagcgttatcagatggtcatcaaaacctggaacgaaaccactgacaaagtagcggacgccctgaaaaacaacctggataagtacaacccgatcttcatgatggccgactcgggtgctcgtggtagtatgaaccagatccgtcagctggccggtatgcgcggactgatcgccaacacctccggtaaagcgattgagatcccgattcgcgcgaactaccgtgaaggcttgaacattttggaatactttatttcttctcgaggcgcgagaaaaggtttggccgataccgcgctgcgtactgccgactccggttatctgaccagacgtctggtggacgtttctcaggaagtgattatccgtcagcacgattgcggtactcacgagggcatcgaggtttgtgacattcgcgatggcaacgagatgatcgaaccgtttaccgagcgcttgatgggccgttatcctgttgaggatgtattgcatccggaaactggtgagctgttggtgtccaaagacaaaatgatgaacgaaagcgacgccaaaaagattgtgaacgctggtatcacgaagctgaagatacgttccattctcaactgtgaatccaaatatggcgtttgcgccaaatgctatggcgacaatctggctaacggcaaacccgttgcagtgggcgaagcggttggtatcattgcggcacagtccatcggtgagcctggtacacagctgaccatgcgtacgttccatacgggcggtattgcgtcggctgatgatatcacgcagggccttccccgtgttgaggagctatttgaggccagaaagccgaagcatcaggcgattattagcaaaacttccggtgatgtccggatggaagaaatcaagaaaaaccgtcacattgtggtgttcaacaaagacactttggaagaagaaagctacctcattccttatggttctcgtctgaaagtttccgaaggggatcatgtggaggcaggcgatatgttaaccgaaggtgcggtgaacccgcatgatgtgctggcgattaaaggaccgctggcggttcaggactacctgatccaagaagtgcagcgtgtttaccggatgcagggtgttgacatcaatgataagcacattgaggtcatcgtccgccaaatgatgcgaaaatgccgcgtcgaagatgcgggcagcaccgatctgattaccggctcgttgatcgataaatctgaactgaccgaaaagaatcgcgagatccgtgcgcggatcgccgccggagaagagggcctgcaggaggcaactgcttctacgttgcttttgggtattaccaaggcctctctggcgaccgatagtttcctgtctgcggcgtctttccaggaaacgactcgtgttttgacagaagctgcgatcaaggggaaagtggatcctctgctgggtctaaaggaaaatgttattatcggtaaactagttccggccggtaccggtatgagctgctattctggcgtagagtatcaaaatgtaaacgcaaatccctattttaacgacattaaaattgatgttgaataggataaggcagttataaaatacagggggatgtcatccccctgtattttgtttgttttccagatatattttttcttttccgtataaaacgtgagaattatacaataatttttcctagaaaacggacaggtttgatgaatccgctattgacaaggtttgacctgcaatgctaaaataattaagctgtgtgtaataggtgaggtatgcctattcataacagagattgatattttgtgtaaaggagagttttctctctttacaataaaaatttatgtaaggaggtgcaatatgcctacttttaaccagctcgttcgcaaaggcagagaggtggttgagaaaaagtcgaccgcgcctgcactgctgaaaggatggaactccaaaaagcgtgtagccattgaccaaaattctccccaaaagcgtggcgtgtgtactgcaatcagaaccgcgaccccgaaaaagccaaactctgcattgagaaagatcgccagagtcaagctgaccaacggaatcgaggctaccgcctacatccccggtatcggccacaacctgcaggagcatagcgttgtactgattcgtggtggacgtgttaaggaccttcctggtgttcgttaccacatcatccgtggtactttggatgcacagggtgttgcaaagagaatgcaggcccgttccaaatacggcgccaaacgtccgaaggctggtgcttcgaagtaagaaatttccgattaggctgatttttgctgctgatgcagcggttaacatatagatatgttgccgtcgtattggcacaacgggagtttcgtcactttcgagtaccgatgaattcatactatatgaaggagggaagcaaagtgccaagaagaggtaatattgcaaaacgtgatgttttgcccgatccgctttacaattccaaactggttacccgtctgattaacagcgtaatgtacgatggtaaaaaaggcgttgcccagaaaattgtatatgatgcgtttgaaatcgttaaggagaaaaccggcaaggatcccctggaggctttcgaggccgctatggagaatattatgcctgttttggaggtaaaggcccgtcgtgtcggcggtgctacctatcaggttccgatggaggttcgccccgagagacgcgagaccttgggcctgcgttgggtaactctatacgccagaaatcgttcggaaagaacgatgaaagaaagactggccggcgagattatggacgctatcaacgagcagggcggcgcgttcaaaaaacgcgaggatacccacaaaatggcagaagcaaacaaggcttttgcacattacagatggtagtttgttatccaatatgggtaatgtgcgggtttttagcccgctgaaaacaaaggaaaactggtattgtgcgaacttttttcaaaagtctgcacgaacctatttgagtgattatcttgaaggaggacactatgccaagagacgtttcgcttgagcaaactcgtaatatcggcataatggcccacattgatgctggtaaaactaccacaaccgaacgtattttgtattacaccggcgtaaaccataaaatcggtgaaacacatgacggttcggcaacaatggactggatggcgcaggagcaggagagaggtattaccattacctctgctgcgactaccgcttactggaacggccatagaatcaatattatcgatacccccggacacgtggactttactgttgaggtagagcgttctttgcgtgttttggacggttcggttaccgtgttctgcgcaaaaggcggcgtagagcctcagtctgaaactgtatggcgtcaggctgacaaatatcacgtgccgagaatggcctttgtcaacaaaatggacattatgggcgcggacttttacaatgttctgcagatgatgcacgatcggttgaaatgtaacgcggttccgattcaactgcctatcgggtcggaaacattcttcaagggcattatcgacctcctggagatgaaagcttacatttataatgacagcaaagcactggtcaactacacggtggaagaaatccctgaggatatgaaggagaaagcggaagagtatcgtgccgctatgatcgagcatatcgcagagactgatgatgagttgatggaaaaatatctcgagggtgaagaattcaccttggaagagatgaaagcagccatccgcaaatccaccatcaataatacgatggtaccggttgtgtgcggtacagcttataagaacaaaggtgttcagaaactgctggatgcaattgtagattatatgcccgctccgactgatatcgagcatatcaagggcgtcaaccccgagactgaggaggaagaagaaagaccttcttccgacgatgagcctttcgcagcgctggcttttaagattgctactgacccgtatgtgggtaagctgtgcttcttccgtgtatattccggtacggtaactgcaggttctaccgtgtataactcggtgaaggatgacacggaaagaatgggacgtattctgcagatgcatgcaaatcacagaaaggatctggaggtttgttatgcaggcgatattgcggcagcggtaggattgaagaataccaccaccggcgataccttgtgcgacccgaaagcgccgatcattctggaatccatggaattcccggaaccggttatccgtgttgccattgagccgaaaaccaaagctggccaggagaaaatgggaattggtcttgcgaagttggcggaagaagaccccactttcaagacttataccgatcaggaaaccggccagaccatcatcgcaggtatgggcgagctgcatttggaaatcattgtagaccgtctgctgcgtgagtttaaagttgaggcgaatatcggtagcccgcaagttgcgtataaggaaacgatccgcaaatctgttgaggttgacaacaaatacgcccgtcagtccggcggtaaaggccagtacggtcacgttaagatcaaagtggaacacaacgaatccggcaagggttatgagttccgcaaccagatcgtcggcggcgcgatcccgaaagagtatatccctgctgttgacgctggtatccagggcgcaatgcaggccggtgttctggcgggatatcccgttgttgactgtattgtaacgctgttcgacggttcttatcatgaggtcgactcctctgaaatggcatttaagatcgccggctccatggccttcaaagaggcgatgagaaaggctgatccggtcattctggaacccatcatgaaagttgccgtcacgactcctgaggagtacatgggcgatgtaatcggtgacctgaactcccgccgtggccagatccagggtatggaaacccgcccgggcgcacagcagatcaatgcgtttgttccgctgtctgagatgttcggttattccaccgatctgcgttccaagacccagggacgcggccagtacgtaatggaacccagccactatattgaggttccgaagtcgattgcagaaggcatcatgaacgccagaagcaaaaaagattaatttttccgcataattgccggaaaagtcttgaatttttcggcctttattggtaaaataaccccataggcatgtacgaaaactatcttctaatataagggaggaaattcactaatggcaaaggcgaaatttgaaagaaccaaaccccatgttaacattggtaccatcggccacgttgaccatggtaaaaccactctgactgctgctatcaccaagactctggcgatgaaaggccaggcccagtacgaagcttatgatatgatcgataaggctcccgaagagagagagcgtggtatcaccatcaacaccgctcacgttgagtacgagacggatcatcgtcattacgctcacgttgactgccccggacatgctgactatgttaaaaacatgattaccggtgctgcgcagatggatggtgctattctggttgtttctgcggctgacggccccatgcctcagacccgtgagcacatcctgctgtcccgtcaggtaggcgttccctacattgtcgtattcatgaataaagctgatcaggttgacgaccccgagttgctcgaactggttgagatggaaattcgtgacctgctgaattcttatgagttcccgggcgacgatactcctatcattgttggttctgctctggctgcactggaagctcccgacgatctgagcaatcctgcttacgagccgatcctgaagctgatggatgctgttgacgagtacattcctactcctgagcggaaagcggatctgcctttcctgatgcctgttgaggacgtcttcaccatcactggtcgtggtaccgttgctaccggccgtgtagagagaggtcagttgaagaccggtgaggaaattgagatcatcggtttgaccgaggagagaaagaaaaccgttgttaccggtatcgagatgttcagaaagattctggattacgcggaagctggcgacaacatcggcgctctgctgcgtggtattcagagaaccgagatcgagcgtggtcaggttttgtgcaaacccggttctatcaatccccacacgaaattccatgcacaggtttatatcctgaaaaaagaggagggcggtcgtcatactccattcttcaacaactacagaccgcagttctatttcagaacaaccgacgttaccggtgttatcactctgcccgagggtgttgagatgtgtatgcctggtgataacgttgagatggatgttgaactgatcactcctatcgcaattgaagagggcctgcgtttcgctatccgtgagggcggcagaactgtaggttctggcgttgttaccaaaatcaacggctaattttaatgcaataaaaaactccagcatatgctggagttttttatatgtggataataagattttaagaaggctttacttttttggcagtaaacatggattgcctgacttgcaaattcggagcaatcttttccatattattccagatcctcagaaaagcgagggtcctgctgatacatttgccccagtccggcgagcatttccgtgaaacaatcatagtagtgctccgtaatatgcctttgccaggcagcaacgagtttttgtgcttcatcgcagtccgggcgttcttttttttcgagccaatgctgcgaaatgagaaaaaatgacctccatttctgatttgatattttcccaatcgctgtccgtatatttttttgttttttggcataagctgaggtgtttccccatcgtgttcgtacctcatcgacatatttttttcgagttttgttgatatctgtttggtcaaaagcggtaaacggcatgctgcattttccttttatcatttgatctgcatagcgaatcagtgcattcagttgcttccgttgtaaaatcagaagctgacgatgttgctgcaggactatattgggatcaaaggtgggactattcaaaatttgtataatttcttttaacagaatccggagttctttgagaaaaagaattggttggagctgccgcatctgatcggctccatacaaccgatagccactattggtgacctgtgccggatgcagtagaccaatttggtcgtaataatgtagcgtgcgcacgctgacgctggtcaaatcactgacttcctttacggttttcataaaatatgccccccttgacaagacgatcatacgctattacgcagcgtgagtgtcaagatattttgtaagaaaaagaaaaagagaaaaaacgctgtgttttttctctttttctttgggtagaaaggaaatttaagggagtatgggtttgcataaaatttgatcgatcttagtatccagaatgtgattggcatgagcagcgcgcataataacggctgtgtctgctccacgacctgtaccgccaatggagaggatgggcacattcggtgggataaaacctccatctgccgccatggcagcaatttctacgcagactttcatgccctgaccaaaaaagcgtagagtatgagcgatgatttctactggggcaacgccgccgaatttgccggtaatcccccgctctgccccgctgagggcgtgagaagaggcgtatacctggaatcctttttcccgcaactgctggatggtttcatcggtcaactcattttttcccggctctttgaatccatatgcatgtgggatacaaacgacgtttacaccatccaacgcagggaaacattgagcggtatagccagtagtagttgccagaacgacatggcgaatatcatagtttttgattgcctgtgtggcaatctcgattgtttttgcggtattttcttttccgggcgactcaaaatacatgacagatgctcctttcaaatttttttagacgatggagataggcgggatcaatgcgttctaaacaaagcgcaaaataaaaaagacagcaggtttcaacagagcagactttatttgttttcattataatggaacataacgaaaaagaaaagaggaatccaagaaaaaatggaggattagtaccaacaggaaaagagcaagcttggggaaaataaaaaaggcttgttgtaaatcggcgtttgttatgataaactaactttgtatccataagcatacagcatcgcaatccccaaaaagctttcgttttttatctgtctgatgaaaagaacgtcaggtaaaatgctgcgttgcttttaaagagtagtcgttttcagagaaaaagaatcgaggaatgagctttgcagagtgtgaaaaaaagaaagcgcgtgcaaagcgcgtttgaatggatggatgcgctggtctctgcggtgattatcgtagtgctgttatttacctttttgtttcgcaccattggcgtggagggtacttcgatggtgccaactttggccaatggagatcggctgattgtatcgcatctcttttaccggccaacaccaggtgatgtggttgtgattgttcagccagaaagcgatactcctgcgattatcaaaaggatcattgcggtagaaggccaaacagtggacattaatttcagctttggaacggttactgtggatgggcaggtgctggaggaagattatatcaacgaaccgacctatatgaagagagacgtggattttccggttacagtgccgcaaggatgtgtttttgtcatgggagataacagaaatcgttccttagacagccgggacagcagtattggaatggtagatcagcggtatattttgggaaaagccgttttccggcttttcccgtttcagaaaatcggattgatagaataaaggagaagataacatgaccgaagccccttcgattcagtggtttcctggccatatggcaaaaacaagacggctcatgcgggaaagcctgcgtctggtggatgtcgtggtagaagtaatcgacgcgagaatcccgatcagcagccggaatccggagttgccgggattggttgggcaaaagccgcgcattgtgctgctcaataaatgcgatgcagcggatgagatgataacgcgggactggtgtaattattataaagaacagggaattgcggcgatccctaccgattgccgcagcggtaaagggatcaaacagtttgtgccaaccgtgaaagaagtgctgcgcccattgttggagcgccgcgcgcaaaagggaatgcagggcgcacccatacgtatgatgattgtaggaattccaaacgtaggaaagtcctcgtttatcaatcggatggctggttcccgcaggacgaaagtggaagaccggcccggtgtgactcgcggccgtcaatgggtgaatttggaaaatgggattgatctgttggatatgccaggcattctttggccgaaatttgaagataagcgggtaggagagtatcttgcttttaccggcgcggtgaaagatgacatagttgacattgagcttttggcgatgcgcctgttggaacttttaaacgagcattaccatgaattgctgtgtgaacgatataagatgaccgacgaagaaacggcagatattgatgcgtatgatttgctggaattggtggcccaaaaacgcggtatgctgcaatccggcggtacagtcaatacagaacgggcagccatcgcggttctggatgaattccgcagtgggaaaattggtaaaattacgctggaaacgccgcaaaaaccgcagaaaaaagaacgattgcaaccgtcctttcaggaggaatgctgatggcgccccggaaaattccgccggatttatacgaattcgagcggatggcatatgccataaatgattttacatgggtttgcggggtggatgaagccgggcggggacctcttgcaggcccagtatttgccgctgcggtaattttacccaaagactttgcgatagaagggttgaatgattccaaaaagctcagtgaaaaaaaacgggaatttttatatgagaaaatcgtgcagcaagcggttgcctatcaaatttgtatggtggacgaaaaagagatcgatcggctgaatattttagctgcgtcaatgctggcgatgaaaaacgcggtagaagggctttctatctacccggacattgcctacatcgacggaaaccgcacaccggagctggaaattccggcgattgctgtgatcaagggtgacgcgacatcggcatctattgctgcggcatcgattttggcaaaagttgcccgggatcgttttatgatagaattggaccgtcaatatccccaatatagatttgcccgccacaaaggctatccgacaaaagaacattacgagcgcatcggccaatatggaatttcgcccgttcatcgaatcag

SEQ ID NO: 1524 - DNA, 32759 bp, Unknown
  16S sequences of unknown bacteria
tgatggcggcagttttggcctccagatccacatgggcgctttccacgccctccacagcggagagagccttctccacccgggcagagcagtgagcgcagctcatgccctccacctgcatcacacggacggcagtgccagcgggagccggtgcgggttctgccgcctcgcaggcagccggacaggcggcacaggcagctgccgggcaggccggagcttcggccttgggtgccgcaggagccgaaggggcagccggagcggaaacgctgggcttaaagagcttgagccgcagggcattggtgacaacgctcaccgagctgaagctcatggcggcagcggcgaacatgggattgagcttgagtccgaaggggataaacagcacgcccgcagccagcgggatgccgatggagttgtagaagaaggcccagaacagattctccttgatgttgcggatcaccgcacgggagagctcaatggcggcgacagcgtcgagcaggtcgctcttcatcaggacgatgtcggcggattcgatggcgacatcggtgccggcgccgatggcaatgcccacgtccgctcttgccagggcaggggcatcgttgatgccgtcgccgatcatggcgaccttcttgccctccgcctggagcttgcgcacttcctcctccttatcctgggggagaacctccgctaccacccggtcaatgccggtctggcggcggatggcttcggcggtctttttgttatcgccggtgagcatgaccacatcaatgcccagctttttgagctccgcaatagcctgacggctggtgggcttcaccacatccgccacggcaatgagtccgatgacggtgcggctgccctcagcttcccgtacaaagaagaggggggtcttgccctcgtctgccagacggtcggcctcggcttccagttcgcccgagtcaacgcccagggcgccgagcaggcggcggttgcccgcatggatggtgacaccgttcacccggccccggacgccctgaccttcggcagcgccgaagtcctcggcttcggggcaggcaattccggattcagcggcatactggacgatggcatctgccagcggatgctccgaacgcttttccactgccgctgccagcattaccagttcagctgcgtcggtgccgcccaggggaatcacatcggtcacccggggcttgccctcggtgacggtgccggtcttatccagaatgaccgtgttcaccagatgggcggtttccaggctctcggcgctcttgatgagaatgccgttttcagcacccttgccggtgcccaccatgatggccaccggagtggcaaggcccagagcgcagggacaggagatcaccagcaccgagatgccgatggagagggcaaagtcaaagctctgccccagcagcagccatacaatggtggcgatgagggcgatggtcatcacagtggggacgaacaccgccgccacctggtctgccagcttggcgatgggagccttggaggaggaagcctcctccaccaggcggatgatctgggccagggtggtgtcgtcgcccacccgggtggcccggaacttgatggagccgttcttgttgaccgtggcggcgatcacccggtcgtccaccgtcttttccaccgggatgctctcaccggtgagggcggattcgtccaccgaggtgcgcccctccaggatcacaccgtccaccggaatgctctgtccgggacggatcaccacaatatccccgggcacgacttcctccaccgggatctccacctccacgccggagcgctctacggtggcagttttgggggccaggtccatcagcttggtgatggcctcggaggtcttgctcttggagcgggcctccagccacttgccaaaggtgatcagggtcaggatggtggcggcgccctcaaagtagaggtccatggaataggccatgagcgccgcatggtccccggctacaaaggcaaaggagatctgatagatgatatagatgccatagatcatcgccgccgaggaacccaccgcaatgagggaatccatgttgggagagcggtgccacagggttttgaagccggtgaagaagtagttccggttcagatagagaatgggaagggtgagcaggaactgggtaaaggcaaaggccaggggattgtgcatgccgtccagccagccggggaccggaagtcccaccatgctgcccatcgagagatagaacagcggcaccaggaaaatgagcgaccgcaggaactgccgctttttggtttcggcctccttgagggtgaggttttccggaggttcggggcgggcggatttctgccgggccgcgtcagcgggggaagcgccgtagccggcctcctccaccagccgggaaatatccgacggcttcagggtggattcatcatagtccaccatcatattgttagccagcaggttcacattcaccgaacggatgccctccgctttggaaaggctcttttcgatgtgtgccgagcaggccgaacaggtcatgccggtgacaaggaatttctgtttcatggtttcacctcaacagtttcatgtaggttaaccctcccccggggagggggtgtttccgtctataattatactgtgaaagtgtagtttgtcaagaggggcgagaagattttcaggcaggtgggttttcggcttgccaaaggacggcggatattctacaatagaggggaaagatcaccaactggtgagagtaaaaaaggagatgaagccatgctgatatcctgctgcggaaaccgctgtgatgaatgtgagcggtatccgggggagtgtctcggctgtgcggccatcggcggaaaagcggagtggtgtgccagtctggatgtggaggtctgcccctttgtgacctgtgcggcagaaacaggagtttcccattgcggcgaatgtgaggagttcccctgtgagctctatgagctgaccctgtccgaggacgccggagaggaagaacgccgggcctttgccatggcacggtaccggaatttcggccttctggatgcccagcggtttttggaaaaacagtccgattgagtcggacgggagttttcccgtcccatgaccatcaaaataaaagagaagcaggtgtcttagttatgaatcgtatgctgaacaagaagagcatccgggatatttctcccaagggaaagcgggtcctggtgcgctgtgacttcaatgtgccgctggatggcagcaccatcaccgacgataagcgcatcaccgaggcgctgcccaccgtccgctatctgatggaacagggcggacgggtgatcctctgctcccatctgggacgccccaagggtcaggtgaaccccaagtacagcctggctccggtggcagcacggctttcggagctgctgggctgtgaagtgccgctctcggctgacatcatcggcgaagatgcccatcggatggctgattccctgaaggacggtcaggtcatgctgctggaaaatgtgcggttcgatcccagagaggaaaagaatgatcccgaatttgccaaggaactggcttccctggcagagctctatgtcaatgacgccttcggcactgcccatcgtgcccatgcctccaccgccggtgtggcagactatctgcccgctgtctgcggcttcctcatcgagaaggagatcggcttcctgggcggcgcgctggaagaccccaagcgtccctttactgccattctgggcggcgccaaggtatcggataagatcggcgtgatccgcagcctgctggaaaaggtggacagcctgctcatcggcggcggtatggcctataccttcatcaaggcacagggcggcgccattggggactcgctctgcgaggaggataagctggatctggctcgggatctgctgacggaggccagggaaaagggtgtgcgcctgctgctgccggtggacactgtgattgccgacgccttcagtgaggaggccaatacccgcactgttgccgccggggagatcccggacggctggcagggtctggacatcggcgaagccacccgggaactgtttgcccaggagatcaggaatgccgccactgtggtctggaacggacccatgggcgtctttgagatgaagaagttcgctgccggtaccgaggcagtggcaaaggctctggcagagagcgatgccatcaccatcatcggcggcggtgattcggctgcggctgcggctcagctgggctatgccgaccgcatcagccatatctccaccggcggcggtgcgtcgctggaattcctggagggtctggtgctgccgggtatcgcctgcctggaagacaagtaagcgcaggaggacagcatgaatcgggaaaagagaacgcctgtgatcgcaggcaactggaagatgaacagcggcagtccggcagaggcttcggctctgctgggcggtctgctggaggcctgccccaaggctccggcctgtgaggtggtagtctgcccagcagaaacagcgctggcactggcagccgacaccctccggggcagcgccattgccctgggcgcccagaactgccactttgccccgtccggtgcctataccggcgaggtatctgccgccatgctcaccggagtgggctgcacccatgtcatcatcggacattccgagcgccggcagtacttcggcgagaccaacgaaaccgccggaaagcgtctggcggcagcggtagccggagggctctgcggcatcctctgcgtgggcgagagcctggaacagcgggaggccggacaggagatcgaaacctgtgctgcccagcttgcgggcggcctggcggagattccggcggaggcactggcccatgtgatgatcgcctatgagccggtgtgggccatcggcaccggacgcaccgccactgcgcaggaggccaaccgggtatgcggcgagatccgccgcctgctggcagagcggtatggtacagaggcagccgacagggtgcgcattctgtacggcggctcgatgaatgagaagaacgccgcggaactgctggcccagccggagattgacggcgggctcatcggcggagcttctctcaagccggagagctttgccgccattatccgcgcctgtgaagcaggggaggcgaaggcatgaagcagccggtgatcctcattatcctggatggcttcggcattgcgccggacagccaggggaatgccattgcgctggcaaagaccccggtgaccgaccgtctgtggcgggaggtgccccatacccggctttccgcttcgggggaagatgtgggtctgcccgccggtcagatgggcaactccgaggtgggacacaccaacatcggtgccggacgggtggtctatcaggagctgagccgcatcacccgtgccgctcagaacggcgaactggaacagaatccggcgctccggcaggccgtggagcatatccgtgccaccggcggcagtctgcactttatggggctgctctcggacggcggtgtccacagccacaatacccacctctatgccatgatccgggctgccaggagcctgggggctgagaagatctatgtccatgccttcctggacggacgggactgtccgcccaagtcgggcctgggctttgtgaaggaactgcggcaggagctttctgccatcggcgccggaacactggctaccgtctgcggacggtactatgccatggaccgggacaaccgctgggagcgggtggcggaggcctatgatgccctgaccctgccgccggcggagatcgccgatccggaacagtgggtggaggagtcctaccgccaggagatcaccgatgagttcgtgaagcctgcggcctgctgtgagggcggacgcatttcggacggggacagcgtgatgttcttcaacttccgtcccgaccgggccagagagctcacccgggcgctgacccagccgggttttgacggctttgaaaagaaggcagccccgaaggatctctgctatgtctgcaccaccgtctatgacgacagcttcgaaggggtgctggtggccttcccgcccgagcgcccgtcccagaccctgggcgaagtggtttcccaggcggggctttcccagctgcgcatcgccgaaaccgagaaatacgcccatgtgaccttcttcctcaacggcggacgggaggagcccttcccgggcgaggaccgcattctggtgccgtccccgcaggtggcgacctacgatcttcagccggagatgagcgccccggaggtcaccgaaaaggtgaccgccgccatccgcagccggaagtatgggctgatcgtgctcaactttgccaactgtgatatggtcgggcataccggcagcattcccgcagccgtacaggcagtggaaacagtggaccggtgcctgggtgaggtgctggcggcggcagaggaggccggtatggcggcggtgattacagcggaccatggcaatgccgatgagatgctggcagaggacggcggccccaagacctcccacaccaccaatccggtgccgctgtgggtgactgtcccggggctggaactgcgttccggcggacgcctggcagacctggctcccactgtcctggaactgatgggactttcccagccggacgaaatgaccggcacatcgctgattgtgtaaaaaaacttcagccctgttcacagaaaattgatgatttttcaccagtattcacaggaaaaccggttgaggttttcgctgaaaagatttataataggaacaggtatacatacaataggattgttgccatctgacacagaaatcaaaaaccccagcaaaggagttgtttttatgaaaaagagtatctggatctccctggcggcatttgctatctttgtagcgggcgccctggcagctatcgccatctatatcagccgcaatggcagccgtctgatcggtgacgatgaatatgacgattatgatttcgatttcgatgaggacgaagatgcctcggatgaatactgcggtgaatgcgccattgatgatgacgcacagaagtcggttgtaatcgaggacaatgccagcgaggagaagtaaatctcccgtctggttcccatgatccatgcagggccctggtatacagccggggccctgtttttttaacttgtgccaaagaatcttcatttggttcagcaaaaataaatgggtttccccgcagatttccaaaaaatacaattagaattctatgaattagcacttatactaagcaactgctgaaaacctcttgaccgatggagggaaacattctataatctaacatatcgcctaaaggacaggaggaagtaccatggcaaattcggaacagaccaaacgagccctggccgaagggctgaaaactgcgctgcgcagtcaggagttcgaccagatcactgtggcggacatcaccgagtgcagcgaagtgagccgcaacacattttactaccatttccgggataaacaggaactggtggattggatcttccataccgatcttggtccggtgctccgggacagccgcccaggacgcacctggaatgaagccctgactgagctgctggcccgtctgcagcgcagccgggtattctatgccggtatcctgcgcaatcagggtcaggaccggttcagcagctgtctgtttgaggactgcagccagatggtaagcagcctgctggcccgccgcccgggagagctttctctggcggaacaggagatggctgcccggttctatgcccatgcagtcatcggattggcaatggattggattcgcggcgacacccaggcagaacctgaagagattgtcgccatgctgcagaagctgatcaatcgccgctgagtgaaaaactcccgcctggatcacaggcgggagttttttctgcgcataaaccacagctcccatgtccacactgatggatgaaaaggagcgtggtaccatggaatttgagaaaagcaggacctgggccaatctgatgagtgcctttgcaggtgaaagtcaggcccggaccaagtatgaaaattatgcccagaaggcttcggaacagggctatgagcagatcgcggccatcttccgggccactgccgccaatgagctggcccatgcgtcaatctggctggaagccctccatgaaggcgccctgccggataccctggtcaatctccaggatgcggcccagggcgagcattttgagtggagcagcatgtacaaggactatgccgagatcgcccgggaggagggctatacccgtctggcagcggcctttgagctgactgccagggtggaggcggagcatgaggcccggtaccggagcctgatcgggcatctggaacagggctccctttccaagcgtgccgaaaagactgtgtggatctgccggtactgcgggcatatccacgagggggaagcggctccgatgcgctgtccgctctgcggcaaggcccagggcttcttcgaggtgcacagccgggaagtgtgatccctctttatacgcaaaaaaccgtccggagctgtttgatacagccccggacggtttttgtattaaggaggagaaaacagatgagattcagaatttatttggcttccgccgcttccttttccatttcagcattcttggcttcgatgaaacggatcagggtttccactgcgccgtcaatgccgatgcagtcggtgcgcagggccagatgatagttctctgcccggccccacttcatgccggtgtagtagttgtagtagttggcacggcgcttgtcggtcttgttgatgagctcgaccacattgtcgctctctacgccgtaatcctctacaacacggcgaaccttgctctccatatccgagtggataaagacattgagcacattgggcttattgcgcaggacatagtccgcgcagcgtccgacaattacgcacgggcccttttctgccacgctctggatggttttggactgggcgataaacagcttatcgttgagcggcatatcgtagagtcccatggtattcccgtacatggacagcgaatagagcaggctgttggtgatattgcggtcattcttttcaaagagatgttctgcaaagccgctttcctcagcagccagtgtaatcagttccttgtcatagaaggggatgcccagccgttctgccagcttctgaccgatgagtcgtccgcccgaaccatactgacggctgatggtaatgatggtgttgtttttcataaacagcccttctttcttatatagatatccggaaaacggacgatggatcaaagagttccgattctctttgttcagctttattatagcacaggacttggaagaaatcaacaaaaaatatatacttttctatttttattactgcaaaataaactgaaccaacttattgttatgaataagttgccggatgcggtggagaatctgacccgggagcggggacatggacgcatattcttccgccccaggggataaatatggggacaggagggatagtatgattaccatttcactgcgtatggataagaagcgtctggcggctctggtgctggccctggctctggcaggggcgggagcggtgtgcgccaagcagatgctctggcagaatgtgatgccggcggaaagcaccgtatccgcccggaaggtgaatacagctgccgccaatgaacagcagcgccgggattttatggcggcgtacggctgggaggtggaggaggaaccgctggagatccaggaggtgctgatccccagcgagtttgacgaaacctatgaaaaatacaactacatccagaagcagcagggctttgatctgatccggtaccggggcaaggtgtgccggaagtatgtctatgcgctgccggggtacccgggcggcgtggaggacgcgcgcatcactctgctgatctacaaggatcgggtcatcggcggggacatcagttccccgtcagcggatgggttcatgcatgggtttgacgcctcttcgtcggtatggctgggactggagcagcttgcctgacctgcgcacttgagaaaacagccggggtatggtatccttgaatcagcaaaccgaaggaggagtaccccatggcaaagatgcgtctggaccggctgttggccggacagggcacccagacccgcaaggaggtccgggaactgatccggaaaggccgggtgacagtgaatggtcagccggaaaaggcagcggaccggcaggtggagccgctgaccgatgtgattgaggtggacggtgtcccgctgcgggtgcgggaacatgtctatctcatgctccacaagccccagggggtggtatccgccaccgaggaccggcatcagcccactgtggtggatctggtgccgccggaactgcgccggaagaatctcttccccgcgggccggctggacaaggataccgagggctttgtgctcatcaccgatgacggcgccttcgcccaccgcatcctcgccccgaagaacaagctccccaagcggtacaccgcagtgctggatcaccgtctggacccggcggtgatcggcgagttcgaaaagggcgtggacatcggcggcggggatcacaccctgccggcagagctcaccatcctggaaaacggggaaaacccccgggtatcggtgatcatctgcgagggaatgtaccatcagatcaagcggatgttcgagcggttcggctatcaggtgatctacctcaagcgggaacagatcggcggtctgcccctggcccccgccctgcccaagggcgcctgccgggagctgaccgatgaggaactccgccgtctggaggggaaggaaggagaggacgcgcagtgaaacgatgggatcgtctgtcccggggattccggcagctccggtggggcgtgtcggtatttaccggaaccctgagcatggctgcgggcatcttcacagctgggacggtgcagcggttccgcctgtggaagatcagcaagctggtctggattccgccggcagtgtggaccgccggtgggttcctgggcgtctgccgggcaacccgccgcctggagcgcagccgctcgcgccgccgtacataaatacgcagccgcaccgggccggagagaccttctccggagccggtgctttttatatacaaatttgtttggacagtgatacaaaaaccaccatttgaattgattcacccgatgccctgtgataaaatatcagggtagtgtattgcagtatcagattagaggagtgaatagaaatgaatggaaaagtccgtcggttctacgaggaactggctgcgatgtccggcttgcgcctggaccccgagggcggtgccctgtacggcacttacaagggctatggcgtagcagtcctggcccccaacccttcctatccgtaccagatgtgcgcggtgttctccgccagccgtccggatggcccgctcaccaaggaggaatgcaagcagttcctcaaggagcataaggctgcggcggatctcagccagaatggatggcagatcaccatgatcatccggggcggcatgggacagaagcatctccgggagaactttgtgcagtcgctggaggatacaaccgcctatctgcgcagcgccggtttcaccgactgctgccagtcctgcggcaaggtgacagaaaccgatctgtgctgtgtggcaggcgcctatgagcacctctgcccggactgctatgcagccctccagcagagcagaaaccaggagtccatgcggcaggccggcaagggcgagaacatcaccggcggtctggtgggcgctctgctcggcagcctggtgggcgtggtgagcatcatcatcttcagccagctgtgctatgtggcagctctctcgggcgtgatcatggcagtctgcaccctcaagggctatgaaatgctcggcggaaacctctcccgcaagggtgtggcactctgcgtggtgctcatgctggcgatgaccttcgtgggcgaccgtctggactgggcgatcctggtgtcccgggagctgggatacagcttcctgacctccttccgcctgatccccgccctcattgaggcagacatcatcgaggcttcctcctactggaccaacctggtgatgctctatctcttcctgctgctgggcatggttcccaccgtgcgcaattcgctggtgtcccgtgccaacgcaagccgcatctaccgtctggaaaagtccggcacccggatgtaaccgtctgccggtgcagtaaaaaaatccccttcccgtgattccgggaaggggatttttggtttctgtgacagggccggggctcagcgcagggcgggacggagggccggcgactggttcagcgaacggtccaccttggagcgcaccggggtaaagactgcgtaggtggtgaattcagcggcaaagagtgccagccatacaccggtttcgccccagagcaccgagaagagcatcagggcggcggtgatgagcaccacgccccggagtacggcgatcaccgaggtgtagcgcaccttttccagcgactggagggcgtacatcatcacggtgttgaggccggtgaaggggaaggccaggaagtagagccgcatggcccggattcccatgggcaccagggagggctccacaaacaccggcatgatgaagccggcgcagagcaccaggatcagatagatcacggtggagaaaatggcggcggcagtcatggcgcagcggttggcggcccggacacggtcataccgtccggcgccgtagctggtgctgaggatgggctgggcagcctgggccatgccgttgaagacgcccttgcccacataggcgatgttggagagcaccgagaagatggccacagccgcttcgccgctgacccggagcagggcgatattgaagagcaggacgatgagtccggcggagagttccagaatgctggagccgatgccgttccggagcacccggacacaggcggcggggtcaaagaagttccgggtcaggtgcaggtggttctggtgcagggcaaagtggagcaggtagagcagtacagccacacagtgtccgaggatggttgccagaccggcaccgaacatgcccatgcccagcttcatggtaaagacatagtccagcacgatattgcagatattgccggtggtgccggcgatcatcaccagacgggggttgccgtccgcccggatgatgacgcccagggtgccggagaaaatataggcaaaggcgagcaggttgatggggcgcatatagtccaccacttcggtgagaatgcggtcagtggcgccgaataccgggccagcggcacaatgaacaccgaggtgagcagggtcagggtcaggcccacaactgccagcagtaccatcgactgggtaaagacccggttggtctgctgggtctgtccctgtccggtgaggatggaggcagtggtggcagtgccgacgcccaccatcaggctgaaagcggaaaagagggtgaataccggcagggccacattcagggcagccaggccgtcgctgcccacagccgcccccacaaagaacacatctaccatgcagtagaaggaatgggcgatctgtccgatgagggtggggagcagatagcggaagtaatcactctgcacctcccggcgcacggtcggatcgatggacacagaagcagtcatggagcaaaaggcctctcttttttctgaaaatagggcggcagaagaagccttccacgcccgcacccgagattctacctcggggcagacgaaaaagaaagtgggataccggacggaaaaatccggggaaataccgccttttttgccggtctgcacaagcagccggggaaaatgcagggaggccgggggatagcgtcaaattgcacaaagcattcccagcacctgcccgttctggaaaaaattctctgcaataatatctaaaaaatcctgcacagtatagtagaatctgtcagaagaaaggggggagttttggaaacctaagctttgtgcttcaatacaaaatccagggaaatccaggcgcaaaataggcaatctgccggaaagttagcaaaaaatagacaaaaacttgcaacttttatcgtgatttctattgcaaaacaggcgggttttatgtacaatagtgtgtgtattggctatactgacgaaagtttgcactgaaatcatagcgaagaggggtaaagaattatgtctaaccggttattccagggcattatccaccagatgcgggattccatcgaccgtgtgatcggcgttgtggacgatactgctaccgttatctcctgcagcgatctcacccgcatcggggagaccagtgaatatctcatgctggacatgggggaaaatcaggatctgtttgtgcgggatggatatacctacaagccgttcggttccaagtccaagccggagtttgcggtctttgtggagggctcggacgaaatggctgcccggtactgcggcattctggctgtggcactgtccggcatcaagcagtattatgacgagaagtatgaccgcaacaacttcatcaagaatgtaatcctcgacaacatcctgcccggcgacatctatgtcaaggcccgggaaatgcacttcaattcggatgtgagccgggtggttctgctggtgcggatcgtctcctccaatgatatctccgccttcgatgtgatccagaacctgttccccaacaagcagaaggactttgtcttcaatatcagcgagagtgacatcgtgctggtcaaggagatcaaggccggcatcgattccaaggacctggaaaagctggcccgttccattgtggatactctgggcggcgagttctataccaaggttgttgtgggtatcggcaccactgttgtgggcgtcaaggatctggccaagagcttcaaggaagcacaggtcgcgctggaagtgggcaaggtatttgataccgaaaaggccattgtcagctatgataacctgggcatcgcccgtctgatctatcagctccccaccaccctgtgtgaaatgttcctcaaggaagtattcaagaagggttccatcgagagcctggatcaggagactctgttcaccatccagaagttctttgaaaacaatctgaatgtatcggaaacttccagaaagctgttcgtacaccgcaataccctggtttaccggctggagaagatcaagaagctcaccggtctggatctgcgggagttcgatcacgccatcatcttcaaggttgccctgatggtcaagaagtatctgacagccaatcccgtcaagtattgatcccgctgcgggaaccagcacctgacagttctgaaaaagaccgtataatcccaaatgagtcattgtctgcaaggcggtaattgagtgtgattaaactgacaaatgtatccaagcggtacccttccggaaatctggcactcgacaatgtgagtttggatatcgataaaggcgaatttgtgtttattgtcggctcttcgggagcgggcaagagtacgctgatgcgccttttgcttcgggaagaaactcccacttccggccgtgtgattgtaaatggtcggaatgtaggggagatgaagcggcgtgatatcccctatttccggcggacgctcggcgtggtgtttcaggatttccgcctgattcccacaatgaatgtgtatgacaatgtggcctttgccctgcgtgccaccaatgtatccaataaggatatccggcagcgtgtgccctatattctcaatctggtgggcctgcagggaaaagcccgcagcatgccggagcagatctccggcggcgaacagcagcgtgtggccctggcccgggcgctggtcaacaatccggatctcatcctggcggacgagcccaccggcaatatcgacccggaactctcctatgagatcgtggagctgctcaccgagatcaataaagtgggtaccaccattgtaatggtcacccatgaacatgaactggttgcgcagttcgatcatcgcatcattcagatcgaaaagggccgcctggtggcggataccggcaaaataggaggtcacaatgggaggaagtagtatcgggtaccttctgcgggaaggcgcccggaatatctatgcaaacaaacagatgtcggtggcagccatcggtgtactggtggcctgtatgctgctgatcggtgcttccattgtgttcagcttcaatgccaacagctttgtaggctatgtggaagcacagaatgaagtagtggtgttcctcaaggataacctgagtgacgaccgcatttccgaagtggaacagcagctgaagaataccgagaatgtatcggcagtccggttcatcagcaaggaagagggtctggacagctgggtacagtccatgagcggtgtggctgaaaacagcgaggagctgtttgcccccctctatgaggacaatatcatgcccgattccttcagcgtgaccatccgggatctttcccagctggacgccaccgtacaggtgctgtccgattacgatgatgtggactatgtccgggcgccggaacaggtggcccagaccatcaccatcatcaagcatgctgtcaacctgggcggcgcagccattgtgctgctgctcatcggcgtagcatcgatgatcattgccaacaccatcaagatcaccgtattcaaccgccgcaaggaaatcagcatcatgaagtatgtgggcgcaacggatatgtttatccgcctgccctttattgtggaagggctcctgctcggcctgctctccgcttcggtggccttcctgctgatctgggggctctattccctgctggtacactggctggcaggcgagggtgtgggctggctgaccttcctcaccgagaacctggtgcccttcggctctatggcactgccgctcatgggctgcttcctgtttgtgggagttgccatcggcaccttgggcagcataatctttgtgcgtaaatacctgaaagtataacggcagccattcccccggggatgggcagaaaaagaggcgataccccatgcatcagacatacagacggctgatcgcgctgacactctgtgccggcctgatcaccacagcattcagtacacagtcggagaagctctggcaggtaagctatgcggacaccacagtaagctcggatgaccaggcgcagatcgacgacctgaacaaccagtatgaagaactggaggaacatcagaaggagatccaggcgcagattgacgcagccaagagtgaaaaggacaagtatctggcagagaagaatcagctcaatggtcagatcgacaatacccaggcgcagatcaatgtgctcaccgacaagatcaccctgctggacaatatgatcgcggagaacaacgcaagcattgcgaatctggaagaggagatcgataaggattatgagatcttccgccagcgggcccgggcttcctatatgtccggggacagcagcaccatcagcctgctgctgggtgctgacagcttttccgatttcctgatgaaggcggacatcaccgcccgggtagcggaaaatgaccgggagatcattgccggcctggaagccaacattgcggagctggaaaagctccaggaggaaaatgaggccaacaaggcggatctcaacgagtccaagggtaccctggacgagaagaagcagcagctcaatggtcaggtgagccagatccaggggcagatcgaggacatcgatgccctgcagaagcagtatgaggccaacaaggcagagatcgacaagatgatggcgcaggtacagagcgaaatcaacgacatctatgcctcctatgagtcccagggcgaatataccggcggcgtcatgacctggcctgtacccggttacaccggcatcaccagctactatggctggcgcttcaacaacaccgacttccacaccggcattgatatttccggctccaatatctacggacggaatatcgtggcggcagcggacggcgttgtcatcaaggcccaggagacctatgtccagggcgtaggctatggaaggtacctcatcatcgaccatggcggcaatatctccaccctgtatggtcataccagccagctgctggtatccgagggcgatcatgtcacccgcggacaggccattgccaaggtgggttccaccggctggagtaccggcccgcatctgcacttcgaggtgcgtgaaaacggtaccgctgtcaatccgctcagcggctatctcaagccctgatcacacagaacagcatgttcagacaggctgcggctttccccgtgggaggcggcagcctgtttttcatgggaaaatcccgggtgttcacagaatttttaccttcggggcacagattctgtccccaaggctgtggaaactgtgttatactataccggtagacctctgccgtcccatgcggcagaaccagaggcaggagttgaatcaatgaacagaaaaatttcactgggcgtcgccattgcgctgatgtccctggcggcggcggtagccattgtcattacggcaggctactccatgtacgacttcaacggccggatgcaaagcctgcgggaaagtgaagtcatgtacagcaaactcaatgagatcgacggatatgtccgtcagaacttttatggggatattgatgaggaagaactgatgaatgccgtagccaagggctatgtcagcggcctgggcgacaagtatgcccggtatatgacccccgaggaatatcaggcacagatggaagcctatgagagccagaaggcctccatcggcgtcagcgttgtcatgggccccagcggttatatgaaggtcatcgaggtctttgccgattccccggcagaggaagccggcattgaagtgggcgacctcattgtggaagtggaaggcaccatggtcactgccgataactattcggaactgagcacctccatgggcggcgaggaaggctccaccctgaacctggtggtccgccgggacagccaggacgatgatgtggagatcgtccgccggaatatcgaagtgcccatggtcacctgggaacagtacggcgatgtgggctatatcaagatcaaggagttccacaacaatactcctgcccagttcaataccgccctcaagcagctcaccggcaatggcgtcaaggcgctgatttttgatgtgcgcaacaaccccggcggcaccattgactcggtggtggatatgctggataccctgctgcccgaaggcgatctggtatcggctacctatcacgacggtcataccgaggtgctgggcaccagtgacgccgatgaggtgaacctccccatggtggtgatcaccaacgagaataccgccagtgcggcagagctgtttgcccaggccatcaaggattacaacaagggccgtaccgtaggcacccagacctatggcaagggcgtaatgcagaccatctatcccctgagcgacggcggcgccctgagcatcaccgtagccaagtacaatccccccaagagcgagaactttgacggggtaggcgtcaagccggattacgcggtgcagctcacagcggaacagcagcgcaacttctatgagctggatgaggagaccgatccccagctgaagaaggcactggagctggcggaagcggtgatcaagaccggcggctttgacggcctgagcgagatccccgagagcagctcggaagaggagaccgaggaggatacctccagcgaagaggagaccgcttcggaggagacttcgtcggaggaggagagcagcgaagagagctcttccgaggacgaagctgcataagctccaactgaataccagggaaaaatcccacaggcggcagattccagtatctgccgcctgttttgccaaataaatcaccgggaagtgcggatcagacagctttcgcacttgacaccggggactgattttactataatactgatattatgcgtcgcaggacgcacatttgtttgactgaactgcaccagaaagggtgattgctttggataagattttgatgacacaggagggctttgacaagctccaggaagaactgcatcagctgcgcaccactggtcgtgcggaagtatccgagaagatccgtatagcccgtggattcggtgacctgtccgagaacagtgagtatgatgaggccaagaatgaccaggctgtcatggaagcccgcatcgcacagctggaggaacagctcaagcatgtggagatcatcgaccatgatgatattgccaccgatgctgtatcggttggttcgctggtcaagatcctggatgtggaatacggcgatgagatgacctatcgcattgtatcgtccctggaatcgggcggcgaaggtgaaaccatcaccgataagtcgccggtaggccaggctctgctgggccataaggtgggcgaagtggtagaggttcaggctccggctggcgtgatcagcttcaagatcctggagatctcccggtaaagaacagtgttttgacagatgcggacagaaatgtccgcattttgtgttgctatgggaaaaagtcaaattccgccgctggacaaacggctaaaacatgataaaataaaaaggtaacgttaattatacagggagtgtaaaatagatgagtgaacggaacaatacccccgtacaggaggaagttcagaccggcgagagcctttcggaactgctccagatccgacggaacaagctcaatgaactgatggaatcgggtcagaatccctatgagatcacccgttttgatgtagatgcccatgccaaggaaattgtggatggctttgacaatggctttgagggccgtcatgtatccattgccggccgtattatgagctggcgtgatatgggtaaggccaacttcatcgacctgcaggatggcagcggccgcatccagatctatgtaaagatcaatgagatcggcgaggaagccttccgtcagttcggcaagtgggacctgggcgacatcatcggcgtggaaggcgaagtattccgcacccgccggggtgagatctcggtgaaggctgaaaagctgaccctgctctccaagagcctgcgtccgctgccggaaaagtggcatggcctcaaggacaccgatgcccggtaccgtcagcgctatctggacctgatggtgaacctcgatgtgaagaagaccttcatcactcgttccaagttcatcaagttcatgcgcagctatctggacgatatgggctatatcgaagtggaaaccccggtgctcaataccattgccggcggtgccgctgcccgtccgttcatcacccatcacaatacgctggacattgatatgtatatgcgcatcgccaccgagctgccgctgaagcgtctgatcgtgggcggtatggagcgcgtctatgagatcggacgcatcttccgcaatgagggcatggaccccaagcacaaccccgaattcaccacggtggagctctaccaggcctacactgatttccatggcatgatggatattgccgagggcattctctcgggtgctgccaaggagatcctgggcacctatgagatccagtggcagggcgagaccatcgacctgacccccggctggcgccgtctgaccatggtagaggccgtacgggagtatgtgggcattgactttgatgccatcaccgacgatgctgaagctgtggctgctgccaaggctgtgggcgtggagctggctgaaactgccgacaagacctggggcaacgcactctatgcctgcttcgatcagaaggtagaggagaagctgatccagccgaccttcatcaccatgtatccggtggaggtatccccgctgaccaagcgcagccccaaggacccccgcctgactgagcggttcgagctgtttgtctgccacagcgagctggcaaacgcctattccgagctcaacgatcccatcgatcagcgtcagcggtttgaaaagcaggtggaactgcgtgaccgcggcgatgatgaaactgaaatgctggatgaggacttcctcatggcactggaatacgccatgccgcccacgggtggtatgggcatgggcatcgaccgtgctgtcatgatgctcaccaactcggatacaatccgggaagtaattctgttccccaccatgaagccgctgggcaccggtgatcgccgggaggaaaaggcagcagctgccgctccggctgcggttcccatgaaggaagcagtcacagagccggtggacttctccaaggtggagatcgagccgctgttccaggatatgatcgactacgagacctttgccaagtcggattaccgggttgtgaaggtcaaggcctgcgaggcagtgcccaagagcaagaagctgctcaagttcgtgctggacgatggctcgggtgaggaccgtgtgatcctcagcggcatccatgagtactatgagccggaggagctggtgggcaagaccctgattgccatcaccaacctgctgccccggaagatgatgggcatcgactcctgcggcatgctcatcagcgccgtacacagtgaggacggcaaggaagggctcaatctgctgatggtggacgaccgcatccccgccggcgccaagctctactgatccccggtgccgccggacaggctgttccggcagtgacatatcagatatgaaatgacggcagactctcagctgagtctgccgtcttttttgtatccggttcagggggttgtttcgctggagaacccaagggaggtgatggaggcggtcacgctcatgtgggcaaggtgtaccatctcccgcagctcctcaaaggagatcctgtcctggttgaggaaccagtccttcaccagggtcagcagcccggcattggagtaatccagcaggcactgcacccggatatccactgtcggggacttggtcaggtacttgatccaggtgatggtgtgctccttgaacttgtgggaaaggtgattgacaaagttgagctcatgatcccgggtgaaaaagagctggaaaatgtccgcatggtcccggaagaattccagggtccggtcaatatccgccagaaggatctcatagcggttggtattgagggtggggtgcagatccttgtagatctccaggatcttgtcgatccattcatcttctaccgagagcaataagtcctgtttgttgtcatagtgggcatagaaggtgttcttgctgatatagatgtcccggcagatcatatcaatggtgatgtcccggtaaggtgtagtccggagcagctccataaaacggtggcggatcatccgttccgtgcgtatgaagcgcttgtccctgcttttgtctgacatggtttctcctgatttacagtactttttcgcaatttggttcgttatcgaagtttatagaataatcttactaaaactgaagcgggatttcaattataattggggcaaaagttcaaggaggaatcacaatgagcgatagactgaaaggaaaagttgccatcattaccggctgcaattccggaattggttttgcaactgtgaagctgtttctgcaggagggtgccaaggtggtcggcactgacatccgggtggacaatgccctgaagtttgccgaggagcatccggatgactatactgtgctccgtgccgatgccactgaggaagctgactgggaaaaggcctgccagactgcggtggagaagtatggcaagctcaccaccatctgcaatattgccggtattgtaaagggaatcgagctgccggatgtcaccaaggaatccttcctgaagatgcaggaggtcaatgcgtacagcactctgctgggcatgcagatcggttacaagtacctggaaaagggcgctggctcttcgattgtcaacaccggttccatggcatcggtgcatggagatccctactgctcgtcccatgacattgcctactcggcttccaaggccggcatccggtatatgacccggtatgctgcctgggattacggcaaggacagcatccgtgtgaacgcggttattcccggcggtgtgatcactcccatcctgagcaacaacaatgtcaagatcgatgaatccaagccgcagcctgactatatgacctatgtggcctgtccgccctacttctgcgaagcagaggatctgggctggggatatgtctacctggcatcggacgaagcccgctgtgtcaccggtattgatctggtgatcgactgcggctggactgccaagtaactgagccgcatcccggttccgggaaaacagaatacatccgcctgaccggagagggattgtcctctccggtttctttttgtgcggcagtctgccttctccgggtggaaattggaaaaactgtgaataaatcatggacagcgattcacaggattctggaaatgttcagccccaggttacaacttttatgccggaaaaaggtatactgtgttgtgttgcttgtgtggtgcataaggagtgtttttatggattcgctgtatcttgcattggggctcttctttctctattccttcttcggatggctggctgaagtcgccttctcggctgtgagccgcaaaaagtttgtcaataccggtttcctcaccggcccggtctgtcccatctatggcgtgggcatcctgtttatcctgcgcttcctggaaccgctgcggaatgacctgttcttcctctttgtgggcagtaccgtagttgccaccgtgctggaatatgccaccaaccgcttcctggaaggccttaccggtaccaagtggtgggattacagccggttccgcttccacttcggcggctatgtctgtctgccgttttccgccttctggggcgcgggcgctgttgtcatcgtccgctggatcaaccccctggttgtccggctggtgcagctgatccccgttcccgtcggtcgggtgatcctgctgggctgtgtgatcctgctcggcctggacctgattgccaccgccggcaccatggtgcggatgcgccgtcagtttgcccttacacccgagcagatggaggccctggaacaggctgccagcctcccgggacggctcagcgaagccatcctcggacgcatccagcgccgtatggagcgcaccgttccccagctctcccggtatgaggaagctgcccgggccttccgggaacaccaggaagctgccagcggcgtctttgcctatggctgcggcttctataagctcgtgtggctcttcggcatcggcgctttcctgggtgacatcatcgaaaccatctactgccatgccaccgcaggagtgtggatgagccgcagcagtgtgctgtacggcccgttcagcatcgtgtggggactgggcgccgtactgatgaccgtcatgctcgaacgcctccgccaccgggacagcgtcgctgtctttctggcaggcaccgtcctgggcggcgtgtatgaatatgtgtgcagcgtctttaccgaagtgatgttcgggactgtgttctgggattacagcgccttcaaattcaacctcggcggacgcatcaacctgctctactgcttcttctggggcatggcggcagtggtgtggatcaagggggtttatcccttcctgtccgaccgcatcgaacgcctgcccatccggctgggccgggtgctcacctgggtctttgtggtgttcatgtcggtgaatatcaccctgtccggtctggctctggcccggtattcccagcgggcttcgggtgtggatacaccgcccactgccctgagcaccttcctggacgaacactatcccgatgagcggatgcggcgagtctatcccaatgccgtccacaccgactgaccgctccggcagattgccttaaaatctgcttattccgggacggaacttctatggaaatttcgtccggaatccgcaattttttatagacaaatggcggatgggagagtataataaggacaaagcaaaacctttaagttggtcccgtgaggctgacaaggaatcggctgcgtcgaatagagaacagatcctgtacggaacaccggggaagtttcccgggactccggagtgattttggatagctgaagccttatctgccatgcggataaggctttttctttttgcagccggaggggaggaaaccgcagttatggcggaaaaaaccgtaattatggacgcccaggccatcagccgggcaattacccggatctcctttgagatcgtagagcgcaaccggggtgcggaggatctgtgcctgatcggcatccgcagcggcggcgccgtactggcccgtcggatcgctgaccgcatcggagagatcgaaaaccgtccggtggaatgcggggaactggacatcaccctgttccgggacgacggcagcgcgccggagggctatgaggatcattcccgcctggatttctccattgacgggaagcgtgtggtgctcatcgatgatgtgatctataccggacgcagtgtccgggctgccatcgatgccattatgagccggggacgcccccggaacatccagctggcgatcctggtggaccgggcggacttcatcggcaagaacctgcccacctccaaggaagagatggtggaggtccaggcagacggcggtcctgaggactgtgtagccattgtaaagtgacaggagggaagattttgagcagtatcctgattcgcaatgcccgggtactttccccggcagacgaccttgaccgtgtgatgaatgtctatgtggaaaacggcgtcatcaccgaactggacagcacccgcacccaggcggacaccgtcctggaggcagacggtctggtgctggctcccggtctggtggatatgcatgtccacctgcgggacccgggcctgacctataaggaggatatcctcaccggctgtgaagcagcagcccggggcggattcacctcggtggtatgcatgcccaataccaatccccccattgataataccgataccatccgctatattctggaaaaggcggaacatgccaaagcccgggtctatccggtgtgcaccatcacccggggcatgaagggcaccgagctcagcgattttgcggcgctgaaggcagccggagcggttgccgccagtgatgacggcaagccggtagccaatgccgcagtgatgcaggcgggtatggaagcctgctacaagctggatctgccggtggtgagccactgcgaggatctggacatcatcgccggaggcatcatcaacaagggtgctgtgtccgaggcgctgggggtcaagggcatggaccgcaccagtgaggacaccatcactgcccgggaagtgaccctggcagagagcaccggcacccgcatccacatctgccatgtgtccaccgaaacttcggtggcactgatccgggacgccaagaagcggggcgtacaggtcacctgcgagagtgctccccactatatgctgctcaccgacaaggaactgctgcggcgggacgccaactggcgcatgaatcccccgctccgggaacagcgggactgcgaagccatcattgagggcttctgcgatgggaccatcgatgcgatgatcaccgaccacgctccccactccccggaggagaaggctgactttgaaaaggcccccaacggcatcatcggcctggaaaccagctttgcagccagctgcacggctctggtggcctcgggccggatgagcctggcccggctcatcgaagtgatgagcgtcaatccctgccggattctttcgattcccggcggcgagatcagggtgggcggcccggcagacctggtgctgctggctccggaggagcgctggaccttcaccgaggcagacatcggttccaagtcccggaacaccccgttcctgggcaccgaattcaccggtcgggtacactgcaccatcaagggcggcgagatcacctggcagctcaagaagtaagcggacacgccctggcgtgtgatcataaagactgacaagacggaggagaagaattatgtcatttgaccgactgatccgaaagatcgtggaaaccaagaaccccaccgtagtgggtctggaccccaagctggaatatatccccgaagaactgaaggcagaggcctacgccaagtacggcaagactctggaaggcgctgctgaagccattctcagcttcaacaagggcattatcgatgccatctgtgatgtggttcccgccgtcaagccccagtgcgctttctatgagcggttcggctggcagggcatgaaggcactggctgaaaccattgcctatgccaaggaaaagggcatgttcgtcatcattgacggcaagcgcaacgacatcggctccaccatgactgcctatgcagtggcccacctgggcgatgtggaagtggaaggcgaggtttacactcccttcggcggcgatgccctcactgtaaacggttacctgggcaccgatggtatctctccgctcaccgacatctgcgtcaagaaggacgccggtatctttgtactggtcaagacttccaacccctcttccggcgagctgcaggaccgcagcctggaaggccgtcctctctacgccgccatgggtgagatgtgcgagaagtggggcgagagctgcatgggcgagctgggttactcggctgtgggcgctgtggtaggcgctacctatcccgagcagctggctgagatgcgcaaggctatgccgcacaccttcctgctggtacccggctatggtgcccagggcggcggcgccaaggatgtcatcggcgcctttgatgagaagggcctcggcgccatcgtcaactcctcccgtgcggttctcactgcctggcagaagcagaactgtcccggcagtgaatatgccgctgccgcccgggacgaggcgatccgtatgcgggacgacatcacccagtaccttcccgaaatccgactctaattcccagacacaggaggtcttttgagtatgagcgaaaatcgtaaatccgccgcgctgattctggccgacgggactgtttaccggggtgtgagcttcggcgctgccggcactgtctttggtgagatcgtattcaccaccggtgtatccggcttccaggaaaccctgactgatccctccaactttggtcagatcgtggtgcagaccttcccgtctgtgggcggctacggcgtcaacaaggacgactatgcctccgaccgctgccatctcagcggctatgtggtacgcagcgtcaccgagctgccttccaactacaagatgactgaaaccctgggtcagttcgtgactgagcagggcgttgtgggcatcgaagatgtggatacccgtgccatcacccggcatatccgggacttcggttccatgaacgccatgatctccaccgagcatctggagcccaccgctgaggtgctggaacagatccgctcctggaagatggaaaaggctgtggaaagcgttgtgtctgccggcggcgagtacccggcagcagaggagaagaagcatgtctgcatggtggacttcggtcggagaaacggctcggtggatgcccttaaccactatggcatcggcgtgactgtcctgccctgcaccactccggtggaggagctgctggcagtgaagtgcgatggctatgtcctctccgagggccccggcgatcccgctgcctgtgagaagtatctgccggcagtcaaggctctgatggagtcgggcagaccggtactgggcctgggcctgggtcaccagctcatggcactgagccagggcgctgcctgtgaaaagctgctccatggtcaccggggcgccaaccagccggtgaaaaacctggagaccggtcatgtgtatgtcaccacccagaaccacagctatgcggtcaaggcggacagcctgccggcctttgcaaaggtcactgaaaagaacctcaacgatgataccactgccgccattgtctatgatggaatgccggccttctcggtacagtacaatcccgagagtgtggtgggcggccgggataagggcgccgtatatcgccggtttatggaactgatgtcgacagggaggaactgagtacaatgccgctgagaaatgatctgaagaaagtaatggtaatcggctctggtccgatcatcatcggtcaggctgccgaatttgactatgccggtacccaggcctgccgggccctcaaggaagagggactggaagtggtactggtcaactccaaccctgctaccatcatgaccgataaggccatggcagacaaggtctatatcgaaccgctgaccctggatgtggtcaagcgcatcattgaaattgaaaagcccgatggcctgctctccaccctgggcggacagaccggcctgaccctgtcgatgcagctggataaggacggcttcctggcggaacacaatgtgcgtctgctgggcgccaagcgctccaccatcgataaggctgaggaccgccagatgttcaaggacaccatggagaagatcggtcagccctgtatcccctccaaggttgtggaaaatctgcccgatgccatcgccttcaccgaggagatcggcctgcctgtcatcatccgtccggccttcaccatgggcggtaccggcggcggtattgccaccaccatggaagaactccatgagatcgctgagaatggtctgcgtctgtcgcccatcacccagatcctggttgaaaagtgcatctccggctggaaggagatcgagttcgaggtcatccgggacagcgtgggcaactccatcactgtctgctccatggagaacatggaccctgtgggcatccacaccggtgactccatcgtaatcgctccggcagtgagcctctccaccgaggagttcggcatgctgcgggaagctgccattgacattgtaaacgagctgggcgttgaaggcggctgcaactgccagttcgctctggagccgggctccaaggaatatgccgtcatcgaggtaaacccccgtgtatcccgttcgtcggcactggcttccaaggccaccggttatcccatcgccaaggttgccaccaagattgccatcggctaccgtctggacgagatccgcaacgcggtaaccggttccacctgggcctgcaacgagcccactgtggactacatcgtctgcaagttccccaagtggccctttgataagtttgtatacggcaagcgtaccctgggcacccagatgaaggccaccggtgaggtaatgtccatcggttccagcttcgagcaggccattatgaaggcagtccgctccatcgagctgggtctcgacaccctgcgtctgcccaagaatgccgacaagactgacgacgagatccgggagctgctgcatgtgcaggacgacgagcgtatcttcgccgtattcgaggcactctaccgcggcattgactttgataccatctatgccgctaccaagatcgacaagtggttcctgggcaagctgtggaacctggcccgcatcgaacatgagctggagaagggcagcctggacaaggagctctatctcgaggccaaggacgccggcttcctggacaagaccatcgagcgcatttccggcgtgagctgcgctccgtatcaccgcaaggctgcctacaagatggtggatacctgcgctgcggaattccaggcccagaccccttacttctactccacctttgatgaggagaacgaggcggagatcttcctggagcgcaacaagaacgacaagaagaaggtactggtattcggttccggccccatccggatcggacagggcatcgagttcgactactgctcggtacactgtgtctgggcgctgaaggagcacggctacgaggctgtcatcatcaacaacaaccccgaaactgtatccaccgacttcgatacctccgaccgtctgtactttgacccgctgacccccgaagatgtggacagcgttctggagatcgagaagccctggggtgctgtggtacagttcggcggtcagaccgccatcaagctcaccaagcatctgcaggagaagggcgtgaatatcctgggtacttcggcagacagcatcgatgccgccgaggaccgggagcgcttcgatgaggtgctggagcagtgcggtatcccgcgtgccaagggtaccaccgtatttaccaccgaggaagcagtcaaggccgctgacgagctgggttatccggtgctgctgcgtccgtcctatgtactgggcggtcagaatatgatcatcgcctattccgagtcggatgtccgggagtacatgggcatcatcacctcccatgagatcgagaaccccgtcctggtggacaagtacctcatgggtaccgaagtggaagtcgatgccatctgtgacggcaacgactatctgatccccggcatcatgcagcatatcgagcgtgccggtatccactcgggcgactccatctcggtttacccggcccagaccctgagccagaaggtccgtgccaccatcatcgactacaccggtcgtctggcccgtgcgctgaaggtggtcggcctggtgaacatccagtatgtggtttacaacggcgaagtttatgtcatcgaagtaaacccccgttcctcccgtaccgtgccctatatcagcaaggttgccaatgtgcccatggtggatctcgccaccaaggtaatgctgggcgaaaagctggctgacctgggttatggcaccggcctctatcctcagggcgactatgtagccgtcaaggtaccggtgttcagcttcgaaaagctgcacgatgtggacattcagctcggaccggagatgaagtccaccggtgaggtactgggcattgccaagacctttgaggaggctctctacaagggcctggtagcagccggctacaagatgaagaagaaaggcggcgtgctgatctcggtgaaggacggcgacaagcaggagatcatcgaggtggcagaccggttcgagcggctgggcttca

SEQ ID NO: 1525 - DNA, 16774 bp, Unknown
  16S sequences of unknown bacteria
ttccacgtaaaaccattgaaaataaaggcttttcggcattccagaccttattcccactcgatggttgccgggggcttggtcgtgatgtcgtagacgacgcggttgaccgagcgcacctcgttgacgatgcgcgccgaggcacgggccagcacgtcgtaggggatgcgcgcccagtccacggtcatgaagtccaccgtgcacaccgcgcgcagcgccacggtgaagtcgtaggtgcgctcgtcgcccatgacgccgacggagcgcatgttggtcaggaccgcgaagtactggttgatgtcgcggttcaggcccgccttgtcgatctcctcgcggaagatggcgtccgcgtccttgaggatctcgaccttttcgcgcgtgatgtcgccgatgatgcgcaccgcaaggcccggcccggggaagggctggcgccagaccatgttctcgggcaggccgagctccaggcccaggcggcgcacctcgtccttgaagaggctgcgcagcggctccaggatctcctgaaagtcgatcacgtccggcaggccgccgacgttgtggtggctcttgatggtcgccgcctggcccgcgccggattccactacgtccggatagatcgtgccctgcgccaggaactccaccttgccgatctccttggccgcccgctcaaaggcgcggatgaactgctcgccgatgatcttgcgcttgcgctccggatcggtcacgcccgcaagcgccgtcaggaagtgctcgctctcgtccaggaagcgcaggtccatgtcgaacttgccctcgaacatggcgcgcacctgctccggctcgttcttgcgcatcaggccgatgtccaggaacacgcacgtgagctggcggcccaccgcgcggctgagcagcgccgcgcagaccgagctgtccacgccgcccgagagcgccagcagcacgcggcccttgcccaccttttcgcgcagcgcctcgatcgtctcctgcacgaactgcggcatggaccagtcgccgtccagcttgcagaccttatagaggaagttgcgcagcatctcctggccgcgcgcggtgtgctgcacctccgggtggaactgcacgccgtagaagcgccgcccctcgtccgcgatggccgcgatggggcaggtcgccgtcgtcgccgcggcggagaacccctccggcagcttgtccgcctggtccgtgtggctcatccagcagaccgtgctgcggtcgatgccgtcaaagagcgcgcagtcgcgcagctccacgtccgtctttccatattccttggtctgcgccgagcggaccgagccgcccagcatcaccgtcatcagctgcatgccgtagcagatgcccagcaccgggatccccatctcgaagatctccggggtgcagcgcggcgcgccgtcggcgtatacgctgttcgggccgcccgtcaggatcagccccacgggctctttggcgcggatgcgctcgatggagctgtcgcccgggatcagctccgcatacacgccctcgtcgcgcacgcggcgcgcgatgagctggttgtactgcccgccaaagtccagaacgagcacggtttggtgctttgcccttgccatgaactctcctcccgtcttctgtctcttttcctctcttcgctttgcccattgtccaatgggaatactgccttaacactacaaaaaaagcggccgtctgtcaagcaccccggcgcggccgggcggggaggggagaggagccagcctgcataaaaattcaccccgcggcgcgatccctgcatgatgccgcgcgcggcgtgcatattttgcaaggggagagccgagcgtcaaaaaatgtaaaatttctgttccggcggcggcgaacgatgaagattaagtttgcattaaaggttccggttttttgcgaaggaatcgaaaaaaatcgctcgatccggcgccggagacgcaggatcgagcgaaaatcagagaacacaagcgaacgtgtctcttcgccgggacttggaaacacgcttcaatctaatcctgcattatacaacttcacacccggaaaagcaaggccgcgcggcgggaacgaaggttaaaagttggttatttcccgcaaagtgctttgcaatttatgagcaaaaatggtatattgatacacagaaaaagcgaagcaggaggcgcgcatgaaagcatatttgatcctggaagacggcacggtctttgaaggcgagcgcatcggcgcggaccgcgatacggtctgcgaagtcgtgttcaacacggccatggccggctatttggaggtgctgaccgacccttcctatgccgggcagggcgtgaccatgacctatccgctgatgggcaattacggcatcaacgaggaggacgccgagagccggcagccctgggcgtcggccttcatcgtccagcaggtggcgcgcagggcctccaactaccgcagccgcgaggagctggacgcctaccttacgcgctacgacatccccggcatcgccgggctggacacccgcgccctgacgcgccacctgcgcacgcgcggcaccatgaacggcatgctcacctcccgcaccgattggaacatccaggcctgcgtaaagctcgcgcgggactaccgcgtccgcggcgtggtcgcccgtgtcagccgcaaggagatggagcacttcccggggcaggggccgcgcgtggcgctgatggactacggcgcgaagaactccatcctcaagtccctgcgccgcaggggctgcgacctctacgtcttcccgcaggacgcgcccgccgaggaggtcctggccgtcaagcccgacggcatcatgctctccaacgggccgggagacccggaggagtgcaccggccccatcgcctgcgtgcgcaagctctacgagagcggcatcccgatcttcggcatctgcctgggccaccagatcacggcgctggccctgggcgccaggaccgagaagatggagtacggccaccgcggcgtcaaccacccggtcaaggagctcgccaccggccgcgtctacatcaccagccagaaccacggctacgtcgtccgcggcgactccgtgcccggcgagggcaaggtgagctttgtcaacgtcaacgacggcacggtcgagggcgtaagctacgacggcggccgcgtcttcaccgtccagttccaccccgaggccagccccgggcccgtggacaccgggttcctgttcgaccgattcatccacgtcatgggagggaagcgcgatgcctaagagagaggatatccaccgggtgctggtcattgggtccggccccatcgtcatcggccaggcggccgagttcgactacgcgggaacccaggcctgccgcgccctgaaggaggaggggctggaggtcgtgctcatcaactccaaccccgccaccatcatgaccgacgccgacatcgccgactgcgtctacatcgagcccctggtcgccgacagcgtcaagaaggtcgtcgagcgcgagcggccggacgcggtccttgccacactcggcggccagacgggcctgaaccttgccatggagctcaacgaggagggctactgggaccgcatgggcgtgcgcgtcatcggcacccagcccccggccatcaagaaggcggaggaccgcctcgccttccaggagacgatgctcgccatcggcgagccgtgcgtggacggcctggtcgtggagtccgtcgaggacgcctgcgcctttgccgagcgcatcggctacccggtcatcgtgcgcccggcctacacgctgggcggctccggcggcggcatctgcacgaaccgcgaggagctggagaccacctgcgacaacgggctgcgcctctcgcgcgtccaccagtgcctgatcgaaaagtgcatcgccggctggaaggagatcgagtacgaggtcctgcgcgacggctgcggcaaccgcatcaccgtctgcaacatggagaacctcgaccccgtgggcgtgcacacgggcgattccatcgtcgtcgcgccctcccagaccctcgcggacaaggagtaccagatgctgcgcaccgcggcgctgaacatcgtcgacgcactgggcatcgtcggcggctgcaatgtccagttcgcgctcaaccccaactccgcgcagtacgtggtcatcgaggtcaacccgcgcgtatcgcgctcctcggcgctggcctccaaggccacgggctaccccatcgccaaggtcgcggccaaggtcgccctgggctatgccctggacgagatccgcaactccgtcaccggcaagacctacgccgcctttgagcccacgctcgactacatcgtcgtcaagatccccaagtggccctttgacaagttcgccaccgccagccgcgcgctcggcacgcagatgaaggccacgggcgaggtcatggccatcgcctccaccttcgagggcggcctgatgaaggccgtgcgctcgctcgagcagaacgtcgagtccctgcacctgcccgtcatcgacgagatgagcgacgaggagctggacgccgaggtccgccgcatcgacgaccgccgcctcttcgccctggccgagtgcttccgccgcggccgctccctggaggagctggccggcatcaccaagatcgacccctggttcctggagggcatcctcgccctggtggagatggagaaggagctggcggcgggcgcggacctctcctacgaccggctgctggccgcaaagcgcatgggctacacggaccgcaccatcgccgagctcaccggcaggcccgaggcggagatcaaggccctgcgcaggcgcctgggcatcaccccggacttcaagatggtcgacacctgcgccgcggagtttgaggccgtaaccccctactactattccacctattccgcgcagaacgaggtcaaccccaggaccagccggcgcaaggtcatggtcctgggctccggcccgatccgcatcggccagggcatcgagttcgactactgctccgtccactcggtctgggcgctcaaggagatgggctgcgagacgatcatcgtcaacaacaacccggagaccgtctccacggactttgacatcgcggacaagctctacttcgagcccctgacccgcgaggacgtgggcaacatcgtggacctggaaaagcccgacggcgcggtcgtccagttcggcgggcagacggccatcaagctcacaaaggccctggtggagatgggcgtgccgatcctgggcacctccgagcgcgacatcgaccgcgccgaggaccgcgaggagtttgacaagatcctggagtcctgcggcatcccgcgcccggccgggcacacggtctttaccctggaggaggcgctgggcgccgcgcgcgacctgggctatcccgtgctcgtgcggccgtcgtacgtcctgggcggccagggcatggagatcgcccgctccgacgcggacatccgggagttcctgacgcgcatcacggccctgatggaggtcaaggagcaccccatcctcgtggacaagtacgtcgagggccaggagtgcgaggtcgacgccgtctgcgacggggaggacatcctcgtccccggcatcatggagcacctggagcgcgcgggcgtccactccggcgactccatctccgtctaccccgcccagagcctgccgcacgagatctgcatgcagctcgtcgagcactcccgcgccctggcgcgcgccctgcacgtccagggcctgatcaacatccagttcatcgtcaaggacggccgcgtctacgtcatcgaggtcaacccgcgctcctcgcgcacggttccctacatctccaaggtcacgggcgtgccgatcgtcaagctcgcaacgcgcgtgctgctgggcgagcgcctgcgcgacatgggctttggcacgggcctgtaccggaagagccgcctcgtcgcggtcaagatgcccgtcttctcctttgagaagatcatcgacgcagataccagcctcggcccggagatgaagtccacgggcgaagtgctgggcgtctcgccccggtacgaagaagcgctctacaaggccttcctcggcgcggggctgcgcatgaagcgcggcggcaaggtgctctgctcggtcaacgaccacgacaaggcggagctgacggcccttgcggcggagttcgcccgcctgggctacccgatcctggcaacgcccggcacggcccaggccctgcgcggcgcgggcgtcgcggcagagacaatcgaggacttcggccagcacctgcacaacctccacaaggacgagatcgccctggtcgtcaacaccccgacccacggccgcgtgcccgcacgccgcggcttccagctgcgccgctggtccgtggagaacggcgtgccgtgcctgacgagcctggacaccgtccgcgcgctggccttctgcctggagcacgccctgcaaaacggctttgacgtggtggatcttgccaagatctgaggctgcgcgccccggaatttacctgccgttgcttgacgatggaaaaggcctggtggtaaaatcccaacatggggaagagagggcatggattgtttcaagcaagatgccctctgtccgtttttcgacgcaatcccgcgctttaaggaggaatatgagaggatggctaagtattcgccgcaggacatcctgcgcatggtggaggagaaccaggtgcgctttatccgcctgcagttcaccgatatcttcggcgccatgaagtgcgtcaacgtcaccgcgagccagctgcagaaggtgctgcgcaacgagtgcaagttcgacggctcctccatcgagggcttcacccgcatcgaggagagcgacatgtgcctctaccccgatcccgacagcttccgcatcctgccctggagcgaccagggccgcgtcgcgcgcctgatctgcgacgtccacaccaccgacggcgcgccctttgccggctgcccgcgctatgtgctgcgccgcgtgctcgcccacgccaaggccatgggctttgacttctacgtcgggccggagctggagttcttcctcttccacacggacgaggtcggcaaggccaccacccgcagcttcgacgagggcggctacttcgacatcagccccgtggacccgggcgaaaaggcccgccgcgagatgtgcatcctgctggaggagatgggctttgagatcgaggcctcccaccacgaggtcgcccgcggccagcacgagatcgactttaagtacgacgaggccctgaccaccgccgacaacgtcatcaccttcaaggaggtcgtcaagaccacggcccagcgccacggcctgcacgccaccttcatgcccaagcccatcttcggcatcgcgggcagcggcatgcacatcaatatgtccctcttccgcgacggcaaaaacgtcttctacgacgagacggaccgctacggcctgagcgagacggcctaccgcttcatcgccggcgtcatgcgccacgccgcctcccttgccgcggtgaccaacccgctcgtcaactcctataagcgcctggtccccgggtacgaggcgccgctgtacatcgcctggtccgcgcgcaaccgctcgcccctgatccgcatcccggacgccaagggccaggccacgcgcatcgagctgcgcaaccccgaccccacggccaacccctacctggtcttcgccctcgtgctcgaggccggcctggagggcatcgagcagggcctcgtcccgccggaggccgtcaaccagaacatctacaacatgacccgcgaggagcgcaaggccgctgccgtcacggcgctgcccgcggacctgaacgccgccatcgagcgcatggaggaggaccccctggtccgcaacgtccttggcagccacatctacgaaaagtacctggccgccaagcgcaccgagtggcgcgagtaccggatgcgcgtctcccagtgggagctggacgagtacctgggcaagtattgacgaagacgggggaggggcggcgatgtgggttgcggcggagtttgcgcgcagggaggcggccgagaaggtcgccctcgccctgggccggcatgggctcggcgcccgcgcgttcacaagcggcgcggaggtgctccgccaggcggagggcctcgcgcgcgtggcctgcgggccgcgcctgcaggacatgaccgccgcccgcctgcgcagcctgctcccggcggacgtgcccatgctgctgcccgggcccggcgcgcccgtcccggatgcagcgcgcgcggcgctgcgcaccctggccaaggaggaagaaacatgatcgcagttgtggactatggcgcgggcaacgtctgctccgtcatgcacgcgctggagcacatcggcgcgccctcgatcctgacccgcgaggagggcgagatcgcccgcgcggacgccgtgatcctgccgggcgtgggcgccttcggcgacgcgatggcccagctgggcgcgagcggcacggtcgcggccctggagcggtacctcaagaccggccgcccgctgctgggcatctgcatcggggaacagctcctcttcgaccgcagcgaggagtcgcccggcagccccggccttgcctggctgcgcggctccgtgcgccgcattcccgccgccccggagcgcaaggtcccccacatgggctggaaccagatcgagatctgccgccaggacccgctctttgcgggcctgccggagaatccctacttctatttcgtccactcctattacgtggacgcggccgacaagtcctgcgtgctcgcgcgcgtggaatacggcgtgcccatggacgtggccgtgcgcagggacaacctctgcgccgtgcagttccaccccgaaaagagcggggaatgcggcctgcagctcctcaagaacttcgccgcgatgcgctaggaggataccatgcttgccaagagaatcatcccctgcctggacgtcaaggccgggcgcgtggtcaagggcgtgaacttcgtcaacctgaccgacgccggcgaccccgtcgcctgcgcggaagcctacgaccgcgccggcgcggacgagctcaccttcctggacatcaccgcctcctcggacgcgcggcgcatcatgctggacaccgtgcgcgccgtggcccgcgcggtctacatccccttcaccgtcggcgggggcatccagtccatccaggactattcggacctgctgcacgccggcgcggagaaggtcagcgtcaactcctacgccgtggcccatcccgagatcctggccgaggccgcgcgcaagttcggctcccagtgcgtggtcctggccatcgacgccaagtggaacggccgcttcttcgaggtctatacgcacggcggcaggcgccccaccggcatggacgccgtggcctgggccaagcgcgccgtggccctgggcgcaggggagatcctgctgacctccatggacgccgacggcacaaaggccggctttgacctggcgctcacccgcgccgtcgcgggcagcgtcgaggtgccggtcatcgcctccggcggcgcgggctgcgcggaggacttcgcccgcgtgctcacggagggcggcgcggacgcggcgctggccgcctcgctcttccacttccacgagctggacatcggcgacctcaagcgagaccttgccgcccgcggcgtcccggtccgcttctgaccgccgcaaaattaaaattgcagaaaagcgccgcgcgcgcaagccccagtcggacttgtacgcgtggcgtgttttttttgcgcccaggaagtgcggcccgttccgagcgctgcccgtggagaacctccgattctcgcctccggcggcgcggacgcggcgctggccgcctcgctcttccacttccacgagctggacatcggcggcctcaagcgggaccttgccgcccgcggcgtcccggtccgcctctgaccgccgcaaaattaaaattgcagaaaagcgccgcgcgcgcaagccccattcggacttgcgcgcggcgtttttgcgcccaggaagtgcggcccgttccgagcgctgcccgtggggaacctccgattctcgcctccggcggcgcggacgcggcgctggccgcctcgctcttccacttccacgagctggacatcggcgacctcaagcgggaccttgccgcccgcggcatcccggtccgcctctgagtccccgcaaaaaaaccgcgcgtgcagtcccaaagtcggactgcgcgcgcggttttgcgtggaacgggaattccgaaattttcatagaggattttgcggaaggcgcaacgaatagaaaagcgtgtcgtatttacttacggaggtgtgagaacttgacgaaaaagaagaagggcaaagccctgcgcatcgccctgatcgtcgtggcggccatcctggtctgcgcgatcggcggcgccgtttggctcgtgaactatattgcaaacccgcagaacgcgttttctgaactgcgcggcggcgaggagaacacggtctccctcgcgcccacgcagaccccgaccccgaccccggcgtccagcgcgcccgcggaatcggacgccaccccgaccccggaacccaccgcgaccccgccggactacgagttttcctcgaaccggatcaacatcctgctcctgggcgcggacagcagcgtcgagcgcgtggaggcgggcatgaacttccgcacggataccatgatcctggtcaccgtcgactttgacaacaagaaggtcgacatgatctccatcccgcgcgacagctacgtccgcatcaacaaaggcagccgcttcaacaagatcaacgcggccttcaccttcggcggcggccgcgagggcgacggctacgagtacgccatgaacaccgtctcctacctgctgggcgtgccggtggactactacgtcggcttcggcatgaacgtcgtcaaagaggtcgtgaacgccatgggcggcgtggactacgacgtggacatctcctttacgctcaacggccgcgagaccgtcgagggctaccagcacatggacggccagcaggttctggactactgccgctggcgcaagggcggccgcggggacatcgaccgcatcgaccgccagcagcgcatcctgttcgccatctttgagcagatgctcaagaccgaccaggtcaagaacatccccgacatctacaccgcggtgcaggagaacatcgacacgaacctggatacgctccagatcgcgaccctggcctggttcgccaaggacctgtccatggacgacatcgcccgccacaccgtgccgggcaacggccagtacgtgggctccacctcctactacatcgtctaccagaacgagaagaacgagatggtgcaggagatcttcggcgtcgagggcccgtttgacgaggccatcacgctggaggccatcgaggcgcgcgtcgccgagcaggagggaacgctccccggcggcgacgaggaggccacgcccgaggagatcaccgccctgcagctgcaggcgcaggacatgctctccttcatggaggagcgcgcggacatgagcagcagcgaggtcagcgccgcctattccgcgctgcagagcgccatctccagcggcagcgcctcggccctgcgcagcgccatcgccaccgcgcagagcctgctgcccgggtcggagtcctccgtccccgcgctggagacgcccgcgccgaccgcggacattccccaggaggacggctccaacatctacgaaaccttcccgagcgaagacgacagcaacgtctacgaatagccagagaaaggaaaggggataacacatgccaactatgagcctgtccagcgcgatcctgaactgggagacgatcggcagcgggatcctggacatcctgtggatggtggtcaagggcctgatcgtcctgggcatcggggtcctgatcatcaagtggctgatgcgcctgagcaccgcgtgcctcaagcgcagccgcctgagcgtcacgctgcacgctttcatcctctccagcgtcaaggtgatcagctacgtcttcctcatcatcatcgtcctgtccgtcctgggcatcccgacgacctccctcatcacggccatcggcaccgcgggcgtggccatcggcctggccctcaaggacagcctctccaactttgccagcggcgtgctgatcctggccaacgcgccctttaaggtgggcgatttcgtggacctgaacgggcagagcggcacggtgctggagatcggcctgatggagaccaagctgcgcaccgtggacaaccgccacatcgtcatccccaacaacaccgtgacaaacggcatcgtcgtcaacttctcttccgagacgaaccgccgcctggacctggacttcaccatcgcctatgaggacgacgcggagcttgccatctcgctcatccgcggcatcatcgcggagaagggcgaccgcatcctgcgcgagcccgccgagcccttcgtcatggtcaccggctacctggacagcgcggtcaagatcacaatgcgcgtctggtgcccggcctccgacctctggaacctcaacttcgagttcctcaaggaggtcaaggccgccttcgaccagcacggcatccacattccctacaaccagatggacgtgcacatcgtcaaggactgatgcgcagagccaaaaaaatccgcccccagcccgggcggattttttttgcccgcccttttgcggcaggcccttcaaaacgggacccgaaaatgctatactggatgggaatgcgagacggagccggggagagggggggaaggccgcgtggaatccatcgcctgctttacgggccacaggcccagccgacgcatgcgctttgatccggggagcccgcagggcgcggccctgcgcaaccgcgtccaccaggccgtgcgcctgctgtgcctggagcgcggggtgcgcgtcttcctctgcggcatggccgcggggttcgacctgttcgcggcgcgctgcatgctggagctgcgctgcgccggccagatcccgcaggaaacctgcctcgtcgccgtgctgccctatcccgaccacggcgcggacgtccccaacgggtggcagcacgtctacgacgaggtgctgcagcactgcgaggaccagtgcatcgtctccccgcgcaagagcgcggccgccttccgcaggcgcaacgactacatgaccgcccgcgcggattacgtcctggcctattggaaccacgacccccgcaccggcaccggccagaccgtgcgcatggcgcacgagcgcgaacgcgtggttctcaacctctacgatctatagccctgcggcagatttttcgcgttttttcctgcgttccccgtttcggggggcgcaagtcgggtacaataaaggagagaagcaggatgtctcaagtgcacgcgcggacccttcgcctcatcggcgaggaagggatgcagcgcctcgcggccgcccggatcgcggtgttcggcctgggcggcgtggggggcgcggcggcatgggcgctctcgcgctgcggggtcgggatgcttcggctcatcgactgcgacgcggtcgccgaaagcaacctcaaccgccagatggtcgccgagttcgagaccatcggcatgcgcaaaaccctcgcggccgagcgcatgatccgccgctataaccggacgatcaacctggacctgcgcgacgtgcgcgcgggggaggagaacgccgccgccctgtgcgagggcatggacgtcgtcatcgacgcggtggacgacctctccgccaaggaggcgctggcggtccattgcgtgggccagggcatcgcgctgctctcgagcatgggcacgggcaacaagctcggcacagccttttccatgcaggatctggccaggacgcagggcgaccccctcgcgcgcgccatgcgccgcaggctgcggcgacgcggcatcgagcacctgccggtctgcatctcggcggagctgccgcgcggcgtgccgccggacgaggcgggcggccacaccccggcctccatcgcctttgtcccgcccagcgccgggctgacgctcgcggcggaggcggtgcgcattctgttggaaagggaggcggattcccatgcgggagagcggaatcatcaccgagattgaggagcataccatgatggtggaatttgagcgttcctccatgtgcgaaaagtgcggcgcctgcgagcgcgcccacaacgccatgcgcatggaggtggagagaatcggcaacgcgtccctgggcgaccgcgtggaggtggacctgcccgagcgcacggtggtccgcgcggcgctggtggcctacggcatcccgctggcgctgctgctggcggggctcgcggccggctccgcgctgccgggccggctgggcctgcccgggaacccggacctctacgccctcgcgctgggcctgctcctggccgcgggcgcgttcctcgcgctccacctgacggagcgccggcggcgcagctccggccgctatgcgcccaaggtcgtccagatcgagaggctctgccagcagtgcggcgcctccagggaaaacaatcgagaaaggcaggatgcaaaccatggcaatgaaattggacagcacgaactttgaccgggtgctcgccaccccggacacccccgtcctcgtggacttttgggcgacctggtgcggcccgtgccgcatggtcgcgcccgtgatcgagcagctcgccgcggactacgagggccgcgccatcgtcggcaaggtcgacgtggacgagtgcggcgacctggccatgcgctatggcgtgatgtccatccccaccgtcatcgtctttaagaacggcaagcccgtcgcccagcaggtcggcgcggtcggcaagggcgtctacgccgccatgcttgacaaggccctgtaatccctacatacagcagaaaaagggagcggaaggaaaaccttccgctccctttttctgtctgtcattcctcccagcgcagcgttgcgacgtcctcgtgcaggatgcgcgagatcttgtccagcgagtacaggtctgcggtgctgatgacctcggaggagaggtctacattgggaatcttgagataatcctgcaggagatagttcggcgtgacccgcagcacgttgcagagggtcaagaggctttccaggctgggtgcacgcgttccgcgctcgatgtgcccgataaaggggatcgacacctcgcaaagctccgccagttttgcctgggtatagcccaactccctgcgcttgccgcgcacgcgggcgccaaacttaataaatgtcatcgcggactgcccccttctgcctctgcccgcccgggcagtttcgtacatctattgtatcccggtttccggcaaagcaaaactaactcaaagaacaatgcgcatactgtgagtagaaaccgcgggaaaagcagaaatttgcccgaaaaaacgcccatggggcggaaattgcgctccatgggcgttttttcagaggtttccgtgcgaaaggttattcctccgtggtctgggcgtcgtagaagtagcggccgatcatgtaggggtagccgtcgtgcgtgccgtccgcgtgcacgtccgcatagacgttgtaggtcttgccctcctccagggacttgccctcgaccatctccaggtagaggatctggggttcctccgccgtgccgacgttgtagaggcaggtgtagggatcggtcgagagcacctgcgtcaccgagcccgtgcacaggaagggctggaaggtgccggcgtagttgcccaggttggcgtactccatcttaaaggccttctccacgtactcgttcgcggtggggaggtaggtgatggtgtgggtcagcgtcgagctcttgtcgccgcttgtcgcggtgatgaccacgtcgttctcgccgaaggagggcatctgcgccacgaaggagaaggtcccgtcctcgttcagggtgacgtcgccctgcgtgggggaggtgacctcgatctgcacgccgggcgcgacgctgccggagatggtgaccgtgtcggtctccaccgtcgagggcgtggaggcatccagctcaatgggcacctccatcaccggccgggtgatgacgatgtcctgcgtcacggacttgcagccttccttcatcacgacgatggggatggtgttttcgcccgtgggcgtcacgtccacgttatagatgatggagcccacgccgccctcttcctccgtgatcatgtccgagacgtcctcgcccgcgatggtgacggtggagcccgtctccacgcggatctgcacctgataggtgccaagcgtcgtgttcgccgcgccgcccgcgggattgacgatctccagataggcgtccggcggggtcaccacaaaggtgatggggtccatgttcgtctcgcgcccgctgccggcctcgtgcagcacgggggtgagcgtgacctccacgtcctcgttgacgatgcggtcgccgatcagcgcactgtcctcgacctgcagcgtgcccacgcccccggcgatggagacgttgtagctcgtgcccaggtcctcgtttgtgacgtagatcaggtcgccgtcattgcccttgaaggtgatgatgtggcccgggcggccgttcacctcgcccgtggtcacggtcggggcgttgggatcgacctcctgcgcaggcgtctgcgagggcgaaaccgacccctccggcgagccctcggccggatcgcggttcagcagcgcgcggatgcccatcaccgcgccgaagacgatcagcgccaggagcaccagcgccgccgcgcccaccaggatcatgcgctgcaggttctgcacgcgcaggcccgccaacgggctgccgctccggctgggggaatccgcccccggaccccggtccccgggcccgtcgtccgatccgccgccggagccgccgcgcggggcgcgcgggcgcatcggcgactcggc

SEQ ID NO: 1526 - DNA, 32642 bp, Unknown
  16S sequences of unknown bacteria
tggaccgtaacggcaacatcgtgggcgaggcgatcctgggcggcatcaacaacgaggcccagatgaagacgctccagtccctcatcgaccagacgctgatgaaggacatggaaatgatgaacaaggacggcaagtgatcgtcctgacgcggcgctgggcgagggtcctgcgccgcttttctgttactccccttcacgggacggacgacggggagacggcctcgcctgaccccggaaaggagtcctgcaaacaaaagtcaatagcaaaaacaaaaaaagtcccgcaaagtttacgagaccgaaaatgagcataacaaaacaggctggagaagaattgcatcgccagccgggatgaaattttcggcagatttagttctgcacgatatcctgctgcgcgtcgaatgtctcaaggcattctttcacgcgggcatagtagatacgcagaaacttgttttgcgcagcagtcatgtagacgaaatacggcttgccctcggtacgtttcttattgaggagctggtagaccggttcgtcctctggagactttttcaggtaagtacagatgatttgatacaaagtcttcctcagatgaggtgagccgcgcttggtcgtgggaacgctcttggcactgtgcttgccggaatcatccacgcctggatcgacgccagcgaatcccacgatagagctgcggcggggaaaacagcgtacatccccgatctcagccatgagctgcgcggcagtggtttcgccaacaccgtacatggccagcacagtatcgtactctgccagctgctttgcaaggcgtgtcatctcggcgcgcaaagcggccaatgtcatcttgccggcaagcaactgctgcgccgctgtggtgataagcagcttcgtgttgtcattcttcggcagcgtagtgaaatggccgcaactgctggcatagagatccagcgctttctctgcgttgaaatggtagtccttgcgcttgcaccacttctgatagcgctcggtgaacgccttttcgctgacgcggcagacacagtcacagtgccagaaggtcatgacaaaatccacccatttctggtggccgtccgcacgctccgggctggagaacagttcgttcacgccgggaaaggtcttatcggtcaatgaaatgagattgttttgcagcgacaccaccgttttcatgtagaggttgtactggcagctgcacagcttcagttgttgtcttatcgtgtccatgggagtatactcccgcagatccacccagttgtcaagaacgtatttggcgattttcatggcgtctgccttatccgttttgaccttgcggatggaaccacctccgctctgcttgatgaacagcggattcaggacacagacatagatgccgtattcatgcagtgcagcagctaccggctcatgatagcgtccggtggcctccatgacaacgcgtgtatcttcccccagcgcaaggatggcgtatgccatctgctccagaccgaccccggtgtggagaaatacctgtggcagcaacgccacttcacccattggccgcagggcagccaccatgctttttcctttggaaacatcgatccctaccgcgttcattttgttcctccttctgactggatatggctttccgctctttactcattgcctgttcaatctcctgggtgacacgagcgcacaaggtggctctacctgcgcaaatcgaatgctgcgaatgaaagaggcggctgacggactccatttcgggcgtgttgacccaaggtttttattgtcaggccatttactctcccattctaacagcttcggctttgagatggaaaaagacgcggctggctgccgcgccttcagccgtaattattattgtaggaggaatgaatcatgaagctgaaaaagagaggggtcgccctgctgctggccgcgctgctgctttcatcggccgcgctggcagaggcccccatgaccaccatgagggaggaagcgatggaacacaggcagaatgtcatttatctggccgggggctgcttctgggggctggaaaagctgatgcagtctattcccggcgtgacggatgcggtcagcggctatgccaacggcaccggcgaggaagacgcgaattaccagacggtggtcaaaggccaaacgggcttccgggagaccgtgaaggtgacctacgaccctgagcaggtcagcctggacgcactgctgctggcgtacttttatgtgatcgacccaacggtggagaaccggcagggcaacgacgtgggcagccagtaccagaccggcgtgtactacgaggacgacgcatccagagaaatcgtggagcgcgtcgccgctctggagcggaggcgcagggagaaattcgtggtggagatcggcccgctggtcaacttcttcccggcagaggagtatcatcaggattatctggataaaaacccgaacggctactgccacattccccgggcggaaatcgagctgttctcccggttgaggatcgatccgggcgattatcaaaagcccgccgccgaggccatccgggacaagctcaccgacgagcagtaccgggtaacgcaggaaaacgccaccgaatcccccttccagaacgagttctggaatcagtttgagaagggcatttatgtggacattgttaccggcgagccgctgttttcctccacggacaagtttgaaagcagctgcggctggcccgccttctccaagcccatcgaggagcctgcggtggtggagctgccggacgacagccacgggatgcaccgcaccgaggtgcgcagccgggccggggattcccatctgggccacgtcttcaccggcgaccgggaaagccccaacggcgtgcgctactgcatcaacagcgccgcgctgcgctttatcccctatgcaaggctggaggcagaggactacggatatcttctcagtatctttgaagaataatctgcaaagtgctttcttccgttgtgataggataacagtacgataccagatttcattttgctatcaacagtgtgaacgcgctctggttgtgtcctctcagaattcttcgtaagaggtcatgcccagatacttgccggaggaaaaatgtgcttccatggctcgtgcgaacgctggatagctgtggttctccagcgcggcgacgatggcctcgtgcttggtgaccgtctgctccagatggggctgctttttctccagctcgaagccgtcgtccacagaccagatggcctccagcagggagagcagcacgtcgttgtgcagggagcggaacagcgtcaggtgaaagtccttgtcctcctgaataaagaagacgccccgggaccagttgtcgcgcatggcgtcggccaggctccgcagggcccggacgtcctcctcggtcatcgcgtggaaggcctgccgcatgtacgccagctccagcaccttgcgcacgccgaacatttcccggatggaatgctcctcctgcgggcccacctgaaaaaacagcacgttctgcagaatgaaatccagattgaaagcctgcacctccgtgccctttccggggcaggcccgcaccatgcccatcagctccatgctcttgatagattcccgcagcacgttgcggctaacgcccagcgtctcgcatagcttctgctcggtgggcagcagatcgcccggctgcaggttgttctggacgatatatttccgaatttcccgataggttcggatgtaaagcttgtcattccggttcgtgttttgcacgatgcttcaccccttacaggatttgtagaacaaatgcatgtcttattataaaacagccttgcaaaaaagtcaatcacgatagaaaatatggcatagaaaccagcccgaaaaaatattatgggcttggaaataaaaaacctattgacatcgttcctcatttgtagtacatttgagccacgaaagaaacagcgtaccccctgcaacgttccgtcccgttcttcccttcgcttcaccccccctgaaaggggttgaacaatatagcaaggaggtctttccaagatgaagaaactgatcgccctgttcctgtgcctgatgctggtcctgcccgtagcggcggcgctggccgacgacatgacgaccgagatcaccctgtggaccttccctgtcggcggctttggcgacgacgaacaagtccagacgctgattgcggacttcaacgcggtataccccaacatcaaggtgaatgtggagtatctggactacaccaacggcgacgtgcaggtcaccaccgccatgaaagccaaaaccacccctgacatcatcttcgaaggccccgagcgtctggtggccgtgtatgcggcggccaacgcgctggtgccgctggatgatctgtggacggacgaagccatggccgacatcagcgccggcgtagccgctgcctgcaaggacgcggccggcgtgtactacgagtatcccctgtgctccacggcccactgcatggtcatcgacaaggctgcctttgagaaggcggacgccctgcagtacatcgacatggaaaagcacacctggaccaccgagggctttgagatggccctgcgcgcgctggtcgaagcgggctacaaccccaccggcctgatcttctgctccggtcagggcggcgatcagggcacccgcgctctggtgaacaacctctacagcggcaagttcacctccccggatttcagcaagtacaccatggacagcgaggagaacatcaaggccctgaccatgctccagaagtgggcggaggaaggtctcatcgcctttgatccctccatcaacggcggcgaggagctggccctgttcgtcaacggcacctccaagatggccttctgctggaacgccgccatcgagggcctgaaccgcgacaagctggccgacggcgtggagctgttccccatgaccttccccaccgacaagggcgatcccgaactgtgcggcggcatctggggcttcggcatcttcgacaacggcgacgctgctaagattgaggcggccaagaccttcattcgctttgtgtgcgacgatcccgtgcaggtgcgcaagagcgtgtacatgtccggctacttctccgtgcggtcctccgtgaccggcctgtatgccggcaccgagaaggaatatctggatacctatgctcccttcgtgcagtatctgggcgattactatcaggtggccccgaactggaacacccagcgctatgagtggtggaacctgctccagcgcgtgggcgcgggcggaaacgtggccgatgaagtggccctgtacatccagaacgtgaaccaataagccaaccgtccgggttggaggggcgctctccccatggctgagcgcccctttttctagaaaagggggatcgccgcgtgcaaactaccgccagcatcaaccgcagcctgcgcgccacgcgcaggcgcgaaagcatttccggttatctgtttatggcgccggctctggtttttttccttgggttcgtcgtttttcccatgttcatgtgcctgttcaacagcgcttttcgctacaccctttccgagtttaccttcgtaggtcttgacaactatgttcgtttgtttcaggatgtgaagttcggcaagtcgctggtcaatacgctgatgatcgtgctggtcagcgtgcccttcacatgcctgttttcgctgtgggtcgcttcggcgatttatcagatgcggcagctgtacacctcctttttccgctgtgtgttctatctgccggtggtcacgggctctgtggcggtaaccgtggtatggaaatggatgttcaacccctactatggcctgctcaactatgtgtttacggcgctgggcctcatcagcaaaaacctgaactggctgggcagcgcggatacggcgctgggctgcatcatcaccatcctgctgaccacctccgtcggtcagcctatcgtgctgtatgtggcggcgctgagcaatgtggatcattcgctggtggaggcggcgcaggtggacggggccaccagcctgcagaccttctggcgcatcaagtggccgcaggtcatgcccaccacgctctatattctgatcatcaccaccatcaactccttccagtgcttcgcgctgatcgacctgctgacctccggcgggccgcaggattccacattgaccatcatgtactacatctaccataacgcggtcaagctgaacaacttcggctacggctgcgccatgggcatcattctggcggcgatcatcgcgctgttcagcgcggcgcagttccgtctggccaaatccggcagctgagggggcgaggacaatcatggatcacagcgtacatagaataacggtttatcgaattgtgagcatcgcgcttctgattgtgctggcgctgctcatgctgtttccgctgtattggatcatcacggggtccgtgaagggagcaaaggaaatcaacgcccgggtgccctccttttttcccgtcagtccgacgacggccaactatgccaagcttttctccaagcccgcatggacgtggctgctcaacacggtgttcatctgcggcatgaccatgctgctcgcctgtctgtgcggcgccatgggcggctacgcgctggccaagaagcaatttgccgggcgcgggttgatcttcaccatgttcgtctgcgccatggcgctgcccaagcaggtcatcatgattcctctgctcaaggaaatggcgtggctgaacctgcacaacaccctgtgggcggtcatcttccccaccgtgggctggcccttcggcgtgttcctgatgaagcagttctccgagaacattcccaatgaaatgctggaggcggcgcgcatcgacggggcgggggaggcccgcaccttcatcgacattgtgttccccatgattaagcccggcgtgggcgcgctggcgatcttcaccttcatcaccgcatggaacgattacttcctgcagctgatcatgctcaacgctcagcgaaagctgaccatttctctgggcattgccaagatgcagggcgaggccagcacagacttcggcctgatcatggcgggcgccacgctggccagcgtaccgatcatcgccgtgttcctcgccttccagaaatacttcacccgcggcatcaccatgggcgcggtcaagggctgaggagaacctctgttttcaattatcgatcatgaacgaggaggcctttatcatgggcagcttagacaagtacagaggcgttttcccggcgttttacgcctgctacgacgatcaggggggtgtgagcgaaacgcgcgcgcgccgtctggcccggcatctggtggataagggcgtgaagggactgtacgtaggaggatcctccggggagtgcatctatctggaaaaggaggaaaggatgcgcacgctggaggctgtgatgcaggaggtaggcggccagtgtaccatcattgcgcacgtggcatgcaacaataccgcggagagctgccagctggcagagcatgccgagcagcttggcgtggacgccattgccagcattcctcccatctattttcacctgccggacgcggccatcgcccgatactggaacgacatctccgacgcggccccccatacggatttctttatctacaacattccccagctggcgggcgtggccctttcgattccgctggcaaagcaaatgcagcgaaatccccgcgttgtgggcgtcaaaaattcctccatgcccgcctatgatatagaaggcttcaagcgggtcttcgaacgtccgtgcatcatcttcaacgggccggacgagcagtttgtggcgggacgcgccatcggcgcggacggcgggatcggcggcacctacgcggtgatgccggagctgttcctgaagatggacgcgctgtgccgggcaaacgattttgccgccgccgcgcccatccagcattcggtgaacaccatcatcgaggcgatgtgcgcctgccgcggcaatctgtatgcggtcatcaagaagatcatagagctgcgcgagggtctgcctctgggcggcgtgcgtcctccaatgcccaacctggaggcggaggatatggcgcaggtacacgtttgcgccgaaatgatcgacgctgccatcaaaagctttgcctgaggtgacggaaaaatgaagctgaacggagcaaccgtcaattttctgggagacagcatcacggcgggagtaggagcaagctgcgagcgcaaccgctataccgacgttctggcaagggaattcgggctgctgcattccaataactacggcgtaagcggatcgcggatcgcccggcaaaccgtcatgaccgatgagccacatgatcgggacttctgcatgcgcatgacggaaatggacgcaaacgccgatgcggtggttgtctttggcggaacgaacgactacggccacggggacgcgcccttgggtgtgccttccgacaggacacctttcaccttctggggggcgtgccactgcctgatggacggtctgctgacgcgctatgcaggaaagcctgttgttatcctttcgccgctgcaccgagacggcgagaacgatccccgtggagacggtcgcaagccgctgagcgttgcgccgctgtccgcctatcgggatattctgctggaaacggcgcggcattacgccctgccgacactggatctgtacgccgtcagcggcatccagccggaaaacgtccgctgccgggagttgcttttgccggacggccttcaccccagcgatgaagggcacgcgctgctggccagaaaaatcggtctgtttttacggacgctgtaagggagagaaagaagaatgacgaaggaagcgttgtttgcgctgatgaagggcacggtgatcgtctcctgccaggcgacgccgggcgaaccgctctacgaccgggagcgctccgtcatgccgctgatggcccgcgccgccaagctggcaggcgcgaagatgatccgcaccagctcggttcgggatatcatcgaaatcaaggaagaaaccggcctgccggtgatcgggctaatcaagcgggaatatcccggctttcagggacgcatcaccatgaccatgcgggaggtggacgagtgtatggccgcaggggcggacgttgtgtccatcgactgtacggactgcgtgcgcggcgatgggctgactccgacggaatttttgaaagcggttcgggaagaataccccaacatcatcatcatggccgactgcgcaacctttgaagagggcgtcgccgcccacgcggcgggggccgatctggtgggcaccaccatgaacggctacaccccccagacagccggggaaacgggcgaaccgaattttgcgcttgtggcgcgtctcgtgaaaacgcttccctgcccggtcatcgcggagggacgcatccatacgccggagcaggcaagaaaaatgctggaaatcggggcatgggccgtggtggtaggcggcgcgatcacacgccccctggagatcgcctcccgcttcatggccgccgtccgcgatttaccgggaggaatggtatgattctggcgttggacatcggcggcacctccgtaaaaatgggccttgcggacgaacagggcgtcctgtacgaaaaagcagaggccgacgtcagctttgacggctaccaaacgcccatcatcgatacggttgtccaaagcgccgtgctgtttcttgcgcggcataacgtctccatctgcggggcaggcgtatccgccaccggacaaatcgacgaccgaagcggcgtggtgatcggcaccaacggaaagatcccccattatgaggaaacgcccatcaaagagaagctggagcaggcgctgggcgcgccggtctgggcgctcaacgatgctaacgccgccgcgttgggcgaatgcgccttcggcggcggacgcggctgccggaacgccgttttcatcacgctgggaacaggcgtaggcggcgggctggtactggacggaaggttgtacggcggtgcgcggggcattgccggggagctggggcactttacgctctatcaggagggccctgcatgcccctgcggaaagcgcggctgttttgaacactatgcgtccgtgaccgcgctcatccgtcgtgcgcatgaagccgcgccggaaaccgaatggaacgggcgaaaaatatttgagcgtgccgctcaaggggacgccgtactgcttcgagtgctggagacatggattgatgacattgcggcgggactcaccgggctggttcacctgttcaatccggaggccgtgctcatcggcggcggcgtaagcgcacaggaaaagctgctgatagagcccctgcgccgtcgggtgcttcaaggcgtcatgccgcgctttgccgaagggcttcgggtggaggctgccactctcggcaacgacgcgggacttctcggcgcggttcgcttctttctggagcgggagggcaggctctgaacgtcgctcctgcgcgatacactgtgcttcgccggcataagccggtaaagataaacactgcgacgacaaaaaaggaggcaacacaatgaagaaactgttcactctactgctggcagtaagcctgctcttctccatcgcggccacctccgcagccgccgagggcacaggcggcaccatgtaccccaaccccctgcaggacgttcgcgtccgtcaggcgctgtggtatgccattgacatggacgccatcgtggacgcgctgtggaacggtaccgtgaccgccgcccacaagtccctggttccggagggctactggcaggcggacggcctgaccgagtatacttacaatccggaaaaggcgaaggagctgttggccgaggccggctgggacggcagccgcaccctgaaggccgtttactacacgggcaacctgctggacaccattacggcaatccaggcgtactggaacgacgtgggcgtgaagatggaattccagctgctcaccgacaacctgaccgctctgctgtggacgccctctgcggacggtatgcattccgccgtggactgggatctgtgctttgccggtaccaacgcgctgacgctgggcgagttctacaaccgtcatcacagcacagccgtcaacaactccaccgtaaagccggatgagaccctcgacaaactcattgaagcgtcccgcgtcgccgtgaccaaggaggatcagaaggtggcctacgacgccattcaggtgtatgaaaacgaacaggtgccggtcattcccatgttctacattccctcctgggtcgtaacctccaagcatctggacatgcaggggaatcctgtgggcaacgatcagttctcctaccggaaaaacattttggattggaccactgaccgggaagaccgcacgctgtacaccaacaccggcgccgtcaacgcgctggagcatcccgccaccaaccccggtttgttctggcatcaggaaatcgtgtttgaccgtctcctgaacgcggacgaaagccttgcgcctaccgatggttctttggcggagagctatgaggtttccgcggacggcaaaaccattgcgtttaagatccgcgagaacgtcaagtggcacgacggcgagtccttcacagccgaggatgtagcttggaccttccgctactatcccaccgtccccggcgcgaacaccgtgatgaccgacgtggtcaacgatgccaagtccatcaccgtggaaggaaataccgtgacgtttgaattcaacaacgcgcagcccaacgccctgaccatcttctctcaatggcccgtgctgcccaagcacaagctggaaagcgtcgcgccggagaacttcagcgcggacaccttctggcagatgcccatcggcaccggtcctttcaaggtggagaccgtcaagctgggcgagtacacgatcctgtcccggaatgcggattatttcatgcctggaaccggcaatatcgaaaagctctacctgtatccctccaccgatgcgggtgatgagaacctaatcaccaacgcaaaggccgggatgatcgactatgcgttctgcaaggattccacgcaggtgcagcagctgctggaaatgtcggattacacggtgtacaccgttaacgtgaccttcccgcgttacatcttcgtgaacatgttcgaacgctgatcggcgctttatcacttgaacaacagggggctggcaaacagccggcccccgcctttccttctataatggcgagtgcaaatagacaaatcgaaagaggggaagcctgtgctgaactttatcatccgaaagctcctgggcatgatccccatgctgctgatcattaccctgctgatctatgcagggattgagctgatgcccggcgatgtgattgattttctgattccgatggatcagcttgcggagatgaaccccgaacagattgctgcttttaaggcagccaaaggcttagacggacccatgatcacacgctacttcagctggcttcgaggcgtttgtacgggggatctggggtattcgctgcaaaacaacatgcctgtaggtgtgctgatgctgcagaagctgcccgctaccatcgagctgtcgctggcggcactgatcatttcctctgtgctgggcgttgcgctggggctgatttcggccatccgcaagggtaagctggcggataacgtgctgactgttgccggcatgatcggcgttgccattccgcagtttctgttcggcgtgttctgcatcattttgttctgcctgaatctgaagtggtttcccgtaggacagcggggtacggcgggactgctggacgagatgcaccatctgtttctgccggcgtttgtgctcggcatttccatgacggccggcgttatgcgctattctcgttcgagcatgctggactccatgaactgcgactacgtcaaaaccgcacgcgccaaggggctgccggagtggaaagtgaacctgtttcacggttttcgcgtggcgtgtacgcctgtcatggtgctgatcggctttcgactgccgatgctcatcagcggctccatcgttatcgagaacatcttccaatggccaggcgtcggcaaatggtttacggacgctgtaaagacacagaacacgcccatcattatgtccgtcgggctgtttatggtgctgctggtgctgctctcatccctgctggtcgatattatgaccgcaattctggatccgagggtgaagctgtcatgaaaaacaatatcagacaaacggcactggatcgcaaaatggacaggattcgggcactggaggagagcggacgtctgtccacaaggctgaccagccgaacggcgcgcaagctgctgtccaacaagctggcggtgctgggcgcagcgctgtttctggtgatctgcattctctgctttgcggcgccgctgtttacaagatggcagccgggggccatttctctgcgggaacgcatggcgcagccctccggagagcatctctttggaacggatcagatggggcgcgacgtctgggcaagaattctgtatggcggcaggatcagcatcgttgtggggctgggcagcgcactgggcgcggccgtcatcggcgtgacgctgggcatgttcgtcggctacaagggcggctgggcggaccggctgattctcaaaatctcggatgtgttcctgtcctttccgcagatggtgctgattattatcatggttgcgctggtggggcaaagtctgcggaacatgatcctgatctttatcctgacaggctggccaagcatgtatcgcatggcccgcagcaaggtactctcgctgaaggaagcggagtttgtgcaggcgctgaacgcctttggcatttctccggtgaagatcgccttcaagcaccttctgcccaacaccgtaggaccgatcgtggtgaatattaccctttccaccgccatgttcatcctgcaggaggcatcgctttccgttttgggctacggcgtgccgcaggagatcgcaacctgggggaacattatcaacgtaatcaccaacgccggaagcatccgttacgactggctgggctactggtggatgtggctgccctgcgccgccgtgctggtgctgtttgtgctggccatcaactttatcggcgacggactgcgagatgcaagcgacccgacgcagatcggctgaggaggatgcactatgtcagaaagaacaggcgacgtcgtgctgagcgtcaaggatctacacgtcagcttttataccaatcgccgctgcaatagggtgcttcggggtgtcagctttgacatacggcgcggaaggacgctctgcatcgtaggagaatccggctgcggaaaatccgtcacggccaacgccatcctgcggctgctgccggagctttcgcgcattgaacagggttctgtcacctattggcgtgaaggcgaaaaggggattcgtctggatcaactgaaaaagaacggcagggagatgcgtgcgctgcgcggcaaggacattgccatcatctttcaggatcccatgacggcgctgaacccggtatacaccgtgggcaagcagattcgtgaaatgattcggcagcacaagcgcggtatgcggcggaaggagctccggcatgaatccgttcaggcgctggcggccatggggattcccgcggcggagattcgcgacggagaatacccccatcagttttccggcggcatgcgccagcgggcaatgatcgccatggccatgtcatgcgatccgaaaattttgctggcagacgagcccactaccgcgctggacgttaccatcagcgcgcagatcttcgaactgatgaatgctctgaagcgggagcatggaacggctatcgtgatgattacccacaacatgggcgtggtagctgaaatggcggacgatgtagccgtcatgtatatgggcaatatcgtagaatacggaagtgtggaggaagttttcgttcatcccgtgcatccctatacccgcgcgctgctgcgctccattccggtgctgggcaagggaaaggatcagcagctggagcctattcgcggcatgacgcccgatcccttccacagaccaaagggctgccagttctgtccgcgctgcgatttcgcaaccgagcgctgcgaaaaggaaatgccgcaggaggagtggatttcttcggggcattatgcgcggtgctttcatatcggggagggaagcgtcaatggaaaataaggaagtattgctgcgggtacgaaacgtaaaaacctattttcccatccgcaagggcgttatcaagcgaacggtcggctatgttcgggcagtggacgatattagtttggatgtatatcgcggggaaacgctggggctggtaggcgaatcgggctgcggcaagaccacgctgggaaaatccatccttcagttagtacccgtgacggacggaagcatggagtaccggtttcaggacgggtggaaggatctgcgcaagctgtcccgtaaggaaatggacaacgcccgtcagaagattcagattgtatttcaggacccctattcttccctgaaccctgcgttcaccatttacggttccctggaggatccgctgatcaaattcggcatgaagaaccgtcaggagcgtatagagcggatcgccaggctgctggaggacgtgaatctgccgcgcgaatacatgacccgctatcccaacgagttttcgggcgggcagcgccagcgcatcggtatcgcacgagcgctctctgttgatccagaactgatcatctgcgatgaggcggtatccgcgctggacgtgtccattcaggcgcaggtactcaagctgctcaataagctcaaggacgagcatgggctaacctatattttcatcactcatgacctgtcggtggtggaatatttggccgaccgaatcgccgtcatgtatcttgggcggatcgtggagcttacaacgtcggacgagttgttcggcaacacgctgcatccctatacgcaggcactgatcagcgccatccccgtggcggatgtgcgaaaaaagaaaaagcgcgttcctctgcagggcgacgtcccatcgccagcgaagccgcccgaaggatgcaccttccatccaagatgcccgcgctgcacggagcgctgccgaaaagagcgccccgaattgcgggaatatactgtcaacggaatcagtcattttgttgcctgccatctggcggtcgcaccggtagcagatggatgaactcactgatctggcaaaaatacggcatgagatttcaggggacatgcctcccggcagagccgtatgaacagcggggcaattgttccgccataaaaacctttgcttaaattcctgatacacacgctgatcggttcgactgtctttcttctgaccgcatatttggcggggtggatggaaaacagcttcggcgtgcttatgtttttcctggttgcaataggaaccgcatcccctttggtggctttgcgttttcctctacctcagggcgcaggcaaagaagatgaatcaaaaaatcaaagacaagccgcaaaaggaatgatcgctatcgcagcccaacagcccccaaagcgcagccgacgaaaatcggttgcgttttctctgaccaaaaagagcagccgggccttgcccgcactgctcctgaatcgagttgcccttgcaatctgatttttgatagtctacatcataacacagggaacgactcccgttcaacagcatttactcccgttttttcgggaacgacaatatttttcaacgcttcaccatgcacccgatacacgctcgtcccgctgattccaagcgtttccatgatttccgaccacggcttgaagcacagatacagcagttccagcaccagcttctgatccgggctgctcagccgcgaaatcacgcgcttgacctcagccttcagatccaccagccggtcgacgtcccggttgaactcgttctccagatcgatgatcttgacgatggtattttccatggcctgcggattcggtgaagcagaccgcggcatatccgtcagcgtagccgtcacctttgcggcggattcccgcagtgtcgctacctgctgaagcttgctgtcgatccgctggtcgatgtacatcgcctgggacaggtattccttcgggctcatcttgttttccgtcattcgttttctcccttccagggcatatcgccctcgtagtacagctcggcgatctcccgctgccgctccacaggcagtgcgttcagccgctgattggctctggctacgtcctgcgcgtacttccaaatcggcttgtagaaggagcagaccgcataccctgcgcactgttcgctcgtcagcgccacacattttccattgcgccggtgtgcaaagcatctctcgttcatgctcgcgtctcctccattcgttcgttcagaatcgtcagtacctgcgcattggtgcggcgcaccatctccagaatctgggcgttatgttcctcgctgcccatgccatctgaatagcggcgcatagccgaggccaggccgatcgcataggaatcgcagcagctcttcaccaggtctgccacataccggaacatctcgggcgtaccgggcagcggcctttccacatggatcggcgctccgttgtgcatcaccatgctggggatgggacagggcggttcggagcttgcggcggcgtccgccgtctttgcagtagcgtctgccggttttgccgcagctttcgccgcaatctttgcggcggcactgctctccttctcgcagtccctgcacaccgaaaaaaagctgcggcggttggacggaatcgagaaggccgacatgggcttttcctgtttgcagcgctcgcagattttggtttcaccctcatgctccttttccagcagatcagtgtaagctttgttgacgctcagcttttcctgccgcagttcatgctttactgcatcgtcggcatccctgacaatccttcttgctttgcggattgtgttatctgaaactcctgcaagactcgcgagttccttgttggtatggatcttctgttcagcttttcgagatgtctctaaaagctggggatcatgtccaccggttgaagtcgcctgtttcttttttgcggcttcccgcagcaagggctccgttcgaagcgcaagttcgctgcgctggtagggattcagattgcgcctccccagctgattgcgcagcatccacagcatggtgtcgtcacggctgctgaaattcttttcctgagtagaaaacgaaatttcgcgcttccggcagatggcgtagcggttatgcccgtccacgatcacgccgttccacacgatgagcggcgattcgcagccgtccgccacgatgctcgcttccagcagcttcagttcttcctctttcagcgggggaatcagatcccggaactcggggtctacggtcagttcatacactttcttttcagtcatttccgaggaaatgcagtgcagcgccagaaccatttaccgtttccacaacagcgctctccgggtggcggacaggctcctgcaggcgggaaaataaaaataaaaaaaatttctgtttgcgtactttgctattgtttggcagtatttccctgtggtatgatgtatgctgtcagaatcggatggacagcaatgcgtaaaaaaacgcaggcattttcggattccgaagaaaagtgtccggaaatgtccttgaatgtccatctccacctgtggtatgatgtatcctgtcagaaccagatagacagcaatgcgcgaagaagcgcaatcagattcaagagtagtgcgggcagaagcccggctgctctttttcgttggaggtacgagcatgaaagagtcccatcaacccagagcccccaccgtgccgcgcacgggacgacccaatcgtgagccgctggatgtggacgaggtcatcgcctacggtctggggctggcagaagacctgggcgtctccattccaaaacacaggcggctgcgccgaatgctgaaacggaggatacccattccccagatttatcagggcgcggattaccggctgtggatcgatcggtattacatcgccgcacagcgccttgcggatgagagcgttcgctacgcctacctgacgcgaatccatattcgcagcgagctgctggcgaacagaaactccatccggaaaaatggattcgcccttctggattcagaagcgttggcggagttcgccgccgcgcgccgcgccatggagcactatcagacggattatgccctgcgcctttcctgccccacagagggcggcacggcgcggctgaatctggacgcgacatggagctgcgcgtgaacgttctccccgacacagggcaaacgttgcggcaacaggggcaaaggaaacgccaacgggcggcggcatttcaaaagcgtcaggccagctgaaaccagatggtcagccagcccttcggcgtaggatagcacagctcggcggtgggatccgcgaagaatttctccttcgcgtcctcaatcatccggcggtagcgctcctcgccgcagcgttgcttcacatagcgcatggtaatggtctcgccttccagcaggaaggtctttcggatggttctcctcatgggcgttcctccgattcggtatggctgggcatgcttccatagcggaaggcgctgctgccctgcagatttcgaagcagcacggcgcgggcgtccttgtactccgcgccgatgaaccccagccgcagcagaaaacagcgcatggcatacttctcgttgggcgcgtccttttcggcgtaagccgcccatttcaggcgattggaaagctccgccagccgctcgatgaaaagcgtgtaggcggctcgttcctcttcgtcctcggtttgctcgaaccagggaaaggcaatctttccgtcttgttcctcgacaggcagttccgccgcgttcagcgcgtcgcagaagagcctgtgccgggagacgatcagctttcgaagccgcgcaagcgcgtcaggcgaaagcctgtccgccgggatgcttacggtgaagcggtcatcgggaagcggtgcttcctccggcgcagcctcgccgggtgcgctgtcctccgtctctatttcggagcacaccgtttcgaccgtgcaggagaatccccgctcggccagcgtcgccgcccggcaccattggagaggtggttggtgtggacgatatggccagtttgcttgtcagatggcgaacgggcagttcgctcagcgtgctgtacggcatcaatcgggtgaagaaaatctgaacgtgcaggcataccaacaaagaccctaacaacacaccaaggcagtaaagcagtcggcagcggctgctttttcttatcccaatacaaccaaaacacaccacaaggaggcaaacccaaatgaacgtaacccatgacggaaagctcctcatcgccgtaggcaggagccgtcagtccacccaatggcagaacaaagaattcaactggagcgaattgctggacaagctggcccagaccacccgcacccgggaaacggcggcggaatacgccgcgctgcccaagggcgagcgcgacaacatcaaggacgttggtggcttcgttggcggctatctcaaaaacggcaagcgcaacaatgcttccgtggtcaaccgctgtctggtctgcctggatgcggactatgccgacgaaggtctgctggacgacctcgacctgaccttcatcaacgcctacgcactctattccacccacagccatacgccggaaaagatgcgcctgtgcctcatcatcccgctctcccggacggtcacgccggacgaatacgcagccatttcccggcgcattgcggacgagctgacgctgacccgcttcgatcccaccaccttcgagcccgcacggctcatgtactggcccagcacgcccgaggacggcgagttcgtgttccgctataacgacgcacccttcctcgacccggacgcggtgctggccacctatcccgactggacggacgcttccctctggccgaccatgcgcccgctggaagagcgcacccgtgtgaagatcggtaagcaggaggatccgctggagaagaagggaatcatcggcgcgttctgccgggcgcgcagcattaccgatgtgctggatacgattctgaatgataaatacacgcctaccgaacaggatgaccgctacaccttcgtcggcggcagcaccacgggtggactggtggtttacgacgacaagtacgccttttctcatcacgccaccgatcccgcaggcggcaaactgtgcaacgctttcgatctggtgcgctggcatctcttcacgcctggcggcaccgcgccggacggttcttcagtgggcgacgagaagagttccatcaggcagatgcaggaatacgccgcgcaggatgaagcgacgaaacgccagctggctgaggagcgcagcgcgcaggccatggaggaattcggggatctggacgccgagaataacgcttctgcttcaacaggcaatgcttcagatgaaaactggcaggacactctggagatcgacaagcaggggcgcgtgaaggataccctcggcaatctcgctctcattctgcgcaatgatcccaagttgaaggacatcgcctacaacattcatcgcagcggcatcgacatccgcagggacgcggacggcaagaccacgcttccctggacgcagctgaagcctggctggaacgaatccgacttgggtgcgattcagatttatctggagcgggtctataatctgtacacgcccagcaagctgaaaagcatcctgccggccattgcggcggagcgcaactatcatcctgttcgggattacatcgaatctcttcccgcctgggacggtgcgccccgggtggacacgctgttcatcgattatctgggcagcccggatacgctgtacatccgcgccatcgccagaaagatgatggtcgccgccgtggcgcgcatctatgagccggggatcaagttcgacagcgtggtggtgctgaacgggccgcagggcatgggcaagagttccttttttgccaaactgggcggcaagtggttctccgacagcctgaccatcagcgacatgaaggacaaggccgcgccggagaaactgcagggctactggattctggaattgggcgagctggcggggctgaaaaagatggatgtagaaaccgtcaaggcgttcatcacccgacaggatgacaagttccggcattcttacggctacagcgtggaggatcatccccgtcagtgcatcatcgtgggcagcacgaacaacggcgacggttttctgcgagacgtaaccggtaaccgccgcttctggccggtgacctgcacggccaattcgccgcatcgaccgtgggaagtggagagcgtcgtaccgcagctgtgggcagaagcctggcagctgtataagaatggcgagaagctgttcctgacgcccgaggaagaaaaacaggcggagatggagcagacggctgcgctggagagcgacgtccgcgagggcatgatcgcggaatacctgaacacactgctgccggaggactgggataagatggatctggcggagcgccggggcttcctgcgcggagatcagttcacaggcggcaaccggacagggactattcagcgcacgaccgtctgcgccgtggaaatctgggcagagtgcttcggaaaagacccttccacgatcaagcgctccgatacctacgacatcttcggtatgctgatgaaaatcggtggctgggagaagtacagcgggaacaggaacgcctctctgaagcgtgcgccttacgggacgcagcgttgctttgttcgtgtgaacgcgttgccagacggttgcgcttcggagaacgcaggctgaggtttggatgcctttggcaaaggcaatccatatagcgacggtgaagcaaacagggctcatataagtaggaagagattcagcggaattgcctggttgccatctctctatttgagtatttgaaaaaagagggataaaagagaaaatgagcgcgtatatgcccgaatgcctgtacgcgcgcgggagaacacaacgcaacatttcagagtctgacgctgtaagactggcggctctttgctgtcagcctttcttttgcccgttttctcccctgatttcttatgagcctgcaaagtgtggaatgctaacgccaaagtttgctgccgcataaggtatccgctcagtagttctatacgttatcagtctatcagtcgccggcgcattgtccggcgcaggaaggaggttcattttgccgggtgaaaaggatctgcacccgtatcaaaagttctgcgtggattttctggaggagaagccgcagtgcgctttatttctggactgcggcctcggaaaaaccattattacgctcacggccatctcgcatctgctgtatgacagctacgaggtgagctgtgttttaattatcgccccgctgcgggtggcgcgggacacctggatcggcgaactgtccaagtgggagcatctgaaggggctgcggatggagcgcattctcggtacgcccaaagagcgcgtcaccgcgctgtcccgaaaagcggaactgtacgtcatcaatcgggagaacgtggaatggctggtcaagcactacgccgggagaaagctgccctttgatatgctggtgatcgacgagctttcgtccttcaagaacagccgggcgaagcgctttctggcgctgaagaaggtgctggggcagttctcccgcgtggtggggctgaccggcacacccgcgcccaacggtctggaagatctgtggccgcaggtgtttctgctggatcgaggtcagcggctgggcagaaccatgcgcagctacctcgatctctatttcactacccccaacagctggctgccctacaagcacgaactgaagcccggcgcggaggaacagatttacaaaaagctgggcgatctctgcgtgtccatgcgggcggcagaccatttgcagatgccggaacgcattgacaacattgtggagctgacgctctcgccccgggaggaaaagctgtaccggcagatggagcgggacatgctgcttccatacgcagatggcgatgtgctggcgttgaacgcggcgacgctggcgagcaagctgctgcagctgtccaacggcgcggtgtacgatgagttccacaacatccgcgtgattcacgataaaaagctggatgcgctggaggatctcatcgaagccgccaacggcaagcctgtgctggtgatgtacgcctatcagcacgacctcacgcgcattcagcagcgtttcggaaaatacagcccggagaatccaaatggagtgcgcgaactgaaaacctccaccgatctggaggactggaacgcggggaaaatccccgtcgccgtcacccagcccgcatccaccggccatggtctgaaccttcagcacggcggcagcaccattgtgtggtttgggttgaactggtcgttggagttgtatgagcaggccaacgcccgcctctggcggcaggggcagaaggagacggtggtcgttcaccatctggtggtgaagggcactatggacgaacaggtcatgcgagcgctgcatgagaaggcggcggatcagaacgcgctgctggcggcggtgaaggccagaattgaggaggtgaattgaaatgctggaaagagatatagtgacagccatcaggaagtacctcgcgtcgctgggcagcgacgttttcttttggaaggagcacggcgggccctacggctgcgcagggattcccgacatcatctgctgctataaaggccgctttctgggcctggaatgcaagctgcccggcggcaggctgacggaacttcagaagcgcgccattgagaagatcaaccgcgcgggcggcattgcctgccgggtggagaatgtggaggacgcaaagcgcgtgattgagcgcgtggatttggagaggagcgatacgaatgcctgaaaagaaactgtatgacctgacggttgatcccgaattccgggatctgattcccccgctgaacgaggaagagctgaagctgctggaggagagccttgtagcggatggctgcgaatccccgctcatcgtgtggaacggtgtgattgtggacggacacaaccgctacgccatctgccggaagcatgagatcccgtttgctattcaggagaagaatttcagcagccgtgacgacgccatgctgtggatgctgcgcaatcagctggggcggcgaaatctgaataactatcagcgggtggaactggtactcaaatttgagcctttggtaaagaacgcagcagagcagaggatgatggcgggaaaagcagcaaaccctgtgccaacattggcacagggtcagaccaaaggcagaacgcgagatcatctgagcgaggcggcgggagtttcacacggtacttttgcgaaagccaaaaagctggttcagtcggcggatgaagagacaaagcgagagctgcgcgccggaaaggttacggtaaaccgtgcctacactgagctgctggaaaaggagcatgagggcgaaaccaaaatctgtgagcgctgcaaacaggaaaagcctctgtcggccttctcgatcccgtccaatcgccgcagcttttcttcggtgtgcagggactgcgaaaaggagatcagtgctgtagcgaagagcgcggcggaagctgcagcaaaaccggcggacactgctgcaaaaccggcggacactgctgcaaaaccggcggacattgctgcaaaaccggcggacattgctgcaagctccgaaccgccctgtcccattcccggcatggtaatgcacaacggcgcgccgattcacgtggaaaggccgctgcccgatacgcccgagatgtttcggtatgtggcagacctggtgaagagctgctgcgattcctacgtgatcggtctgacctcggccatgcgccgctattcggatggcatgggcagcgaggagcacaacgcccagattctggagatggtgcgccgcaccaatgcacaggtactgacgattctgaacaaacgaatggaggagaaatgatcatgagcagaaagaacaaaaacggaaagcgcagaaactatacccccaagacctacggcagggattttctcacgcccacgcccattgaacgggcgattcaggaggcgaacaagcccgcttccccgcaggccgtggtcgtcagcgaccgcatcgcctgcgacgacaagtgcagctacgagtacaagcggatgcccgccgcgtggctggaaacggatttcagctaccagcgcaagatcgattccgcccgggtggatcgcattgtgaacagcttcgacccgcgcctggccaacgaggtgaaggtcagcttccgggatggaaagttctatgtgttcgacggcgcgcataccctcagcgccctcaagcggattcacggtgaagattccttcatggtggactgcaaggtgtattacggcctgtcctacgaggatgaggcctatttgtttgcgctgcagagcggcgaatccaaggatgtggccttcaatacccggctccgtgcgctgatgctctcgggcagccgggaggcgacggatttccgagcgtatacagcgcaggcgggctttcagctggcggacagcacgggcagcgcgacgaaaaacaccatcgccgccatcgccaaggcttatcgcctgtacaaagagtacggcccggaacagtacgttcagattctgcggctgatcgccgatacctggaacggcgcggcgtggagcgtgacgggctatctgctgggcggcgtggccgtctttctgcgggagtacggcgaggagtacagccgcctgcggttcatcaagcgcctgcgcggcgcgacgtatgagatgcttcgggacgaagctcgccggcagcagcgcggttcctcggacgtggcgcacgccctggcgatcacgaagctgtacaacctgacgggcgggcgctacacggtggatccgcgcaggcttacgatgctggattaacaggaggcagatcatgaacgagagatgttttgcgcatcggcgcaacggaaaatgcgtggctctgacgggagagcagtgcgcgggctacgcggtctgctcattctacaagccgatttggaagcatgcgcaggatgtagccagagtcaatcagcgcttgaaccggctgtcgattcaaaagcagagggacattgcagaaaagtaccataacggcgagatgccgtggaagggagaaaacgaatgacggcccgagaatatctcacccaggcgcgaatgatcgactcgcgtatcaacagcaagctcatggaactgcagcgggcacgggaactggcgaccaaggccaccgtgctggtatcggatatgccgcggaacccctctcccgatttgcagcagatggaaagccgcgttgtgaaaatcgtagatttggaacgggagatcaatgcggagattgacgcgctggtcgatctgaaaagggacattcgggagctgatcgcgcagattcgaaaaccggagtaccggacgcttctggaactgcggtaccttggattcagaacctgggatgttattgccgaagagatgggtttcgagccgagaaccatttaccgctttcatagcaatgctctgcgggttattgagcgactcatgcgcgccgagaaaaattcctgagattttttctccaaaagtgcaaaatgtcattgtttgtcagtatccacctgtgctatgatgtatgctgtcaaaatcagatgagcgaccaagtgccgctcaattcaggagcagtgcgggcagatgtccggctgctccttttcattggaggaaaggatatgaacgaaacgcatcaggccagagcgcccaccgtcccgcgcacggggcgacccaaccgggaaccgctggatgcggacgaggtcatcgcctacggactggcgctggcggaagacctgggcgtctccattccaaagcgcaaaaggctgcgccggatgctgaaacggaggatacccattccccagatttatcagggcgcggattaccggctgtggatcgaccgatactacatcgccgctcagcgccttgcggatgagagcgttcgctacgtttatttgacccggatccatattcgcagcgagctgctggcgaacagaaactccatcctgaaaaatggattcgcccttctggattcagaagcgttggtggagttcgccgccgcgcgccgcgccatggagcgctaccagacggattatgccctgcgcctttccagccccacggagggcagcagggcgcggctgaatctggacgcggcatggagctgcgcgtgagcgttctccccgacacagggcgaacgctgcggccacaggggcaaaggaaaagccgccgggcggcggcgattcaaaagcgtcaggccagatggaaccagatggtcagccagccctccggcgtaggatagcacagctcggcggtgggattcgcgaagaatttctcctttgcgtcctcgatcatacgaccatagcgttcctcgccgcagagctttttgacatacttcatggtcacggtttcgccttccagcaggaaggtctttcgaatggttctcctcatggacgttcctccgtttcggttcggtggggtgcgcctccattgcggaaggcgctgctgccctgcagacttcgaagcagcacggcgcgggcgcgcttgtactccgcgccgatgaaccccagccgcagcaggaaacagcgcatggcgtatttctcgttgggcgcgtccttctcggcggaaaccgcccacttcaggcgattcgaaagctccgccagccgctcaatgaaaagcgcataggcggcttgttcctcttcgtcgtcagtttgttcgaaccagggaaaagcgatcttcccatctcgctcctcgacaggcaattctgttgcgttcagcgcgtcgcagaagagcctgtgtcgggaggtgatcagctttcgaagccgcgcaagcgcgtcaggcgaaagcctgtccgccgggatggtcacggtgaagcggctatcgggaaccggtgattcctccgctgcagcctcgcagggcgcgttatcctccgtctctatttcggagcataccgtttcgacggcgcaggagaatccccgttcagcaagcgctgctgccagccgctccgccgccgtttcgttcagcgatggaaccaggcgaagcgaagcgtcgcgcgccagacgaccaacgccgaattcgtaagcgaaggtgggtgcgccgcagtagcgcggcttttcgtgaaacagttcggacagcgctccagccagcgccttgcggttggactgtgcgtcggtgcggatgatgatcatatacattcctccccgttgtctatttgagagcagtggctcccgcgacgcgccccggcaatgccggttccatcggcgcgtttcggctcctgccagagagccatcgtcaggcgggacgaacgttttccgggtacgcgccgtagcggtcgccgtccgggaactcgatccatacggtgttggtcgatttcacagctttggccacgacgccggtgcggccgcagtagcgctcgcgatgccgttcaatcgcgacgttgacgagcgtgacgcgcattcccctgggaaactgatcccgaatatcaggcttcttcatgctgatcccccctctctatttgcaagctcgttcagctttcggctgagggtggcgcagtccgccgtttcattctcagcgtcgaaacagccggccagctcgagcattacggcggcgcgttccagatgcgccgtccgatagtactgattgaagcgcacagcctccgcaaagccccgtccgtcgtcgaaagtgaggtgggcggcgaagcgctcggccgcgccgcggatgttacggtcaaaggtctctgcctgttccagttctctcctgacaagcgccagcaggcggctgcggtcgatttcaaagattttgcgcatggtgatagcctcccatcgtattcaggagcgtggctcccgcgggtttcccgcgacgcgccccggcagtgccggttccatcggcgcgtttcggctgggtaccctctcccagcctcgtcaggcgggtcattcttcgtcgccggcgtcctgttcgcggaactcccgcatgatttcatagatttcctgcgggtcgcagtcgataccgtcgtacctgcgaatgtcctcggccagggcaacagcgtccgcaagtgtccagccgttctcccaggccatgttgtcgtagagcttgctcagcagaaaagccggaaggtcaaaatctgaattcatcatgcacttcctcctccatttcaaagcgtcagtcgttgcggggcgccagcaggcggaaggttttgccgcgcgcctcaatctcatagcagtagagcgcgggcgtggtctcgccccagctgctgcggttgacgcgggtcacgcgggtgacgtccgagagcttgcagctcttcatccgcggctggcgctggacgtacttcagcgccgcgcatttgaaagcttcgggcaggttccggcgaacgctctcgtgacgcgcttcccggcgcgcgcggcgctttttctgaatggctctgccggtttccgcgtcggtatagtagctctcgccaatctggcagaactcgatttcggagagaatctccaggcgattgttccagatggtgttgcccagcgtgtcgaagcagttcatgcggatgcggtcggtattccggccgacgatgagccggaagccgtcgggcttttcgccgcgcccggcgctgtggtcgagcagcacgcggatgatttcatcgcccctgtacaggtcgacatgggcgatttcgccctgcgagccgcccatggtgccgggataaatttgatagccccggcccagcagttcggcaaccttctcggtgaaggcgcggttgatatcgttctggttcatgatagtacctccttctcatttggaagctgtggctcccgcgaccccttgcgggggtttcggctcctgccagagagccatcgtcaggcgggtcagaggtactggtcgaggctgtcgaccatcaggggatcgttccggcaccactcggccaccgcgttcagcagccacttctcgaaggcggcgtgggagtcgaactcgtcggcgcagaaggcggtgcggtcgccgccttccatgtaagattccaggtcgtcggtgaacaccagcctgccctcaatttcaaagagctcgtggtcgctgagcgccttccaggcggcgacggccaccttgcagtagccatcgggcagacgggtaatcttgtacgcgcgggtcataaacatcctcctctcgattcagaagctcaggcgaagagcatgacgtagtcgtgggcggcctgggcgatggcggcgacttcggcggcggtgggcgcgacgtaccactcggccctgccgcagtcgacccagatgtgcgggcagcagattccggagcatccggccttccggggcgcgaagaaatcgctgaagcggaaccgcaggcagtcgatttttccgtcggcggtgctgaggatagtgacctgcagcgcgtcatactggtcggccacgccgctggtgacgaattccagccgggcgcggcggctgccgctgaggggaatgaagcaggcgcggcctgcgtagagcgccttgcaggatttgaaagcggtggttttgccggtgaaacggcggagttcctgttcgaagaaattcatggtgacgcctccctgatttcaaagatattgcgggcttcccgcgacgctcggggcgtttcggcccggagccgccgggccatcgtcaggcgggagatttcaaaccatctcgcaggcctcgaaggccgcaaattccatatcgtcgggcagaccgccggtggcggcccagagcaggtcgtgggcgacgcgcgccgtccgccgatttccaagccgcgccgcagttcgggcaaaagccagcgcctgcctgcggcactccgtgttcgatttgtaacccatggcgattcgggcggcggtgcaggcgtagttccggtagtccgcgaccttccgattcaccgagcggccgaagctgcccgttgcggccagttctgccacgctcagttccagagtgccggctcggtccgccgcggcggacgcttcccgcagaagctcggcggtggtgatggctcccttctggtagtatgcgacggctctgcccaaccgggcgatggcggcgtcggtgcggcagcgcagagaggctgcgcggcggagcgtggcgttggatttttccttcatggtgagattcctccttgaaaaaaactgtccgccgtgtgtttcagcggcggatttcgtgattcagttcttcggccagagagaccagttcgtccgcttggtcgcaggcttcttccagggcgtcgttggcctgctgaaaggcgtaaaggatggagtcgtcctccagggcttcctcggggtcgagggcgtcggcggcgttttgcgcggcctcctgggcggcccggcagagccagtaggcggcgtctcccacctcccaggcggacggggcttccgcgagcagttcccttgccgcgacggcggcctgggcggcgaggttcgcggcgacggcggccgcgcgggcttttcggacttcgagtttcatgaggcagacctccttggttgttttgcgggctttccgcgacgctgggcgcgtttcggctgggagccctcccagccatcttcaggcggagcggtggttaaagcggcggtgcgcgtttcatccggggttcctcctttcctttttcctttcgggctttccgctcggcgccgggcggaaaggttcggtcgttgggggcacccagagagccttctcgagcaggcggacaggggcggggt

SEQ ID NO: 1527 - DNA, 9957 bp, Unknown
  16S sequences of unknown bacteria
gtccctgcttcagcaggcgcagacggccgatgagcggcgatggcacctggcacagccagacttctgcgtccggacgctgcttcagcatctgcatcagcaccaggcgcaccagcgtgtcctcaacattcagcagccagatcgacgcgctggcctgacacagcagaggcatcttttcgcaggtcaccgctgtctgggtcagctgatccagcagcgaagcgaacgggtggtcctcctcctctctgcgcgcccagatgctggcaggcatgtccgctgtgcctgccatgagccatggtgtctttgcccccctcaacagcgcctgcttccagcgttcgccgctctcccgcagcgcctgcgcatgcgcaagcgcctcctgctgccggcttgcgatccgcttctcgaactgcaggcgcttctcccggatctgtctgcgatgcgcatgccgctgatagagcgcgttgagcagcggccatacgaccatgctgaacgccatgccccatgccatccacatgccagaggaactgcggctgtaagcaagcagcgaaaacagcgccatcgtcatgccggcgcccagctgcaacgccagcggctgaaaggcaggcggggaaagctgcggcagcggcggaagctccatggtcctcaccgagagcggcgaagacagccatttcacgcacggctcagcatttggcggcacatcaggcaacgccgcaggcacatagcgcgagagcggaagcggacggtccgcggccacgaacccggcaccgatgatcatgcgcatggcgagcaggtcgacgacatcgcccgccttcagctggacctgacctgcgcggcgctcattcacataagtcccattggtgctgcccagatccttcaggagcaacgcaccgtctgcactgcatagctcagcgtggaacagcgagatgaatgattctttcagcacgagcgcgcattgttcgctgcggccgatgctgaaggtgccgacacgatgaaaatacagctttgtcctgcgctcctgcatcatcaccaggacctgttccccgccgacagacagcaccatcgcctctttgctcaacagcgcctgcggctcgcccagcgcatcatagatccgccatccctgctcctctcgttccagcgtcatcagcacgtcctcatctatgctgaccacgatccgcggcgcaaatccgcatgcgatgcggatcagcctgtcccgcgcacagacacagatctccttcatctcttcccatgctcatgaaacacgaagacatgatcggcgatcttcagctgcatgccttctttcaggcgcatctcccgctgcagtcgcttgtcattcagccagcttccgttgcgggagcgcagatcgcggacataccagcggtcatccgccctccttaagcgcgcatgctgcctggaaacctgctcgctgtccaccctgatcgcgcattcctcccctctgccgatcaccatctcttcgtcatataacagatagatctcctccccttcctgcaaaaaatcctgtcgggcaggcgcctgcagcaaggtcgtgaccgcataagatccgcctggctcctgcagagcggggaccttctcttcttcccggtatgtctcctcaagcaccttcacccgggcatgaaacccttcctcctctcgccttttcctgcgtctttcccaaaagccgggctttttctcatacaattggcgcagcgcgtgcagcccctgcagcacattgggcagggaaaactcatccccatgagtgacccgcatgagaaatccgacgatctcatacgccttggatgtctgcacatgagacgcgagatattcgatgaacgtcaggctctcctgcttttgcaggtgccagtgctccacattgagcggcaaggcgacaaaacggaaaaatgtgccctgcggcggaaggaagacatagcggacatccagcagcaccggctttgtgcggtttgccttcagcagctgttcgagaagctggatgatgaagcggtacgcttcctcttgctcaaaatgataatgcgccagaaaataggacagcgaggtcagccctgccgtctcatagcggatcacgccctttctttcctgcagcggcggcagacaagtctcatccatcctgatctgctcatagatgtatggatcaaacgcactgccctctttcagccgaacgcagagcgatccgccttttcgctccacatctgccagcttctgctgcatgtctatccctcctttctcccttttcgctcttcttatacggcgtcatccccctcatccctaaagcggttgaaaaaagcatgcgctgtgatataattgcgcatatgaacgatcattcatggaaaaaaacgctgcaggcgctgtttacgttcctcatcttcccggccctgaatatcatcgcattctgcaagaccggcgcattacagacgaacttgtctgatctgagcagggagtctcctttgttcctgctgctgtggggcggatgcagcgcgctcaacttcctgctgatgagcaggctttgttaccggcgctgcggctacacgaaaaaaaaggcgcgcagcttatggctgtacgcctcctgtctctgcatggtgctctgtgtgatcctcccctatgatcccgtacacgccccagcgctcagccagtggcatgtgcgcctcgggttcatcggcaccctctgctatctcctgcagtttcttcattttctgctcatctcgatcgatgagggctggctgttccttcgccctttcctctatgcttatgtgctcatctgctttttcagcgtctacaccaccgcgctcagcggcggcgtgaccggaatgagcgaggtcacgttttccttcgccatgagcatctacctatatgtgctcgcacgcgcctgcgaacggcagacgccttaagacgtatgatgcgcaaacacaaaaggggccgcagcgctgatgatcgctcactcatcacggcgctgcggctccttattcatgatcattcctcttcctgctcctgatgagccagctgacgctccatcatgcgcagataacgctgtgccttatcatgataagccatcgtattggcattggagacaacatagctgaaatgtgtcgacgcttcgtcgaaatctctgcgcacgaaagcgatcatgcccaggtaataatgcgcatccaccagctgaaagcgaagcttcatctgcgggagcacctgacggtaatacgcatcgcactgatcaaactgctcattcatcaggttgatcttgttctggatggccgcgaccgcatcctgcatcatgatattgccggcggcgcccatgttcaccctggtcgatctcaccgcttccagattgcgctccagcgcgctttgatcacccaggcggtaattggcttccgccatcagcgactgatagttcagctcggccgcactgtttccgcggcgcatcagcaccagcgaatccatcgccagctgcggatcatccaggtagagcatgcactgcgcgaacaacagattcatcttcaggttcagccggcttccccgtctggaatagatgaggatcgcgctcgcacaggccacaggatcacactgttcgaagagcagcgcattgatcggcagcacgctctgcgccctgagccggaacaaataagtcagcagcagcgcatacagcaggaacacgaagaacatcaccatcaggttctggatgatcagcgtcagacagatcagcgcgacaaggccgagcacatagaccgccgtccagcgatcgctctccttgcggcatttcagcgccagcgccgagacatcctccttgaattcatgatggagacgatagacccgctccacttcgttcccgttgccattaggcagagaacggaaattcttcgcggccgaattgcggacggtgaccatgccatagatacagacgacgatcgtcgggatgagcaggatcatgccgatcgccatgatgatggtaaagatcggcatcaggaagaacagcaggaagagcaccatcgggctgacattgaacttctgcaccagatagacgagcagcagcacgccgttcagcgcggatgcgccgatcaccgcaccgatcagccacggcatgctcagcagcgtcctgaccgtttcctccggcatccagttgagcttcacgacctcatcgatcagctcctcatctatgattccgccaaacagcagcataccgactgccgcgccgatcagcagggacagcaaatgacgtttacattgatatttccacataaaatacctccagcaatgacattatgatagcatatccggcacaaaaaacacaaccggttgcaaaaatgactgcgcatgatgcacagtcactcatccagatgattcatccgtctctggctcgccctggtcgctctggctggaaggccgacgacggtcgtatgtggttcgacatcctccaggaccacggcgtttgcccctaccttcgcgccttcaccgatcgtgatattgcccaggcatttggcgccggtgccgaccatcacgccgttttccagcgtcggatgccgcttcttatgctctgttcctcgtccgccaagcgttacgccatgatagatctggcagtcatcaccgatctccgcggtctctccgatgaccacgcccatgccatgatcgatcagcagtcctctgccgatcttcgcgccgggatggatctcgatcccggtccagaaacgagcgatgttggagatgaaacgggccaggaaaaacagatgccaccgatacagacggtgtgcgatccggtgaaagccgatcgccttgatgtgcggatacagcagcagcacctcgatgcgcgagcgggccgccgggtcattggccatcgtgcgcttcaggttatagttggcgttcctgaaaaactgcatcattcgaattccaccaccgagaggtacttatcggcaccatccggcgcgatcgtcaccaccgtcttgccgggataatatgcggcgtagcgcttggccgccgcgatattggctcccgcgctgatgcccaccaggatcccggtctcccggccgaagctgaccatctcgcgcatcgcttcttcatcgctcaccgtcgcgatatcatcgcagacctgcgcgtcaaaattgccggggatgaaattggcgccgatcccctggatcttgtgcgcgccggccttgcgcccgctcagcaaggcgctggaagccggctccacggccacgcagaggatatgcggatcatgttccttcaggcggcgggatatgccgctgaacgtcccgcctgtccctacgccggcaacgaagatatccacatcaggctgctgcttcaatatctccggtccgctcgtctcataatgcgccaggacattgtccggattgtcaaactgaccgagcgtcacatattcctcatgtccgctcatcagttccttcatcttgtcgatcgcgccctgcatgccggcagaagcatcgctgagcacgagctcagcgccatatgcctggatcatgcggcgccgttccacgctcatgctttccggcatgacgatgatcactctgagcttcagctgcgcccccagcatggccagcgcgatgccggtattgccgctggtcgcctcgatcagcacgctgtccctcgtcacttcgccgcgttccatcgcccgcttcagcatccaatacaccgcgcggtccttgacgctgccgcccgggttgaatccttccagcttgacatatacgtttgaatcaccgatctggatcatcggtgtatttccgatcagttcgattggtttcatctatgttctcctccttttttctgattcaccaccgcctcgctttcttgcaacatcgcgcgcaatacaggaacgtctcctgtgtgagctggctgatcctgcaatacatgaaacattcctcctctccataccatatgatatccgcagcgcctgcagaacatcctccgttttctgcttcacataattttacatgaaactgtgataattatcctgccgctttcggatatactctaagtgagcttgaaaaagagctcacttcttcataatcaattttccctttcttttaaacaatgtttggacaaaagcagcgctcctctcgctgcttttgttcatgttctggcctcagagcagaaactgcagaaagtaactgagctgccgccgccaccatggccagtcgtgattgacatcatagccccagaaatccacccatgcctggatgcccttctgttcaaagaccgcttccatgcggtgcatgtggtcgaccatcgtctcttcccatgcgccctgtccgcagcacaagatgatgtcgcgcgcattatacatctggatatacggatgatccgttgacatgttgggcagaaagtccagcggggaattcgcataagtcagatcatcgtgataatcatggaagaaataatcgctttgaaacagcccgctcagcgaaagcacctgatcaaagagatccggacggcgcatgaagacgttcaccgcatgatagccgcccatgctcgttcccgtcaccatcagcttgtctccgcgcatcccacagtcctctgcatgaatgtcccggatcagcggcaccagctcatcgcagatataatgaaaatacgcttcctgacgctcgatgcgccttctgggatctccgcccagatcggaccatgtctcttcatcgatgctgtcacagcagaacagctggatctttcctcgttcgatctcatcggcgacagcgtcgatcatgccgaacgatttccagtcctgatgcttcccgttctgcggagggaagaccagacacagcctgccggcatgtccatatacgctgatgcccatctcccggttcaagtgatggctgtattgatcgatatatcgctctttcatgtcctcttttctccttttgcgcctgcacggacacagccgcgcccttttctggcacacaccgcatgcatcagcgtgcccatggcgtccgcaagcgcatcgccgcttccctgcgcatggatcccctgatgatatatgtgcaattataacacacctgtgaaataatttacatcattttgaaaacattgcgcacaaaatgtatcgcctttcattcctgcgctgagggcaaaagcgccgtcacgccgcacatttctgattgtatttgcgcgccgttcgttatattataatatacgtttgcagcgaggtgaaagcataatgaacgaaaaagaaaagatcatcaatatagccgtcatcgcccatgtcgacgctggaaaatccacgctggtggacgcattcctgcgccagagcgatgtattccgttccaatgaagaggtcgtggactgcgtcatggacagcaacgacctggaacgtgaacgcggcatcaccatctactccaagaactgttccgtcatccacaagggcgtcaagatcaacatcgtggacaccccaggacatgccgatttctccagcgaggtcgagcgcatcatcaagacggtcgatacggtcatcctgctcgtcgattccagcgaagggccgatgccccagacccgtttcgtcctcagcaaggcgctggaattcggcctgcgtccgatcctgctcatcaacaagatcgataaaaaggatcagcgcgcacaggaagtcgtcgatgaagtctatgagctgttcctggacctgaacgccaccgatgagcagctggatttcccgatcctctacggcattgcgcgcgacggcatcgtccagtatgacatggatacgccaagcgacagcatcgaaccgctgttcgaaacgatcctgagacactgcgacacttatcctgacctggatgaggagccgctgcagatgcaagtctctgccctcgcttacgatgaatacatcggacgccttggcatcggacgcatttatcagggaacgctgcgcgcgcaggaaagcatcatcgtctgtgacgataagggcaacgagcgcacgaagcagacatcgcagatcttcgtctacaagggactgacccgggtgagcgtggaagaggcacacagcggcgatatcgtcgtcgtagccggcatcccggacatctccatcggagagacgctctgcgaaaaagaccatgtgatgccgatggaaagcatcgagatcgaagaaccgacgctgagcatgaacttccatgtgaacaagagtccgttcgcaggaaagagcggcaagtatgtcacttcccgcaacctgaaggaacgtcttgaaaaagagctggaagtcaatgtcggcctgaaggtcgaaccgactgattccgcagactgcttcaaggtcagcggacgcggcgagctgcatatttccgtgctaatcgaaaatatgcgccgcgaagggtatgagctggccgtctccaagccggaggtcatcctgcacaaagacgaacatggcgtaaaggtcgagccgatcgaagaagtggtcgccatcgtccctcaggaatacgaaggcacggtcatcaacaagctcaacctgcgcaagggcatcatgatcgacatggaagaagaaaacggctatgcccgcatcacctatcatgcgccgacgcgcggactgctgggctaccgcagccagttcatcaatgatacccgcggcgaaggcaccctggtgcggcgcatcgtcggctatgagccttacaagggagagatcccgcagcgctcatccggcgccatgatctccaccgagaccggcacggccatgacttatgcgctgtggaacctgcaggagcgcggaacgctgttcatctctccgcagaccgaagtttacgaaggcatgatcatcggcgaaagcgccaagaacatcgatctggatgtcaatccgctcaagaataagaagctgaccgccatccgctccagcggccgcgatgaagcgatgctgctgacgccgccgaagatcttctcactggaagaagcgctggaattcatcaacgatgacgagctggtcgaagtgacgccggacgccatccgcctgcgcaagaagggactgaccgccaatgaccgccgtcagctctaccgcgaaaagatgaacgccagagaagactgaaccggccatgcacaaggccctcctcaagctgatcagcgaggagggccttttgtgataaaaaaggatgtctgaagcaatgcgtgacaccctgcatccggccttggcaggccatttacgactttgcgtcaaactttgtatggcacttgggacaggtcaccgtgatctgcccttttcctttcggcacccgcaggcgctgatgacatccgggacaatcataataccggtagttcctgccatcgcgcagacgcagatacagcgtggaaaatgagcggcgcagcggggcgctcagcttgagataacgcgcattttccgctctgcggcggtcatagtgcttggaaaagaaacgggcgtacatccagatcagcacgatcagggtgagcgcggtcaggatcaggttgggaacaaagaggttgatgatcagcaatacgatgaccgcggcccataagaacctgcccagctcatccattccatagcgtccatacagcatcttggacatgccgtaacgcagcttatctttccagttcatcatcgacttcctttctgtgaaagacattatatcaccacgtgccagaagaatccatcgcttcccacagcttcacacagttactgcggacgcgcagcgatccgcagcgagcggccaaacttcatcttggccacgcccagccagatccgatatgccgctctggcatacagcggcaatgcgtctgcatccagccatgggatctcatagcgagaggcatctgcctttttcacgaacatgatcatcgtatagatgagcatcatgtccgtgttgaaataattgcgcaggttgctgaagcgttcagcgggataagccgagcggagcatctgctcctgaaacgcgaaagacgcgcgcatctccagcatcatctccatgtccagcgccagcagtccctcacggttcatgaagctgccgcgatgctgcacataatgataaagccgatcgtgca

SEQ ID NO: 1528 - DNA, 10629 bp, Unknown
  16S sequences of unknown bacteria
ttgcccattttgacggcggggctcgcaatgtcgcgcgcaatggagttagatagctttcaccagctcttggagcgcgctcgtgctcgcctttttccgccgtcaaaatgggcgggcctttttccctccgccgcctatcgccgctcggttcccccgcaggtggcgctgggcagactcaaatgacggcgcttgggatgcttcgcgtggctggggtagtttcgcagcgtgaagaaacaggcttatttttcttctgcgtttgccgctatccatacaccaataacgccgcttgggctgcttcgatgcagcttggatatttttgcaacgcaaaatgccagcgtggttttctatccacgctggcatttttagcaagccatgaggcccgtcgccgaatggcggtcttttctattcaactggcggggagctacaccagacccgcgagccgcgaggcctgttgccgagcggcggtatctccgcagccaagccgcatatccctcgagtgccccgcgccctatgggcgcggagtggggtgcagggggtcaccccctgccgcgagccgtggcacctgtcgtgccacggcggtaaaaccccagccgacccgcatgtttccctacgcccctgcgcgccttaggcgcgcagtccgaaagggggctcagcccctcaggggcgctgcccctgcctgacgggtctcgttgtagtatctgacgatgtcccggaggagctggaagtgctcgaagtcctgggtgtagacgatgttgatctcccgcatcatgctcaggttctcgatgggcagcaccacgatcttcttctttttcagctcgtccatgcaggcgctcttggccagtacggaaacgccgaagtcccggcggatcagatctttgatggtggcgatgttgtcaatttccagaaccacgttgaaatcgtcgatgctcaggttctggctttccagactggccacgaagaggttgcgggtgccggagtccggcagacggaggatcatcttctccttctgtaattcgccgatggtcaccaagccccggtgggccaaccggtgccccggagagaccgccagcaccagacagtccgtgtccaaaatcaggtatttcagactggggtcgttgatcttgccctctacgatggcgaaatccagctcgtaattcttgagcatgtcgtgcagattgctttgagaatccgtgatgatcttgatggtcacgccgctgcggctgttcacgtaccgggccagcgcttcggcaatggcgttgctctccgccgtgtgggtgatgcccacggtcagggaggtcagctggcgcttttcactggtcagatccttgcgcagattgttgtagagggacagcatccgccgggcgtacttgatgaccatctcgccctcgtgggtcacgtgcagttcgttgttcttccgctcaaaaatgcgcacgttcagttcgctctccagcgagcggatgtgctggctcacggcgggctgggtcagggatagctgttccgccgcccgggtaaagctccctgtttccacgaccttcatcagggaatgaagcttcggatcgaccatccctttccccaccctttcaaaaaatttttatggatgatgattataccataaactttaggaatgtgccagcttcgtccagcgccggcgcacaggctccgccgtggcgggcttgtcgtccagcagaccctcctgcccccgcagaaaggcgacgaacatcgcgatggagatgcagcagcagatcacgtcggtgatgggggtggcccagacgacgccgaagatgggcagaagccggttgagcaggaacatcagcggaatgtccagcagacccttgcggaggatggccagcacaaaggagcgcattcccttgcccaccgcctgaaagaaggagatcagcgcgtaggcgcaggcggagaagggcccacccaggcagaggatccgcaggaaggccgcgccgtaggtcacggactcgctgccgccggggatgaacaggccgatcagctggcggctgaacaccagcgagacgttcgtgcacagggccgccatggcgatagagagcgccatggatagggtaatggaggccttcatgcgcttgtgatcgccggaggcgtagttgtagccgatcaggggcagcacgccctgcgacataccgcggacgatgctgtgggccagcatattgaccttcttcgccacgcccagaccggcctgcagggccgtgccggagaccgccatcagcgcgtccagcaccgcataggaaatattctcgcacagagtcatcaggcaggcgggcaggccggtgatcagcacatcggcggggatcctgccgcggatggacttgcccagacggcgggggctcagccgcaggatggagcgcttgccctccctaagcaccaccacaaggaaatacaccagggcgatcacgttggacagcgccgtagcgatggccgcgcccagcgtctcatagccccggggcaggaggacgaacatgaacaggggatccagcgcgatgttcatcacgccgcccagcgccacgccgatgctggcctgcagggaacggccctcggagcgaaccagatgagccagcagcgcgttcagggaggtggccagaccgccgatgaccacggtgcaggtcaggtactccaccgcgtagtcatgcaccagcggattggaaccgcccagcaggtctacaaagggcccggcgaagagccacgcgcccagcgaatacagcgccgtcagcgctgcgcagccccagaaggcgaaggaggccgtatccttggcccgctgcagagcccgcgcgcccagcgcccgggagatgacgctggctccgcccacgccgaacaggttggagatggcctgcaggaacataaaggcgggcatacagaccgtggcggcggtgatcatagcgtcgctgccggtcaggccgataaagaacgtatcggccatgttgtacaaaaccagaatgatctgtccgaccaccgtgggcacggccagcttgaagatcgcctccagcacaggcacgtcttcaaacaacgtcttttctctttccttcataaccggggtccctccgtttctaaaaaaatcagcggcggccgcgcaaatatgccgcagccgccgcagaagcgtccgtgccgtccgtctatgcgacggaacgacgtcttcgcctctgctgccgggacaagttcatctgcgatttggaaaaagatggtttgctattcatcccggcacgtcctttcctgtggtttttggagaagcctttcatggccgttccccttgggataggcatattatatgggtctttctccaaaatatccaataatcattccgtatttatcgataagaaatgcttatgaagaggaatggacaaaagaacaaaagcgtctccgcgcactgcggaaacgccgggttcatgggctttgaagtcccttctgtgaaagttttatcaatcttttgccaaaagggacgcaaacaaaccttaatgaccccaaaagctttcttatccgaggccccaaaggcattctgcgattcaggcgcgtccctttccgaaaaaagccgttttccgcccaatgaaagcagaaaatggcatgagcttatttccgttcattcatcctgcccacagtgcaggttccattcttcttcctcgcaggccagcggcagcagcaccgtgacggcagtgccctcgcccagccgggactcgatacgcagctctgccgcgctgccgtagatcagccgcagccgatcacggacgttccgcatcccaatgcccgtagacttgcggccctgctgttcgctttcctccgccgaaccattcaaaatacgctccacccgctccgaaggcattccctcgccgttgtccttcacgcagattaccagccggtcgccctcgtcccgagcagagatatccaccacagcgtgatcggtgcgcacgccgtgaaccagagcgttttccagcacgggctgcaatatcatggtggggatcagggcaaaggccgcgccggtggtgcagtgaaagggcgtttccaaattttcgccgtagatatgccggtaaatataggcatactgcttcagactgtcgaactcccgcttgacgggaataaagcgcttctgcatattgccggtgttctgtcggaaaaaagacgaaatatgctgcacaacttcgcagatctccgcgttgccgtcgatcttggccagagcgttgaccatttccatggcgttgtagatgaaatgaggattgatctgggattgcaacgagcgatacttgtattccaacatttcatactccgcccggttcttgcgggtctcctcctcccgcacctgcgccagcagccgctgctgatgctccagcattctgttgaagtggctggccagtttgcctgtttcatcgcggctgaccaccggtacccgaagctccagatttccggcggccgcctcgtccaccgaactcaccagcagatggatctgccgagtcatgcggtcggtgaccatcagtactaccagcgaacccagcaccgcgccgaccaggccggtcaggatgccggtcagcgccgccgtacgccgcacctgccgcaggatggattccggcagcaggcccaccgccgtccagtcgccctgcttctggatggaaacatagtatttctccccggcggaaagctccgccgcgccggttcgagccgcttcctccgcggcccgtgctatgccttctcccgcagcgccgctgacggtcagggtctggccgtcggccgataaaaacgccacggcgcagtgcaggttgtcgttgtaggtgcccagactgcccagttcttcctgcttcacccgggccaccagcttgcccatatgacgaaagggcgcggggttgtacacatcccggatcagatagacctgcccggtctccgatgtgcgccactggctgcggccataggccgtgccccgcagctcctcccgctccatcagcgccgccgcctcctgacggaaccctgcggaggcataggaagtggtgaagctgtttccccgatccagccgcagatacaccgcgtcatatccggactgggtggtgatggtctgattcagggcatacaaaagagactgggtagcatggtaatacccggcggaatcggcggtcatatcccgcatggcgtacagctgggcgctcaggccagtggaattgacctgattgttcagctgccgggccaccgcctcggtctggttgatgaaattgatgagcacctgctcggtcaaaagctccagatgggccttttgatcttccagcatctgccgggtcgcgttgtacgtcagccccagcgacaccatgcccgtagccagcagaatgaccacgcaccagatcaggatcagcttgacccggtaactgaagacgccgatttttttcatagcttggcctttcggttgcgatattcggtgggtgtcatgtgctcgatgcgcttaaaggcattgtagaaggaaatatagttgccgtaccccaccgccctggctacttcctccaccaggatccgggggtcagccagcatggaacgggccacgttcatacgcgcttccagcatatgctcgtgaaaggtcacgccggtctccttgcggatcagggcggagagatagttggcgctgacgcacagcttatccgccacgtcgttgagctgaatgccctcgatggcgtgcagattgatatattgcagagcattgcgggtcaaaagggattgtttgggcatatccatccgccggaggaaagcctcgttcagctccttcaggcacagacgcacatcctcctccgtgctgacgaaccagatgccgctcatcaccgcgtccagctcctcgtctgcgctcaggccgaaccggcggcgcaggcctgtagtgtacagaaacatcatggcccgcagattgctgtactggcggccgctctgctcggccaatgcccgggccgcttccgcggcaaaaccgtccgtcagctccgccctggcgatcagctcatcgatctgccgctgggtgtcggcgatatgctcctgccccactgggccgtcgccctgatcctcgtagaaaacgcaggcgcggtttcccttgcgcagggccgcctcccacagggcgcgtctggcctgcagataggcctgacggatggcgtggctgctctgccccagcccgctgacgccgatacggacagggttgaccagctcgtcaaagaggtcgtaggccagttccgtggcttcctcgtgccagcccttgccgtcgtccccccgggggacgaagatcaccgccagatcgtatagcagcagcgtgaccgtccgcatccggcgacgggccagtaccgcctccacccggttgagcacagcctgagaaaaatagcgctcctccgtctgctgcagcgccataatgtagtaggtgtgaaattgcagccccgccccggccagcagctcatgaacgccctgtccccgctgagaatcattggtcaaaagggtcagcagctgggcgcgcattttcaggttttcggcctgttccagcgccacatcgttttccatctggcggcgggtcacggctgcggcccggcggacggtgcgcatgacttcttcattgtcgatgggcttgagcaaatagtcgaacacgcccagcttgatggcctgactggcgtactgaaactcatcgtaaccggtaatgatgacaaagcggcagtccggcacatcgtcccgcacatcggcgatcatatccagcccgcttttcaccggcatccgaatatccgtcagcacgatatccggcttcagctggcggatcatcacgccgccgctttccccgtcccccgcagtgccggccacttcacacttcatcacgtcccagtcgatggtcttcaccagcgacagcaccgtggtagggttatcctcaacgattacgactttcaggctcatagcggctccttccttatgggggatgaacgaacgatcaagatggactcattataccaaaaagtgcccgaaacggcaatgaaagcagattttccccttcacaaaaaacagggcgggtctttcggcccgccccgcagggtacaggaagtacggcgttatcccttcacagcgccggacataataccggacacgatgaagcgctgggtgctcaggtacaaaaccagaatgggcagcatggccagcatgaagaaggcgaaggccagattcagttcagtcatgttctcaccgaaatagatgatctgggccagcggcagcgtgcggctctcatctgtgcgcagcagcaccacagcggtggaatagtcattccagacgaacagggtgttaagcaccatctgagtaacattgatgggggtcatcagaggaaaaatgatctgccagaaggtgcggaatttgccgcagccgtcgataccggcggcttcttccagatcccgggggatgccctttacgaagccggtgatggtcaggacgctgatggagacctgaaagccggttcgggccagaatgaagcccagattggtgctgaccagtcccagattatagatattcatatacagaggaagcatgatgcactggaagggcaccagaatgccgctgatgaacagggaatagagcaccttatagaacttggaatagttccgagccaacacgtaggaggccatggaggtggtgaacagcaggatcagcgtgcagggtacagtggtcaggatgctgtttttaaaaccgatcgccacatacttgttttcccggatcacacgggcgtaattttccagcgtggggtgttggggccatgccagccggttcaggctgatgtccgaatgggtcttgatggaatatagaaagctgatatagaaaggaatcagtaccacgaccacaacggccagaataaacagcacccgcagggtattgccccagaagatccgggtgcggctgcgacccgcctgtttgccgaagttggaggtattttgcatccgaacaccaaactccgccatcagagctcaacctcctttttgcgcaggatggtggtgaccagattggtcaggatcaccagcaccagcgtcaggatgatcgcgcccgcctgtcccagaccggcacgggaattgccgaagatgtattcatatacgaacacagcggtggttttggccgttttcatgttgatgaccatttgagaatagtcgaagcagcgcaggccccaggaaagcagcagcgtcacgttggaggtgatggcgggcacgatcatgggcagggtgatgtggataaattcgtggaacacattcgcgccttccacccgggccgcctcgtagtattccagcgaaatggactgcagggcggcaatgtaaatgagcatacagtagcccatatcccgccagatggcgatggcggccagaccgtaaatgacctgcgaggaaatgcccagcgggctgggcgcgccggtcagcggggagagcacgtcggtgtaaacgtagctccacaccttggtagaggccaccagcgacaccgtaaagggcatgaacagcagcgtgcgcatcacgttattgaaggggccggacttccacagcagcagtgccagcgccagacccagcatattcgcgccgatgatatacacaatggtaaactggaaggtgtgtaagaagctgtcccggaaggacgcgcttttgagcagcttcccgtagttttcaaagccgacgaaattccattccttggcgaaaatggccttcttatcggtaaaggacgtggggatagactgaagaaaggggatcagaacgacgaaagcaaacaatgcgaaagcaggaagcatgaataggatgtttcctccgtgctcccgaacagcaaatcgcgtcagccggtgtttgcgatccagccgggatggattgatggcggtcataaatgatcagctcctgcggtaaaaatagggcgtttcttttgaaaagcgggtatgggcagggccgcccgcgtggacgccgcaagcggccctgtttttttggaaaggaaagacttgcttagttcagagaaatgacctcatcgaaggccgcctgcagattggcgatacagtcttccacagtcatggaaccgccggtgagcacgctctcggcgaaggcggtcagttcggtacgccacgcggtggtgaaagcggaggacaggggcttggtgaagtcgccgtagtgggcgatattgccggaggccttcacttcggccatggtctgcaccataggctgcagcttatcgctgacagcgccggagcacagaggattctgggacgcttcggaccaggcgatgccctggctcatccagtattccataaaagccagcgccatgtctgcattttccgcctgcggattgaccataaagctctgatccacctgcacgttcatcttggcggatccgttatcgtcaatgggagccacgaagaagccaatctcgaaatcgggatttttggccagcatatcgccgatattccaggatccgtcataccgcatggcggcgtttccggcggcgaacatttccagcgccatatcctgcgtgttgctcatgtcgtcggtgcggggagccaccagacgggccttccagttttccaatgcttcggcgaaataggggtaatccgcgaacttcttttcgccgctcatcagcttttcaaacacgtccttgtcgccggcttccagcgcgcgggtccagacggtgttgcgggcttcgatgtcgccgtagacagcatcagcaaagctgcgcacgtaggggtcgatcccggcggcgatcagcttatcctgcagctcgttgagctgggtcagggtggtgggaacttccagaccgttctgttcgaagatggtcttattgtagaagatgccccaagtcttaaagtcgatggggaagccgtaaatttttccgtcggcggacacgtcgcccaaatcgccggagggcagattcaggctcttgatgacctcgttatcgctcagatccataacgaagccctccgtcaccagatccggatacagaccggggttgcccatgatgatgttaggctggtcaccgctggacagagcggtggacaactgggggaagtagtcggtgccctgattgtagtagatgttattaaacttcacattgggatgaagctcggtgaaggccgcctcgatagcgttcagaccggcctgcttggtcgtctgcgccatgtaatggaacacggtcagggtgatctcgtcctctgctgcagcaaagctgcacacggacagcgccagcactagagccagcaggatagcgagcgtacgtttcatgggatgatcctccttctttaatttgattcgatcactgcggagccattgcttctctttctccgctttagtaatatcagtatactctaaacccatatccgaaggaatatacgtcctttgataatttctatcttatttttacgatatggtcgataaaaatccataataaacccgtttcgagatgtcaacgttccctgcctgcgtttctttccgttgaatccgcccttgcaatccttcgccgcccatggtatactgtttttcggttctggagcggtatcgaagtggtcataacgagaacgactcgaaatcgtggtcgctactcggtatctctctgaccggaatccctttattttacggggttttccgggtattcttaacttaatatttttgcttgttctccccatcagttctccccgtt

SEQ ID NO: 1529 - DNA, 15775 bp, Unknown
  16S sequences of unknown bacteria
caagctgcttgaatattacgagcagaaccccgattttataaagcccgaatcccgcaagaacgagatgataaacaactttttaaagcccgggctttccgacctttgcatctcgcgcagctccttcaagtggggcatacccgttccgtttgatgaaaagcacgttatttatgtttggatagacgcgctttcaaactatattacgggtgtcggctacgaccccgacggcagcacagagcagtttgaaaggctgtggcctgccgatttgcacgttataggcaaggatatagtgcgcttccacacaatttactggccgataattttaatggcgctggggcttccgctgccgaaacaggttttgggtcacccgtggctgcttgtgggtgaggacaaaatgtcaaaatccaagggcaacacaatttacgccgacgatatgacaaagcgcttcggaattgacgcggtaaggtattatctgctttccgaaatgcccttcgcacaggacggcaccataacctacgaaagctttattacaaaatacaatgcagatttagccaacactctcggcaaccttgtaaaccgctcgattgcgatgacgaataaatatttcggcggcaaggtgacaaggggcgaaaatacagaggtttgtgataaagagctgattgataccgcgaacgatacggttaaaaagtattatgagcttatggataattaccgcaacgccgatgcgtgcgaggcggttatgaaccttgcaaagcgctgcaataaatatattgacgaggcagccccctgggtgcttgcaaaggatgagagcaaaaaggcataccttgaaaatgtgctttacaatctgcttgaatgtatccgccttttagggcttatgctcactcccattattcccgacagtgcgaaatcgattgccgagcagttaaatagcggcagcaccgttcttgccttcggcgccgttaacgagtattcggtaggcgcacccactccccttttcgcccgcttagatgcggaaaaggttttagccgaaatagcggctgaaaaggcagcggagcagaaaaaagccgaaaatgttgtaactatggagcaaataggaattgaggattttgcaaaggtagagctgcgtgcggctaaaatcacggcttgcgagcctatccccaaggctaaaaagcttttaaagctgacccttgacgacggcagcggcttatcgcgcaccgtagcctcgggaatcgctatgtattataagcccgaggagcttataggtcacacggtaattgtggtggcaaacctgaagccggcaaagctttgcggcgtagagtcaaacggaatgattttagcggcggactgcgccgataacgatgtaaaggtactctttatcgacaatgtacccgcaggcagcaaaataagatgaccgatttcccgaattacccatatacagaaccgctgatttttgacagccacgcacactatgacgacgcgaagttcgacgaaattcgtgcagagcttttagaggagttgccctctcacggcgtttgcggcgttgtaaactgcggatgcgataccgcgtcttcaaaagcagcgctggcgcttgccgaaaaataccctttcttttacgcagcggtaggcatacaccccgaaaatataggcggcggagaggtttcggaaatcgaagaccttgcgcgccacaaaaaatgcgtggcaataggcgaaatagggcttgattattactgggtggatgataacaatgagcagcaaagggcgctttttgaagaacagcttgttttcgcaaacagcttaaatctgcccgtaatagtgcatgaccgtgaagcccacgccgatacgctggagcttttaaaaaagcaccgccctaagggtgtggtgcacagcttttcgggcagcgctgaaatggcaaaggaaattttgaatttgggtatgtatataggcataggcggcgttttaacctttaaaaacgccaaaaagctgccggaaattgcagcggctctgccgagcgacagatttctgcttgaaaccgacgcgccctatttagcgcccgtgccgtaccgctcaaaaataaataattcggcgctgatactgcttgttgccgaaaagttagcggagctgcggaacaccgattgcgaaagcattttgaaaaattctctgaataatgccgaaaaattattcggaatataagtataatttcaccccgccgacagataataaaagctgaaagcggggtgatttttgtggagaacaatcagaacaagaataaccaaaacaagaaccaaaataagaacaaccagaacaaggaacaaaacaaaaacaatcagaataatcagaacaagaataacgacagcaacgattacagataacccgtaatcgtaaggcgaatataagattcgcacatttcaccgtttcccgaagctttaagcggccattaactttaaggtgagccgcttaaagctccgggaaacttttttataccgaattatcagtattaaagcctgttactgtccggttgcccgatagcagcaggatagtttccgatttgtcatttgacatgtcggaaatttttatttgtaattataagctgtaccgtataatttaagataaggaaaggagctttaaaatgaaaattaaagataatataaacagattgttatcgcttttgatttgtctcggcactctgctgtgctgcctgctctttgccgcctcggcgaatgagcttgcgaattataaatatataaaccgcgaggagaggtgacggaatgagcataaacgaatgtagggcgatatacagcgaggctttcggcactgacgaggattttgaaaacaggcttttttctgcctgcgccgattattgcaaaacactgtgtataaacggaaaaccgtttcaatgctgtttgccctgcaatatttataacggcggtgggataattcccgcctattatatttttgccgccgccacaaaaaagaaatttcgcggcaacggatatatgacccaacttataaattcgcttgaaaccgataggcttttgtttttaaagcccgccgacgctccgctttttaaattttatggaaatctcggatttaagcgctttgaaatatcggcggatgaaaacagaccgatttatgccgagccaataggcggctttgcaaggcttgcactttcggaaaagcccatatccaccgattgcacagccctttataaatacgaaaaaactgccgatataggcggtttgtacttcccccatttaatggaatgatatttgcatctaccgtgctatactcccgccaaatcaaacggcgggataaattttttatcggagcttgtcttttcctgaatataaacattttcaaagtcggtattgcagatataagtgagcaccttttcgtactccctttttgtaacgcggcggttaatttcggggtactgctctgccctgccgcagggcgtatactggctcatgatgctgaaatataccccgggcgtattctcccgtacccaatcgaaaaccgctattgcctcacgtgttccgagcggcaaaagcaaatgccttacaataacgcccttttgcattataccgttttcaaaaacacattcgggctgctgcagataagcctgctttacagccgataccgcatattccgggtagttttccgccccggaatatttttttgcgcggtcggggcttaaatattttaagtccattaaaaaaatatccgcatagtccttcagcgcccttatattttcgggcatatcatagccgcccgaattataaaccacggggattttcggcttgtaaatatcaagcgcccttataattgcgtctacataatggctcgggcttacaaggtttatattgtgcgcgcccgcttcctcgagctccctgaaaatatcggcaatccgctcataggttatgggcttgcctttttttaggtgcgagacctcataattctggcaaaaggcgcaatccaaattacagccggtgaaaaacaccgttcccgagccgtttttcccgcttatgcacggctcctcccaaaaatgcagagcagcccttgccgccaccggcagcaagggcattttacaaaagccgtttaaatttttgttttccgtccgttcggcgttacaccgtctcggacacaggctgcatttcatcggtctttttctcctgtttcggcttgatttcgcaaacgcgccgccgcaccttaacatcatcatatgtttttctgaacgcaacgcgccccaaaaaacgctttttgcacttagggcactcaaactttgcggtaaaccagcggttgcggtagcgccaagccgacagcctcttgcagtcagccccgcacgccctgcaatgaaattcaagcgccgatttatcaataagctcgctgttaatatccgatatcgggtagggcttaaacctcaatcgcttgtaaaattcgggatcggcagtgttgcgtataagcgccgagaagcgctcctcatcatagcatttcttcagcagtgccgagcagacaagactgtcgtcccgcgcggtatgcaaatcaaagctatctgtttcaacacctaacttttccgccgccgccgctaaggatatttgatttttatcggtataaccgttcagccgcagttcaccctgaataaacttctgcaaatcgagatatttgcctattttaaaggttctgccgcccgataacagcgcttcctcgttttcctttatagagtaaaggtccgagtcgctccaggtcatggtgacggcgttttcgtccgtccattcgttaaagcgatcaaccgcctcatccagcggcacgcccgcgagcattttttcggtggtaatgcccgtaagctccgcaaagcgtcccgtaacctttttggatatggctgatttcaccgtcacttcaaaggtatcgataatatcaaagctttcgttaagctttaccgcgcctatctgcagaatctgatttataaaacgcttgtgctttaccgaataggcgctgtcccattcaagatcaagtattatatatctcattgctttctgcgcgactccgccttcatgcgttcttccttattaaggatgcgtttgcgcaggcgaatattatgcggtgttatttccacaagctcgtcgttctttataaattcaagcgactgctcaagagaaaggcgggtcggaggaaccaagcgcagtgcgtcatctgagccggcggcgcgggtattggtcatctgctttttcttgcagacattacatactatatcctcattcttcggattttcgccgacaatcataccctcgtacacgggagtgcccgcacctataaacagcctgccgcggctttgggtgttgaaaagcccgtagcccgtagcctcacccgtttcgtgggctataatagagccggtggagcgctgctcaatatcacccttgtagggctggtagctatcaaacacgtggttcataattccgttgccgttggtatcggtcaaaaactgcgagcggtagcccaaaagtccgcgtgcgggtattaaaaattcaagatgagatacgccgccgtcgcgcgtgcccatatttttaatttcagccttgcgtgtgccgaggcgctccattacagagccgacgtattcctccggcacctctatcataagcagctcaataggctctaaaagctcgccgttatcgccctttttgtaaataacctcgggtggcgacacctgaaactcatagccctggcggcgcatggtttcaataagaatcgataaatgcagctcgcctctgcccgaaaccttgaaggtatccgccgagtctgtctcctcaacgcgcaggctgacattggtcataacctctctgaaaaggcggtcgcgcagattacgcgaggttacaaacttaccgtcctttcccgcaaagggcgagttattaaccataaagttcatagcaagggtaggctcgtctattttaacaaagggcagcggctcaatgcagtcagtagcacatgcggtctcgcctatttccaggtcggctattcccgcaacctgaattatatcaccgaccgacgcgctttcctcctcaacccgctttaatcccctatacataaagagctttgcaattttaacgtttgaggtagtgccgtccttatggcaaagcgcaacggtctgcccaaccttcaccgtaccgcggataactctgccgactccgattctgccgagataatcatcatactctatatttgaaaaaagcatctgaagcggcgcgtcggggtcgccctcgggcggtgctatttcctttactatttcatcaaacagcggcttcatatccttgccgggaatatcgggtgaataggtggcatagccgtctctgccggacgcaaaaattacggggaattctatctgctcctcgtccgctcccagctctataaacaaatccagaacctcatccaccacctcgtgcgggcgcgccatggggcgatcgatcttattgactacaacaaccgccttttttccgagcgcaagcgcctttttaagcacaaagcgggtctgcggcatgcagccctcaaacgcatctacaagcagcaaaacgccgtccaccatttgcagaatgcgctcaacctcgccgccgaaatcggcatgtcccggggtatcgacaatatttattttaataccgttatacataacgctcgtgttttttgaaagaattgttattccgcgctcgcgctcaaggtcgtttgagtccataacacgctcgttaaccgattcgttttcacggaaggttccgctctgctttaaaagctggtctacaagagttgttttaccgtggtcgacatgcgcaattatcgccacatttcttaaattttcgattttagccatattattacttcctttacttacctgcctaactgattaattataatataaagagcaggctttgtcaaatattttaaagattcacacggcagcaaaccccgttttcttcttaaaagcggtatattccgccattcatggtaggtgtgccgtcattttggctttttacctcgtgaaaatttattataccctctgagggcgaaaccaaataaggtcaggcatataaaagcgcttcaatttccgcaagggtcgcgcgaaccgtttgattgataccgttcttaaaatgaagtgtgaccttacggtcttgaaaatccgcatatataatatcccgcggcgctgcgctgccgccgagcaatttcctcatatagcccgacagcctttcgtatatccgctcatcaccggcaaagatagcaatcttcaacctgcgcccctgcccttaatacttcacattaagtatatcacattttccgaaaaaatcaaggaaggacagcctccgcagtataatagcggttgaaaaaagaacaaaagtttggtataatgtaggtactgttttcggggggtgagagaatgtcgaatacggacgagcttataagatcggtgcttgaaagcaaaaaactgtcgggcgaaaaggtctacggcgatcagccgttaatattcaccgcctcgaaaatgaaaagctacacgccgcccgaatacaccgaaatgcggaaattagccctgcaaagaaaatatattttcgcccccgccgccgaaatattttattttcaggcaaagtttatggaaaatttcaccgatgattttgaatatcacggtcagttcctgcgctcgttcccgacctaccgcgaaatgagcaatttgcagctgcggggttatttttcatggcgcaccgccgtgcggaaaggcaaaatcgaaaaaacctgcatttcctttgtttatgtttatctttacgagcttttgaatctgataggcgcagccgaccccgaggatgcgtttttcaagcttaaaaatttcgccgaaatttattcggaatacgataaaagggtgcaaggcaccgtttcaaaatggcttattgatttcgcggcgtattataacctcgacccgcggcttttaagagactcggaatttttaaaaaacgacggcgcgctgctgcgccttatgaattatgaggagaatacgccggcagaaacgcttggcgccatagaaaatttttcgtcctataaaatacgcggcgcggcattttataaaaaattccccgaaagaacggaagccgcggtttacggcaccttcagtctgctgcgcgaatactacgccgcttccgaaaacggcaatatttacgaaaagcttttcggcaaaaggctttatgagccgcactttatattcgaccaagccgttttttacgaaaaagcgccgcaccccgactgcgtttatgaaataaacggaatataccgctatatatgccgcgataataaatggagcattgaacgcttttacccgcaaaaggataaagcgggtaaggtcggttcgattttaaagggaatcgacagcgccctacgactgaaattcgggtttaagccgcagataaagtctcccgagctttcacgcgataccgagcgcattataaaagaaacggtagatacggctttcgcagaagaacgcaaagcggcggcgccgaaaatcgaaattgatgtttcaaagctgcaaagcatacgagataccgccgctgttactcgtgataagctgatagtagacgaggaagagcctacagagcaaattatacccgaatcagaggcggcgaaagcggaggcaactgccgatgagccttatttaaaggtattaaaggcgctgctgggtggtgccgaccccgaaaagacggcgcgggacagcggaataatgctgacggtggcaatagacgaaataaacgagcggctgtttgacacatttagcgatacggttataatttttaacggcgatacccccgaaataattgaggattacaaggaagagttgaaaggaatgttcaatatatgaaaatacccaagcgtatagcctcggtaataataaattcgcttaaaggcggcgttgtgccgagaatagggctgccttatattacagtcggcagagaaaacgagattgacgcctttttaaacgatatcgaaattataggcgagggcggagctgccttccgctttattgtgggaaaatacggcagcggcaaaagctttcttttgcaaaccgtgcgcagctacgctatggataaaaacatggtagtggctgacgccgatctatcccccgagcggagactccaaggaacgcgcggtcaagggcttgcgacctataaggagcttatccgcaatatgtccaccaagacccgccccgagggcggcgcgctcacccttattttagaccgctggataagcgggctgcaaaccgaggttatgaatgaaaactccctcggaatagatgatgaccgcatccccgcgctcaccgaaaggaagataagcgaggtaatatcatcacttaacgagatggtgcacggctttgattttgcgcggcttttaaccgtttattacaaggcgtatttaaacggcgacgacgaaagcaaggcgcgcgttgttaaatggttcaggggcgagtacaccaccaaaaccgaggcaaaagcggagcttggcgtaaacataattataaccgacgacgactggtacgaatacataaagcttttcgcgcttttccttaaaaaagcgggctattcggggcttttgatacttatagacgagcttgttaatatttataagatacccaacagtataacgcggcagtacaactacgaaaaaatacttacaatgtataacgatacaatgcagggcaaggcgcagtatatgggcattataatgagcggcacgccgcagtgcattgaggatacgcggcgcggcgtttacagctacgaggcgctgaaatcccgccttaccgaagggcgcttcggcaagggtgagcttcgcgatatgtccgctcccgttataaagctggcaccgctgacctatgaagaactgcttgtgcttatagaaaagctgaccgaaatacacgccgtgctttatgaatacacgcctgatgttaccgaaaacgatatgatagagtttataaagctggaattttcccgcataggagcggacagcgccataaccccgcgcgaggtaatacgcgattatattgagcttttaaatattattcaacaaaacccgggaactgacataaaatcccttatgtcgtcagacggcttcagctttgcaaagcccgagccgcagggcgaggtggccgccgaatttgccgaattcgagctttgaggaacagcaaatgaatgtttttgaaagatacgcgccctttattcaggactttatttaccgaaacggctgggaaacactgcgcggcgtgcaggtggcggcgggcgaagcaatcttcggaacggactgtaacgttctgctttccgcctccaccgcggcaggcaaaacggaagcggcgttcttccccatactcaccctgttttccgaagacccgcccgcatccgtcggggctatatacataggacccttaaaggcgcttataaacgaccagttttcacggcttacagagctctgcgccgatgcggaaattcccgtttggcactggcacggggatgtatcgcagtcccataaggaaaagcttttaaagcacccctcgggaattttacagataacccccgaatcacttgaagcgctgcttttgcacaagcacgcctatattccgaaattattcggcgatttgcggtttattgtaattgacgaggttcattcgcttttgcggggcgaccgcggcgggcagaccctgtgccttattgagcggctctcgcgtatggcgggggtaaacccgcgcagaatagggctttccgccacaataggcgaccccgagggcacgggcagatatttagcggcgggcacgggcagagaaacggtaatacctaaaatagcgtcgggcaaggtaaagtggcggttatccttagagcattttttcacaaccccgggcgcagaagaagcccccgcagatgaaaaagcggcactgccggtacttgatatgaagaccgacaccgcccccgaaaattccgaccccggatttgcctatgtttttgagcatacaaagggaaaaaagtgccttattttcgttaattcccgcgaggagtgcgaggcggtcaccaccacgctgcgcggctattgcgaggcacggggagaaccggacagatttttaattcaccacggcaacctttcggcgtcctttcgcgaaaccgccgaatcggttatgaaggacgacgagcaatgcatgaccaccgtaaccacagcgacgcttgagctcggaatcgatataggcagacttgagcgcgcctttcagatagacgcaccctttaccgtgtcatcatttttgcagcgcatggggcgcacgggcaggcggggtctgccgcccgaaatgtggtttgtaatacgcgaagaacagcccgaggctcgggcaatgctgcccgaaaccgtgccgtggccgctgcttcagggcatagcgcttattcagctttatacagaggaacggtgggtagagccgcccaagaccgacaggctgccattcagccttttataccaccaaactatgagtacattagcgtcctcgggcgagctttcccccgcggcgctggcttcgcgtgtgctgacacttaaaagctttgaaagaatagacaaggaagactacaagacccttttgcgccatttaattgagaccgaccacattgagcgcactgaagccggcgggcttatagtggggcttgcaggcgagcggcagataaattcctttaaattttacgcggtgtttaaggaaaatgaggaatacaccgtgcgcagcagctccgaagaactgggaactatagtaatgccgccgcccgtaggcgaaaaaatagccattgcggggcatgtttggatagtggaagaggtggaccgcaagcggcacttggtatattgcgagcaggtgcggggcaaagtacctgcctatttcgggcagtgccccggggacattaacacaaaagtgcttgaacgtatgcaaagggtgcttgcggaggataaaatttacccctatcttatgaaaaacgcgctcggcagactgtacgaggcgcgcagtcttgccaggctcggcggagttacaaccgagccgctcataaacctcggcggggatatgtggtgcctgtttccctggctcggcacatatgcctttctggctttagagcgctttttaaagcttaaatgcgcaaaggagttggggcttactgccctcgaccccgcaagaccgtattttattcagtttaaaatgaaagccacgcgcgaacagttttttgaggttttaaaggaaaaagaaaagcagccgcttgaccctatggagcttgtataccccggggaagtgccgctttttgaaaagtatgatgaatttattccgcccgagcttgtgcgcaagggctttgcctacggaatacttgcaattgatgagatgaagtcacgcatacgcggctgggaaagcagaccgtgacggtgctttcctcggcatgccttttgtaggctaatccaccgatttcatcgattccaccatatccacccttttaagccgcggcgtgagcgccaaattaaccgctacggtgaacacgattgttataaccgccgcaaaaataaaggatctcggataaatcgtccgcccgaacattatagattccatttcggcggtataaaccacaaagcggcaaagaaacacgcccaaaaacagaccgaccgccgtgcctataaggcttaaaaggtaggtttccctgcaaacataggcgtttacctcgcggtcgaaaaagcctaaaacctttattgtggcaatttccttaattctctcgcttatgtttatattcgtaaggttgtaaagcaccacgaacgcaagcgttcccgcagagattataagcaccaacacaatataatttatgctgcttatcatattatcgaagctttcaataacaaaggtggagaaggatgcggaaacaaccccgtctgtcgctaaaatttcccgcgtcatattatcctgcttatcggcggatacgccggattttataagcagggtggaatatatgcagtcctttccgaaaagctctgaataatattcgggggtcatgtaaacataactgttaatgtagttttcgcagatgccgtttattttcgcctctgctttttcgccgtttttggttttaagggttacggtatcaccttttttaataccgtgagacgtggcaaacttttcggttattatcgctccgccgttttgaatcgcgagcttttccccgcttttccgctcgcacagcctcacaaaatcaacaagctcctcggttttctcggggatatagaagtttatttcaagctccttgccgtcctgcaaaacgaagcccgtttcggaatggatttcggtaaagctttcggtatttttgcggaaataatcaagcgtggcatcatcagcggtatcggaaagcagcacggtcagatcatactgctgaatttcctcatactgcttgggtacaatgtcccctatcgcgtctttcagcccaaagcccgtaagcagcagcgccgtgcagcccgaaatgcctataacggtcataaacaggcgctttttgtatctgaacaggtttcgcgcggtcaccttgtgggtaaatttcatacgccgccatataaatcccacgcgctcaagcagtattcttttgccgcttttgggggctttaggcagcataagcgcggcggggttttcgcgcaaagcggcaatcaccgcccaaagcgtcgccgccagaatgcagataacggcggctgtaagcgctcctaacgatatcggcgcgttaaagctcaaatgaatttcgggcagacggtacattattctgtaaacatttataataaccgtcgggaaaaggtaaagccccagcgccaaaccgaaaaccccgcccgtaaccgccgcggcgcccgcataaagcaggtattttgcggcaattgcgcgggatgaaaagccgagcgccttaagcgttcctatctcggtgcgctcctcgtccaccattcgggtcatggtggtaagcgccacaagcgccgccaccgcaaagaagaacacgggaaagaccttagctattgaattcaccttttcggcgttcgccttcagtgacacaaagctaacattgctttcgcggtcaagtatataccattcgggctttttcactcggttctcggcggcagaaatcaccttgtcttcaagccccattgcagcagccgccttgccctcgggcgtggcaatcgcagcatccgccgcaatttttttaagctcgtcatagcgcgcgttttctcttgcttcggctgttttttccaaggcttccctgccgtcgtcacgcaggctctcatattcgccgtaaaaggtatttaattcctttgcacccttaagggtcagaaaaatatcggtatagtaatcggtgttaaaggtatcgtacacggtgtaaagaacgaccgaaattctgccgtttgctatatcggtgctttccttctctattgacatatacatagggctttcaaccacgcctacgaccgtcagctcgtctgtggtgagaacatcggctttttcggcacgatacactgtaccgagcgccggctgctccaaaaacggattcggcacaagcgccaaacactcccccgctttttcggggtatcttccgcttttaagctcggttttattaaccttacccttgttttttatgctgtcatcgtcgtccgcatatacccgtgcggcagtgccgtcgccgctctcttttttaacggtcacatcggcggtcttgcaaagcaccgccgccgatacctcattgtcggcttcgaccgcctttaaatcatcctctgtaagtccggcggtggattttatgtttatatcccaaaaatcgtttttatcgtaataatcatcaattgtggtgtaaaagtcgggtgcggtggataaaagccccgccagaaagccgacgcccagcgcggttatggcgaagattgcggcgaaacgcccgaggctgccgccgatttccctccttatgtgcttaaaaaaagtccttttcactaccattcgatcctttcggcaggcaacggctctgcgttgacggtattctcggtgacctttccgtttttgatttttatgaccctgtccgccatggagcatatcgcctgattgtgggttattattataaccgtcgttccggttgagcggcaggtgtcgtgcaaaagctttagtattgcctttccggtgttgtaatcaagcgcacctgtaggctcgtcgcacagcagaattttcgggttcttcgcaagcgcgcgcgcaatcgatacccgctgctgctccccgccggataactgcgcagggaagttattcatacgcccctcaagccccacgcttttaagcgccgcggcagcgtcaagcggctcgcggcatatttcggacgctaattccacattttcaagcgccgtaaggttctgcaccaaattataaaactggaaaacaaatcctacatcataacggcggtattcggtaaggcggcgggcactgtattcgcttaccctttcgccgtccaaaattatatcgccgctgtcgcacctgtccatgccgccgagcatattaagcacggtggtctttcccgctccgctcggacccacaattactacaagctcccccttttcggcggtgaagctgattccgtccgacgcgcgggtgatattttccccgtttttataaaatttgcaaacattatcaaagcatatatagctcatgcttatacgcccctccctttttgttccaacacgattttaacatatatcggcgccgattttgagtacagattatgaattttttgtattc

SEQ ID NO: 1530 - DNA, 32759 bp, Unknown
  16S sequences of unknown bacteria
attttcctacatcagggggtcttttgtcactgtccgtttttactggacctgttcatcggctcgggaccttttttgttcttcattataccccctcccctagggggtggatgatagtatgacggtaaaagcgaaaaatagaaaagaaaaaatccagtatttacaggggagaaacagttgacaaagaaggatgggcgtgctaccatacagtcagaacccctcccggggggtgggggataggaaaggagaaatcccatgtcgagacattatgataaatccctggacaaccgactggccgccatcgagggccatgtgcgggcggtgcgccagatgctcaccgaggacaaagagtgcgaagacattcttttgcagctgtctgccattcagggttccctggagaaactggggaagatcattttgaaggatcatctgaataactgcgtaaaggaaggcatccagcggggagatacccaggtgctggagcggttcaatcaagtgctggacaaatatctgtaaggagccggccaaaggaggagaggacaatgcccaaccccaaggagaacaccatgcattcgcatgagcacgatcacgagcacgaaagctgcggttgcggtcacgaccacggccatgaccatgagcacgaaagctgcggctgcggtcacgaccacggccatgaccacgagcacgaaagctgcggctgcggtcacgaccacggccatgaccatgagcacgaaagctgtggttgcggtcacgaccatagccacgatcacgagcacgaaaactgcggttgtggtcacgaccatagccacgatcacgagcatgaaagctgtggatgcggtcacgaccacggccatgaccacgagcacgaaagctgcggctgcggtcacgaccacggccacgaacacgagcacgaaagctgcggctgcggtcacgaccatggccatgaccacgagcatgaaagctgtggctgtggttgcggccacgatcatggtcatgagcatcatcaccatcatcatcacacaccgtcggccggaagccgccggaaggtgtatatcatcgatggcttagactgcgccaactgcgccgccaagatcgagcggaagatcaaccagctggaggaagtggaggaggccaccctgacctttgccacaaaacagctgcgggttaccgccaaagatccggacgcccttttgcctcagatgctggagattgcccgcagtgtggagggcaccgccaccattaccccccggggggagggtgtgccccagggaatgcgtcggaagacctaccgcatcgacggtctggactgcgccaactgcgccgccaagatcgagcggaagatcaaccagctggaggaagtggaggaggccaccctgacctttgccacaaaacagctgcgggttaccgccaaagatccggacgcccttttgcctcagatgctggagattgcccgcagtgtggagggcaccgtcaccattaccccccggggggagggtgtgccccagggaatgcgtcggaagacctatcgcatcgacggtctggactgcgccaactgcgccgccaagatcgaagggaagatcaaccagctggaggaagtggaagaggccaccctgactttcgccacaaaacagctgcgggtcaccgccaaagatccggatgcccttttgccccggatggtggagatcgcccgcagcgtggagggcaccgccaccatcaccccctggggggatggccgggagaccgagaaggaaaagaaggacgaaaaaaaggaagagcgccgggatcttctctttatcctgctgggcgcctgcctgtttgtggccggtgaagtgctgggccatgtgctgggcggggcggaagattccctgtggctgcggggcattttcctggtttcttatgtgattctgggcggcgaagtgctgctcaccgctttgaaaaacctgacccggggccatgtgtttgacgaaaacttcctgatgagcattgccacgctgggtgcgctgtgcatcgacaacttccccgaagcggtgggcgtcatgctgttctaccgggccggtgaatacttcgagcaccgcgctgtggaaaagagccgcagccagatcatggaggcggtggacctgcgccccgaagtggtggagcgggtgctgggtgaaggcaaaaccgaaaccatccctgcttcccaggcccaggtgggagacatcctgctggtgcgtcccggcgaccggattcccctggacggcgttgtcacaaagggcgaaagccgcatcgatacttccccggttaccggcgagccggtgccggtgaaggtgaccgaaggcagcccggtgacctccggctgcgtcaatacctccggcctgctggaaatgcgggcggaaaaagtgctggaagagtccatggttacccgtatcctggattcggtggaaaatgccgccgccagcaagcccagaatcgaccggttcatcacccgttttgcccgggtctataccccggtggtggtgggattggctctggccactgccattctgccctccctcttcaccggcgactggagctactggatctataccgccctgaccttcctggtcatcagctgtccctgtgccctggtgctcagtgtgcctctggccttctttgcaggcatcggtgccggttccaaaaagggcatcctcttcaagggcggcgtctctctggaagccatgaaaaatgtcaaggctgtggtgatggacaaaaccggtaccatcaccaagggcaactttgttttgcagcagatcgattccctggaaggagtggattcccagaaggtgctggaagtggccgccatctgtgaacagaactccacccatcccatcggcgtcagcatcctggccgcagccaaggaaaagggcatttctctggaaaagccccagcaggtcaccgaacaggccggtcagggcattgccgcccggaccgcccagggcctggccctctgcggcaaccggaagctgctggaaaaccatggggtgcaggtgctcgatctgccctcccacaaggaaggcactcaggtgctggtggccctggatggaaaaatgctgggcagcctgctcatcgccgacaccgtgaaggaggaatctccctcggccatcggcaagatcaagagccagggcatcgccaccgtgatgctcaccggcgacgggccggaaagcgcccaggccgtggcagaaaagaccggagtggatcaggtctttgcccgtctgcttcccgaagagaagctggataaactccagcaggtgcggaaagagcggggagcggtgatgttcgtaggcgacggcatcaacgacgctccggtgctggctggcgccgatgtgggcgcggccatgggcagcggcgccgatgctgccatcgaagccgccgatgtggtctttatgacctcctccatggaagcggtgccccagtctctggctatcgcccgccagaccaattccatcgcctggcagaatgtgatttttgccctggccatcaaggtgttggtgatggtgctgggtctcttcggttacgccaatatgtgggcggcggtctttgccgacagcggtgttgccatgatttgtgtgctcaacgctgtgcgtctgctgtataaaaaggaacacgcctgatattctgcccccggggattttccccgggggcttgtccgtaagcgcacttgacggcagaagaaaagatgataaaatcagtatagattgcagtttgaaaaaaggaatgatgaaaacttgctggaactgaagaatgtatcctggaaactggaagaggaagacaaatggatcctgcgggacatcaatttgaaggtgcagaaaggagagcggctggtgctcaccggtcccaacggcgggggcaaaaccactctggcccgggtgattgccgggctgcgggaaggggcagagggtgagatctggctggacggtcagcgcattgacggcctggacatcaccggaagagcccgggccgggctgggttatgcctttcagcagccggtgcgcttcaagggtgtgacggtggaagagctgatgcagatggcggcaggggaacagtgctcccgggaagagctgtgccatcttctgtctcaggtggggctgtgcgcccgggattatctgggaagagaagtgggaaatggcctttccggcggtgagatcaagcgggtggagatcgccaccgtgctggcccgcaagccccgggcggcggtgtttgacgagccggaggccggtatcgatctgtggagctttgacaagctgattcaggtgttcggcgaccgggaccggtggccgggagctttggtgctcatctcccaccagcggcggctgatggagatcgccgataccatcggcgttgtttgccaggggagactggccgatatcgggccaagggagcagatgcttccccggctctttggggaaaaatcggggcagtgcccctgggatggagggaatgactgatgaaagccatcaccgaaaaactgttggaagtggtctctgatttcaaagggaagctgtgggaaaagtccgcctattccgtgcgggaggatggaggctgtgccgccattcactccacccagcacacccatattacccccaaacccgatgggggcggcctggacattacggtggatgaggggacccagggagaaacggtgtatattcccgcctgcatcacccacggcggcgtggacgaagtggtttataacgatttccacatcggtaaaaacgccgacatcaccatttacgccggctgcggcgtccatgtgggaggggaagagggcagccgccacagcggcatccatcgcttcttcctggccgaaggagccaaagtccattatatcgaaaagcacgccggcgagggccagggagaaggcaagaaggtgctggacccccagacctggtttgagctgggagaaggctcccttctggagatggacaccacccagctgggaggtgtggaccgcacctgccgcattacaaaaggcaaagtgggcaaagacgcccggttgctggtgcgggagcgcttgctcaccgaaaaggaccagcaggccgacagccagtttgaagtggatctcatgggagaaaacagcggctgtgatctggtctcccgggcggtggccaaggatcactcccatcaggacttttcctctctcatccggggctttgccccctgcaccggccacaccgcctgcgatgcgctgctcatgggccagggcaccgtggacgcggcgcctcgtttggctgcccggtgtgaagatgcctcccttatccacgaagcggccatcggcaagatcgccggggaacagctgtggaagcttcagaccctgggactgaccagggaagaggccgaggaacggctggtggccggatttttgaaatagcgccccttgtcagaagaggggattttgtgtaaaatgaaagcagtattttatagatgaaaggcggctgtgcccatgaaggactatcgctcttatgaaacacctctcaattcccgctatgccagcgaggagatgaaatacctcttttcctcccagtacaagttttccacctggcggaagctgtggatcgccctggccgaaagcgagcaggagctgggactgcccatcaccgatgagcagctgaacgaaatgcgggctcatatcgatgatattgattttgacaaggcggcggagtatgaaaagaagttccgccacgatgtgatggcccatgtgcacacctatggggagtgctgccccaaggcccggggaatcatccacctgggagccacctcctgctatgtgggagacaacaccgatgtgatcatcatgcgggagggcctgaagatcctcctgtccaagctgctggaagtgctccgttccctctcggcctttgcagaggaatacaagggaatgcccactctggcttatacccactaccagccggcccagcccaccactgtgggcaagcgggccactttgtggatgaacgacatcctcatggacatcgaggaagtggaaaagctgatgggtgagctgaagctgctgggcagcaagggcaccaccggcacccaggccagcttcctggagcttttcgacggagattacagcaaggtgcgtcagctggatgggctgatcgccaaaaaaatgggctttgaaagctgcgtgccggtgtccggccagacctacacccgaaaggtggacttcaaggtgctcagcgtgctgtctctgattgctcagagcgccgccaagttcagcaacgatatgcgtcttttgcagcatatgaaggaaatggaagagccctttgagaagaaccagatcggctcttctgccatggcttataagcgcaaccccatgcgctgcgagcgtatggccgctctggcccggtatctgatgatcgactctctcaacccggccatcaccgccgccacccagtggtttgagcgcaccctggacgacagcgccaacaagcgcctgagcattgcagaggccttcctgtgctgcgacgccgtgctcaacctgtatgagaatgtgtccgcagggctggtggtctatcccaagatgatcgaaaagcatttgcgggaagaactgcccttcatggccaccgagaatatcatgatggacgctgtccgccggggcggcgaccggcaggagctgcatgagcacatccgggaacattccatggatgccgcccgtcaggtgaagctggaaggcaagagcaacgatctgctgcaccgcattgcccaggaccccatcttcggagtgaccgagcaggagctggagggcattctccaaccggagaaatacatcggctgcgccgaaatgcagaccgaggacttcctgcgcgagtgcgtccagccggtgctggaccgtcatgcggatatccatgctggtaaagccgaaatcaatgtataacaataatgcaaaaaagcccccgcatccgggggcctttttgctatccaggtgatggaaaaaggagggaaaaccatggtgaagcggctgtgtgctctggctttggccacggcgatgattctgctggcctgtgtgcaaaccggcccggctccaggggaaggcgcgccagaaacagggcagaagcaggagctggaagtatttgacccggcttcctacacccgggagatgatgcaggaggactatgactttttctggaccactttggaggaaaactgcgccacctttggcttgattgagcaggccacaaggattgatctggagcaggtaaagcaggaataccgagctcgcatcgaaactactcaggatggggaagcggagacctttgtacggatcatgagtgatttgaatcaggaactcagatcgtttgcccatatcagtgtggaggaacctgtgtcctattaccggatgatggatggggtatattgggagaatacggtaaaaaaagaactgtatgaatcggatcaagtgcaggcgttttatcagtgggaggccgacctgccctattatcgccagcagctggagagcgcgcagcaggccagtgcattggaagaggatggggaaggagaactggataattctgtgatagaggaaaacatccagatgtcccggcagggagatattgccgttgtgcgcctgaaaagcctctatttttacggagaagagctgaatcaagttatcatagagaagctgcggactttctgtcgggagaatctggacgctcagcattttatcattgacatcacgggaaaccccggcggaagcagcctgatctggtctgaggggctggaccctttgtgggccggaaaggtcttttcccgtgaggaagtggcggcctacaagcagggaagcgtgaatgtgcagatgtgggatggctggccggagaacgatcccgatgtggagctgcggcccatttctgatttgagcaccatggactatcccaaactggatatgcagtctctggaaggatgcgacggcatagcgattcggacggaagtggatgattacacccatgtggaaaatccagatgggcaggaatttgaaggtcgggtctggatcttgaccgataggcgggtggcttcttcttcagaaatgttggcccgatttggaaaagagagtgatctttgcactttggttgggactcagacagggggaatgggcggaacaatggcccagccgatggtgatggcagcggccatgcccaactgtgggatgctgatacagtatgctcctttctattttatcaacgaggacggcacctgtaacgatatagagggcacccatccggacattgaggtcggcccggaggaagatccgatgacacggtgcttgcaggagatcgcaaagctgggatgacccattggtaagcatcaatatagaaataaagcatcacagaaggaggaattttctatggaagcgaaaaacagcatttctctggcccgtctttgctccactctggcggcggtactggatgttcccgccccggaaaaggccgagccgcctttggattgggcggtgcagctattgaaggaacaagccgacggccccattcagcgggcgctgatctataaccctgatgccgtggcccagtggctcttccacaaaaaccggctgatgttccagccggtactggagcagacccagctggtgctgcctctgcgggcggtgatgccttcggtgaccccggtgtgcttcggcaccatgtacaccggcgcccagccggaagtccacggtatccaggcttatgaaaagccggtgatcgccatcgattctttgtttgactccctggttcgtgcagggaagaaggtggccctggtagcggtggaaggctccagcatggccataatctataacaatcggcccatcgattatttctatctgccctacgacaaagaggtggaggaaaaagccctggagctgatcgacaaggatcaatacgatgtgatcgtggcctatacccaggaatatgacgatgtgatgcaccgcaccggggtggattccctgctgtccatgcaggccctgagcaatcagatcggcattttccagcgtctgtgccgtaaggccgccgaaagctggaaggataagaccagcctcacagcattctgtccggaccatggcgtccaccagcaggaggatgtccacggcaaccatggcctggacattccggaagacctgaatatccagcatttcctgggggtccgccgggcggtaaaataagaagattgcattctgccggagagctgcaaaaaaaggctctccggccttttttcggcactttgcagagggaaggcaaaaaatgatagggaaagggacaaagaggataaagggaaggcgggaactgacggcccccttctgtgcaaacaggacaaagaagggtaaagcagaaggagtaaaattttaaaggggcaaaagggctctcccgccttgactttcctcctgaggggatgctatattgggccggagggggaggaaaaaatccgccccgggaaaaggagaaaccaatatgaaacagaccatggaaaaaacgggaaaccctatcattgacggcgtgatctggaagcagcttttggccttctttttccccattttgttaggcaccttttttcagcagctctataacacggctgacgccatgatcgtgggcaactttgtgggtaaagaggccttggccgccgtgggcggcaccaccagtgtgctcatcaatttcttcgtcaatctgtttgtgggcatttcatccggcgccacggtggtcattgcccaggcctatggcgcacgccgctttgacgatgtgaaaaaagcagtgcacacctccatggctttggtgctgtgggtaggggctgccattatgctgctgggactggggctttcccattgggccctcagcgccatgggcacccctgcggatatcatggactatgcccagctctatctgcggatctattttgtgggcaccatccccagttttgcgtataacatcggctcgggtatcctccgggccatgggcgacacccgccgccccctgtatttcctcatcatcgcctgcctgaccaacattgtgctggaccttttgtttgtggtggtgctgggctggggcgtggccggtgtgggcatcgccaccgttatctctcaggtagtggcagctactctgatccttgcggccctgcggaaggaaggggcggtgtacgagctggatctgaaacaggtgcgtttcacctcccggctgctgcgggatatcgtgaaaatcggtctgcccgccggtgttcagtcggatatgtactccatctccaacattctcatccaggccagcgtcaactccttcggcaccaacaccattgccgcctggacggcccagggcaaggtggacagcttcttctggatggtgctgggcgcttatggcgtgtccatcaccacctttgtgggccagaacttcggggcccagcaatatcatcgggtgcgcaaaagcatctgggtgtgcatgggcatggccgctgtgaccactattttgttcagtgtcctgttttattttgccgcatcccccctcatcggcctgttcagcaccgatcaggcggttctggccgaaggggtggacatcatgcggtttctggccccttggtatatcgcttatgtgtgcatcgaaattttctccggtgccatccggggcactggagattccctcattcccatgctcatcaccaccagcggcgtgtgcgtgcttcgtgtggtctggatctatgccgttctgcccctgaaccatactttccacaacctggtgctcagctatccggtgagctggattctcacctccatcctctttttgatctactatttccagggaggatggatgcgccgaaggatcaagaaaatgggattttcaccggaagaaaaatcttcaaaagccatataacgcagtgaaaggggaagggaaacatgacacagatggaacaaatcggcgcatttttggaagaacaccgcccggccatgctggagctttggaaagagcttgtcaacatggagagttatgtgggcgagccggagaatgtggaaaaggtgctccggcgcctcaaagaggaatttgaaaaagaaggcttttcctgccgcatagaggatgtgggcggcggctgggccggtaccctggtggggatctggggcgaggaaaacgagggcaaacccattttgttctccggccatctggacaccgtgttccccaaaggcagctggggagaagatcctttccgcattgaaggggacaaggcctttgggccgggtgctttggatatgaaggggggcgcggtgatttccctttatgccatcaaggctctgaagcacctgggttatcaagagagccccatcaaaatcatcttctccggcaatgaggagaaggggcaccagggctccaccggggccgaagtctttttgcaggaaggaaaggactgtctctttgcctttaatatggagaccggcctgatggacggctgtctgtgtgtgggccgcaagggccatctgggctgccgtgtgacggtggaaggggtggaatcccatgcgggtaacgactttgagtcgggccgtagcgccatcgaggaggccgctcacaaggtgctggccatccaggccctcaccgatctggaggaaggcaccacagtgaatgtgggcgtcatccagggcggcacggtgcccaatgctgtggcgggaagctgccagatggatgtggatatccgggttttgcaggaagcgggacggcagcgggtcaaagcagccattcctcagatcgtggagcactgccaggtggagggcacccggggccatgtggtctttgaaaaggacgctcccatctatgaaaccgatgagaaggtggaaaaattctattcctatgtctgccgggtagcagagcaggagggcttcccggtgcctggccggaaggtgctgggcggattttccgatgccgcctatatctccttggcaggcacaccggtgatttgctcctttggcgtgcagggagaatggaaccacaccaagcgggaatatgcctctgtgccctctctcacggagcgggccaggctgatctgtgctgtggtgctccaccagaaggagttttaaaactcaaaaagtggcttctgctatttttccgataaacaggcccaggacaattattgtcctgggcctgttttatttgggtacgagggtggtcaaatcttcaatatgaaggagccctcgttttgctcttccataagcatactgctgaagcaagcggaaggtgtttccggtggtatcttcgcaataggtgatgaaaaaatcacaatgttttatcatatatcgattggcccgaggaattgccaaggttttagggatatgctccagttcaaatggataaatgctgtcatcaaagtcgggaggaagagtgaatggtcgttctgcgggatggtagggaagtaacgcacttaaagtgatgaacggataggccttttttaactctgatacggcccgggctgccatccggtcaaaatgtccataatgtcccactacaaaagaggttatgttgaattcacgaatgtgttgttctatggcggcagacaagatggggaatacactctcaggcgaattgtgattacctaagaagaagcaggtgctttctgacaacatcagtacatcatctcactttattttaatataaagtgatgtcacttaaatgtcaagtgaatgtataaaaagtgcagaggttgctatatcataaaggaggtggtatcaagatgtgggaaggggagcgttatgaccaacaagcgagtatttaccttgcgtttgtccgatgaggtttttgataaaatcggatatctggctacaagggagcatcgctccatgaccaattatatcgagtttgttctgattcaacatttacagcaggtggaacgggaacaaggcacgatttccttggatgtcacggaagaatagcagaaaaacgcccggatgaaagcatccgggcgtttttgttacattattcttcggtttctgcgtctttcagagaaaggggagcagggtcggggagagcggggccagggaaggtggccacgcaccgatagatgggaagcccctgggaggaaaaccgctcttcgtattcggtcatcacattgaacaaaggcagcttgtgcagatcaaaggtgatctggctcagcttcagaccgaaatcggcaaactgattgagggagaactcaaacagcttctggttgtcggttttcatgtggatgctgccgccggggcaaaggaactgggcatagacccggagaaaattggggtgggtcagccgccgcttggcccgattgttggggggccaggggtcggaaaagttgagaaacagccgctctacctcgtctttgtcaaagacatcggccaaagcaatggcgtcctggttgagaaagagcacattgccgagtcccagttccatggctccctccatggcgatgaccagggcactggggtcccgctccactgccacaaaattcacctggggaaaatgctgggccatttgcagcacaaaccggcctttgccgcagccgatttccagccaaaggggacctttgcggccaaaccgctcttcccattttcccttgagagcctggggctctgtgatgtgtaccttttcgcatcgggccgtgcggggctccagattctttttgcggcgcattcgcatggcgtttcacctgtctctttccgtattttttgtcagtttacctattatactcaaaaattctttcattcgcaaccattccccaggaaatttcccggggtcgggctggatttatccggccacggcaaaccaaaccaggagtgcaaccccgatggcgagagaagcaatgccaacttgtcggtacggctttgcggtgtactgctgatatttatagaacagcataaaggcgatgccgaagaacagcagagacagacttcctctccatgcaggattgcctttgatcaggcacagaaccgttaaaatttgtgtggctgcaatgacatattccagtgcatggcttttggcctgtacatcgatttgttggtcccgttcgtctttcaagggatagcgtttgggtgatggattcatggtctgtttctcccttttcaattcttggattcataataaatgtatgtgaaaatctcagtgaggaaggaaagcccccaggccagagaaagacctaccataatgccgatgatgcccagattttttgtggcgatgtaagcagccacacagcccagtatcagcacaaagagaaccgatcggctaatgacaaatgcccggctttccgatttcagtttgatcagttggttgcgttcgtccatggcctcgattttatcctggcggctggcacttcgggataggcttcgcaggagcagagtcccgccaaacaagaagagcgcagcgcacacaataccatccttgacggttatgctgctttggctgatgcctgtggacaaattcagtaggcccagcaccagcatgaacaggccctctgcaaaattctttttatgataaattttcatattcccgatcctcctgttccttattctcttgcaggcagcacagctcctccaccgtgacatcaaacacctgtgcaatccggtaggccagcatgagagaagggctgtattgctctttttcaatggaaatgatcgttcttgatgaaacatgaaccagatcggccagttgctgttgtgtcatcctggccgctgtacgcaattcttttacttttgttttcatgggttcctcccaacaacatgaagcaaacttctcataaagttaacttcatgttagcaggaaagaatcgggatgtcaagaaaaagtgaaggaaacttcatgcttttgtccgcgacgatgcagcaatgctcccgcggggttgtcagaaagaggggaggtatggtataatgggttcagtaaaatattgtaaattacggaggaatattatggaactgagagccattgcagagcagaactatcaaaaaattctggatctttccaccggcgcgggacaagaggagtttgtggcccggaatgtccggtccctggctcaggcctgggtgtttcgggacagggcccgcccctatgccctgtatgaaggggaagagccggtgggtttcatcatgctggactggcggccggaggaaaagacggcggagatctggcgatttatgatcgattaccggcaccaggggaagggatatggccgccgggccatggagctggccctggagaagatacgccgggcagagttgttcgatcgggtgcagctttactatgtgccggggaatgagaaggcccgggccctgtatcacagcctggggtttggggaaacaggcagcaccctggatggagaaatccagatggaactgattctggagtaaataaaagaaaacagcaggaatcaaaagaaaaaggacgaaaaagagaactaatggggaaatggagtgaattttggcggaaaacggggaaaaagcaggggcgttcccttgacaaaaccacaaaagggcgggtatcatagaaacagaaggaatctgcgagaagggaaggcgatccccatggggaagaaaaatggaatccagtggaaaaaacttttgtggcagtatatcctgttcaccatcggatcggtgatttatgctgcggccgtggccctgtttttggaccccaatgagctggcccctggcggcgtggtgggcatcagcgtcattctcaaccgccttaccggcctgcccaccggcacgctgatgctgtgcatcaacatccccttgctgctggccggggtgtggaaactgggactgcggttcttgctgtccaccatttatgtcactttcttttcctcttttgtggtcaatttgctcaccccctatggccctcttaccgaagatctgctgttgggcgcctttttcggggccgtggtgctggctgtgggcatcgccctggtctttcgggccggcgccaccacaggcggcaccgacatcctggtgcgtcttctcaagctgcggtataagcacatcgaaaccggcaagctgtttttctgcaccgacctggtggtggtcatctgctccatggtggtgtttcacaatgtgaacaccggcctgtatgcccttttgtccattatggtatttgccattgtctttgatgtggtgctctatggcagcgataccgcaaaaatggtttatgtggtgtcggaaaaggaggagcgcatcgcccggcggatcatggacgagctggagatcggcgtcacctatgtgcacggccagggggcttataccgaaaaggagaagcgggtgatcctctgcgctgccaaaaagcagctgttccccaaggtgaaggagatcgtcaaggaagaagacccacaggcttttttgatcgtctcttccgccagcgatatttacggcgagggcttcaaagaccatttcgccgaagaattttgatttgtgaagggagtggagagcatggatgcttccatggagaaaacgctgaagaactttgagagccacggcatcaaggcccggtattttgaaaccggagagcaggccagacaggccatcgtccaggccgttcaggggaaaaaggtggccttcggcggctcggtgactttgcagcaactggggttttatgaggccctggagcagaacaattcggttttctggcactgggtcactcccacagaaaagcggcgggagcgggagaaggaatgtgaggtctttttcacttcggccaatgctctcagccgcaccggggagatcgtcaacatcgacggcaccggcaatcgggtgaccatggcggcctatgggccggaaaaggtctattacatttgcggggtcaacaaactgtgccccgacatcacttcggccattgaccgggcccggaatgtggcggcgccccaaaacgccaaacgcctggggctggatacgccctgcgtgaaagatggagtgtgtcataactgccagagcccccagcggatctgcaatgtgatggatatcacgctgcgccgtccaggtgctgtggaggtggaactgtggatcatccaggaggaactgggctattgagcaggaaaaaagccctggccttggcgggagccgggattctggcggttttgtgcgccggatgcggcacggcgagcggggaatattataaggagaccgcccatacctctttggcggaaagcgaatcccgcctcagtttcagcagcggggtgagcaattattatgctctgcaaagcgccgttttgagcatgatcggcgcaggccaggagcttagtaccctgcctgtgggcaattacgaaggctcgctggaggaagatctgagccgcatcacccaggagatcaccacggaaaatcccctgggctgttttgctgtgtcttccatcgtctttgaccagaccaaaatgctcacttatgaagaactgagcattaccatccaatacaaacggaccccggaagagatcgccgccgtgcgggaagcgcccagtcagcaggagtttgagcggcggctcaccgagctgctttccggctacggcacagaggcttatttttcggtgagtgctctggaggatggggaagaggatctgtacgaccgggtgctgcggtgcttttatggcgcggccgacacggcctatggcctgaaaagcgtcagcctggccacctatcccaaaaccggccccaagcggatcgtggaagtgaagctggaatggaccgacagccgggagactttgctggagcaggggcagcaggcacaggagcgcgcccgggaaatctgcacggagtttaacgggaagagcgattttgagcgcctggatttcgtacagaaatacctgggagaccatgtgcgctatgatgacaaggccatgcgggtggtgaccgaaaccggaggacggcaaagccgcacttctacatacacagcttacggggccctggtggaaggggtggccgcccagtcagggctggcccatggggccaagctgctgctggatgagctgggcgtgccctccacgctgattgccggacagaacggcggcatcagttatgtgtggctgctggtgcagagcgaaggggtgtggtatcactatgatcccaccggcgaccatggcctgatgagcaccgaggaatgcaagcagcagggctatacctggaatgaacgggtttatgacgatttatcctgaggatttccccggcgaaagaaaaatttttttcgccggggaaaaacccccttgacaaaaccataggggtttgctattataataaggcacttgcggatgtagctcatctggtagagcgccaccttgccaaggtggaggtagcgagttcgagcctcgtcatccgctccatagaaaagacacggtcagatgaccgtgtcttttttgtttttctccggtgttttttgcctcaggccctgggcgtatgcggcagcatcgcttgggaacccaggccttgcgtagtgaattgacttttcagatggggtgtggcatacttgtgccataacaaaaccaagaaaccacacctttttacaatgaaaggagaacacgaactatgggaattttgtctcgctttgccgacatcatttcggccaatatcaacgcccttctggacaaggcggaaaacccggagaagatgatcgacgaatatctgcgccgggccatggaagacctggccgaagtgaagcaggaaaccgccgccgtcatggcggaggaaaaccgctgccagcgtctgtgggaagacaaccggaaggatgtggagaaatacactgatctggccaaaaaagcccttttggctggaaatgaaggggatgcccgcgtcttcctgcagaagaagcaggagctggagcaggcaggcgtttctttggaaaagacctaccaagcggcccggcagaacgcagaaaaaatgcgtcagatgcacgataagctcaccgaggacatcaataccctgaaagcccgccgtcagaatgtgaaggccaccatggcagtggcccgcacccaggagaaggtcaaccgggcccaggaggcctttgacggcgcaggcggcgccatccagggctttgcccgcatggaggaaaaggcccaggccatgctggatcaggccaacgccatggctgagctgaaccagcgtcccgccgatccggcagcggctttggaggagaagtattcttccggcggcagcgctgccgtggaagacgaactggccaaactcaaggccgagatggggctgtaagatgggtcgcggcggaagagggggcggcggcggccgctccagcggcggcggaggcggccgttcctccggcggacggatgggaggcggttccttcggcggccgatccggcggttcctttggaggcgggttttcccgcggcccttcccggccgcctatgggcggttggcgccccgtttaccggagcagttggggcccgcgccgtcctgcacccggccccggaccttctcccggcggctgcggctgtctgtggagtacattcctgctgcccatcctgttggtgctggtgcttttcgtccttttctccggtgtggggaatgtgcttcacggcggttccttcctctcttcgggaagcggggacatcacccgctccaccgtcaagcgggagccgttggacaaggcctatgtgaatgaaaccggttattataccgatgagctgggctgggtccgcagcagcagtaccctggaaaaaggcatgaaggcgttttaccaggaaaccggcgtgcagccctatctgtacatcaccgacaccgtcaatggcaccacttctcccacttcgtcggatatggaagcggcctgccaggcgctgtatgatgagctgttcaccgatgagggacatatgctgctgttgttccaggagtacaattcctctgggaattacaatatgtggtatgtgtgcggcaagcaggccaaaaccgtgctggacgatgaggccatggacatcctgatggactatgtggattattactactattccgatctggatgaggacgagatgtttgcccaggctttccagaaggcgggagaccggatcatgtcggtgacccgtccggcctggatgatgcctgccattattctgggcgtggtgctgctggtggctctgctgtacagctggtggaagaaggccaagcagcagaagaatctggaggccgaacagaccaaaaagatcctggagaccgatctcaacacctttgaggacaacgagctgaaggatctggaaaacaaatacaaataagaaagcataaggcctggcatctgtcgggccttgtgctttatgggagggaagaacatggatattcgattggcgccatggagcatggaggatgcagaagcactggcctttctgatggaccgggccgaccggcagtatctcagtgaccggctgcccaagccctataccctggaaaacgcccggtggtggctggaaatggtggccaagcaggaagggaagaccggtttgttccgcaagattctggtggatgggcatgtggtggggaatatttccgccgagggccaggaggatatctaccggaaagacgcggtattgggctatgtgctggacaaagagcagtggggacggggaatcatgagccgggtcgtggcgcttttctgtccgctggtctttgacaggctggatgtgctgcggctcagcgcccgggtgctggaggagaacatcccctcccgccgggtgctggaaaagaacggttttcagctggaaggcgtggtgaaactgggagcctggaaagaggaaagagcccacgacctttggctctatggcaagctgaaaaatcagaacggactttagtcttttccgccatcggctcccggcagagtgaggtgggtcagctgcgacaccgcctcgggagtgcacaggcacaggccgtggcccaatggggccgggagaagggaaaggtgcaggccgggaaagcaggggaaggcacccttttcatccaccagggagaaggtgggcaggccctgggacaatccccggccagtgtatttgatatagctttctttggcgctccacagggggaagaaagcatcgggatgggccttcaggtattcctgctccaaggggtggaaaaaacgccgggagagggcttccttgcggcaggaacgggaaacctggtaatccagtcccaggggcgcgtctccaaaggcgcacatccaggtgtcaccgctgtgggtgatggagaagtggagctgaggaaaagtagggaaatagggctttccccattccccaaaggccagcggctctgtgaccggctctctattgagatagacaccggccccctggcggagcagagtatgggaagagcggttggaaagagaagaagtgaccaaaagcactttcattgtatatcacctttcaaaacagcccccaaggcattgccttgggggctgttgtttttggaaaattccccgctatcccagatagcaggagcggccctggggaagagcgctgccttccggtaaagccagggcgatgcggcaggaggagccatcctccacctgtgtgatcaggttttgcacaaaagcatcggtttcgctctgggcattgaccagcagggcgtcgcagtattcccgcagctgcatgggattctggccggtcatggcatcggtgaggctctgggcggcggtgtcgctcagttccaccgtcacggtcatttcaccggcggcctgctgaagctgctggagcagctgggtggtgagggcctgcttgtcggcatccttgtcggtgacaatgagatcggttttgccccggggcggataacccaggtcgctgaggatcaccccgtcaaagcccaggctctggcaggaggtgagcagctgaccgatatattccccggtctgagggccggaaggcgccagccaggtgatgttgtcatagtccatccatacggcgccgctctgggtgcgcagagcattgtcccgcagggcgcggggcacgatgttgtcccggcagaccgacagccgggcggtaagggagaaaccggcctctttcaactccgtcagcccttcggccacaccgtcatagggctgggccgaaccggcctgttgggcgatggccgaatcggtgggaattcccacccggccgccttcctccttcacggtgaacaccagagcgccgcagccggcgttccaggcctggttcatcagctggctgcgatagtttgcgtccccaatgcgggacagatccccttccatggccgtgacagtgggagcagattccgggggcgtttcctcttcatccttgtcctccgggtctttgttgccctcttcctctttttccgagccgtcatccaccaccaggggcacatcctccggtgtggtgggctctttccccgacaggaaggggaagtcaaaataaaaaccgtcggccgtatagacgatgtgctcctggagatagaagtacccgccggccagaacccctgccgtgatgagaagcaccagcagcaggatgagaagccggcggccttttttccggccccggccataataaaccgaatgagtggagttgatgcccttacgcgccaaagctcccgcctcctttgttttccgaaaaagtcatttcttatatactatatgaaatggccgccagtttcaaccgaaaaatggtgaattttagtggaacagtgaaaaatcggtataggaaagagaaaaaattcaaaaaaagaaggcccgaaggccttctacgggttgccagagattatgcagcgggaagagtgagtctgttcgtctgctttcaaatcaatctgcaaaaagccgcgacctgtgcgtggctttttgcacctctcaaggggccagtgtgcgccaaaggcgtgcatgcagccccttgcaaaaactcggaaaagtggcttgagccactttttcgatatacaaaaagaaggcccgaaggccttcttttttgtttcacattacagtgccgactgacgggtttcgctggtgatggagctggcccggacaatgagcttccgggggcataccgccacgcactcgccgcagttgacgcatttgtcgtaatcgatggaggccagattatccaccacatggatggcatcgtgcttgcaggtcttctggcacagagtacagccgatgcagccgatgttgcagttttcccgcagcaccggaccacggtcgtgggaggagcaggagacgaacacatcctgcttttccgaaaccagggagatcagatgccgggggcaggaggaaacgcagaggccgcaggcacggcatttgtccgcctgtaccaccgcaacgccgttgaccacatggatggcgtcataggggcaggccttctcgcaggtgccgtagcccaggcagccataggcacaggccaggtcgccggagcccaccttggaggcggccaggcagtcctggatgccctcgtattcaaacttccgcttggcattatggccgccgcggcaattcacatgggccaccttccgctcctgcgcagagacttccacgcccatgatggcggcgattttggcagccgtttccggtccgcccacagcgcagccgttgcagggagcttcccccgccaccacagcgctggcaaagccggagcagccgggatagccgcagccgccgcagttggccccgggcagcacttcggtgatctggggcaggcgctcgtcctgctccacatggaaaatcttagagctcaccgccagcagcaggccgaaaaacaggcccatggcccccagggccaccaccggggcgacgatcgacagtgtatacaaagtgattcacctcatcttcttcatcggggattgtgttttcgttaaaagatcttcagcccctggaatcccataaaggccatggccagcagggaagcgctgatcaaagcgatggggaagccctcaaaggagggggggcattcggaaaactccagccgctcccgcacagaggcgaagagcacgatggccagggtaaagccggcggcggccgagaagccgtaaaccaccgagccgatgaagttcaggttgttctgcacattgagcagcgccacgcccagaacggcgcagttggtggtgatcaggggcagatagatgcccagggcctggtagagggagggcatgctcttcatcaggaacatttccacaaactgcaccaggctggcgatgatcagaataaaggccaccgtctgcatatagcccagatcaaaggtcagaaggatatatttgttcaccagataggtgacggcagaagccaccgtcatgacgaacatgacggccaggcccatgcccagggcggtctcggttttcttgctcacgcccaggaaggggcagcagccgaggaatttcaccaaaacgaagttctccagcaaaatggcgcccagggccagggaaaagagttcggtaaagctcataaattaggcccctttctttttcaggatcttttggaacagggcgatgacaaagcccagggtcaaaaatccgccggcgggcaggatcatcatgatggccggctggaagttgtccccgaagaggggatggcccagcagggtgccggcgcccaggatctcacggatggtggacaaaatgcacagggcgaaggtgaagcccagacccatggcaagaccgtccaccaaagaggggatgaccttgtttttggaggcaaaagcctcggcacgggccagaatgatgcagttgaccacgatcagcgggatgaacaggcccagggatttggacagatcgggcagataggcctgcatcagcagatccaccgccgtgacaaagccggcgatgatggtgatataggcggcgatacgcaccttggaaggaatgagcttccgcagaagggaaatgaccacattggagcagatgagaactgcggtggcggccatgcccatgccgaagccgttttccagggaagtggtggtggccagagtggggcacatgccgatcagctgcaccagcaccgggttgttggtaaaaagcccttcatagagctgacggagaaaatttttcacgatgcaccctccttactgcgccagggaagcggccaggtccaaagcggactggacgcccgaggtgacgccgtttgaggtgatggtggcgcccgacagggccacgatttccccttcggcgccggtggccgatttcacaacggtgagatcgccctgctggccttcatattgctggagaaattccggtttttcggcgttggcgcccagaccggcagtttcgctcatattcacgatctgcacgcccagcacagcgccttcgccgctgacgcccacgatcatggtgatttcgccgccgtagcccgagggagctacctgaacgcagatgccgtcgggagaaccattccggatgatctgataggcatcctggatggtctcgtcatcgatgtcggcttccagaggctcaaaggtggcgtcggtgccgcacacagcgcccatggcgtcctttacctgctgctctttcagagcggcgattttgtctcgggtcaaagcgtctacgcagcccaggcacagagcaaccacaacggtgatggccaaaagggcgccgcccagatgaagcaggtcttttttcaggctgtcgttcatttgcttttccctccttccggggtcttaacggccttgggaggagccacaaagccgtatttgcggggtcttgtcaccttttcgatgaggaacacggtggcgttcatcaccaggatggaatagctgacgccttccggcatattgccgaagaagcggatgaacaccgtcagtaggccgcagccgatgccgaagaccacctgaccctttttggtcacagggctggtggaatagtcggtggccatgaagatggcgcccagcatcagaccgccgctgcacagctcggccagcatgaattccactcttccattgccgtgggggaagaggaagcacagaagggccacggtgcccagataagccacaggggtgtggaaggtgatgaccttccgggagatgagatacaggccgccggccagaagggccagagcggagatctcacccatggagccgcccaccatgcccagagccagatcggtgagggaggcgttgggcatcagtccctctttcaggctggccagaggagtggccgaggacaccacatcaggggtggcgaacagagggagcttggtgcggatggcgggccaggtggtcatgatcaccgggaagctcatgagaaaagcacgggcgctgagggcggggttcatgaagtttttgccgatgccgccgtacagctgcttgaccacgatgatggcaaaagcgtcgccgatgagaaccatccacatgggagaggacaccggcagacagtaggccagcagaataccggtgaccagggcggaacaatcccccacggtcacaggctttttcatcagtctttgataaagccactcaaaaaacaggcagcctgcggcggagaccgccgtcagggtcagggcccgggggccaaagacatagatggcaatggccagggcgggcatcagggcgatgatcacatccaccatgatctgccgggtgttgtcctcgtgccggatatggggagaggaagaaaccgtcaatttgctcaaatcagccataggaacctcactttctgcgcgcgttcaagatccgctgcttggccgagcggatgccctggaccagcggcagcttgccggggcagacataggtgcacgcgccgcactcgatgcagtcgagggcgtcatatttttcacaggcctccagattgcccttttctccatagaggtagatgtaagtgggcatcaggcgcatggggcaggcttccacgcatcttccgcagcggatgcaggaaggggtcttggaacccttggcctcgtcgccgcagaaagccaggatggcattggtgcctttgaagatgggggcggtgagatcgaactgagccacgcccatcatggggccgcccatgaggatcttgttgggttcctctttgaagccgccagccgcttcgatcacttccccgatgggggtgcccacccgcacttccaggttcttgggcgcggtgatggccgagccggagaccgtgacaatacggcggatgtcgttcataccggtgcggaatttccgggcgatggtggcgcaggtgtccacattgaacacaacgcacccggcgtcggcgggcagcttgcccgaaggcacttcccggccggtgagggcgaagatcagctgtttttctgcgccctgggggtacttggtcttgagacggcacagctcaatggagccgtcagcaggcagcagcttttccacatgggaaaagacatcagccttgttttcctccacagccagcttggccttctgcaggcccagggccttgagcagaactttgatgcccaggatcacatcgtcggtctgttccagcatgacccgatggtcggatgtgatgtagggttcgcattcagcgccgttgaggatcagggtatcggccttgcccaggccggagcggatcttcacatcggccgggaaggtggcgccgccgtggcccacgatgccggcctcacgaatggcgttgatgatttcctcctgggtcatggcgtccatatccaggggatggagcgaggggtccggggtgtcctggaagtcattttcaatgaccaccgacagcactttggacccattgggatggggacggggcgccacatccaccacagtaccggaaacggtggcgtggatgttggcgctcacattgccgcccgcttcagccaccagctggcccaaaaagacttgatcgccttttttgaccaccggtttggccggggcgccgatgtgcatcgagacgggaagcaccacctgtttgggcggggccatgggctcgatggcctttttgttggttgcagccttttgatcgtcggggtgaatacccccgcggaatgtgtaggccatagtctcacctcacaaagataatatgcagagaagggaagtcctcagtttccccttttgcacaatgcagtttattataatacaaaaaatcgaaatccgcaacaaaaatgcgaaaatctcccgaaaaaaagatgaaaaatcatggaattgataattaaataacaaaattcaatatttttccttttactggagggcgaaacaagagaaaaatggaaaacaaaaaatgcacggggaaattgtacagagtgattcttgttttttaccagatgttcatataaaatgatgaaaaggagggaatgccatgaaaaagcggattcttttgggacttcttgttgcgctttcctggggagcttgcacttatctgggatatctgagggaaagcagctatcaggtctatgcagtgcctctgactttgctgcagattttcatgggcgtgtgcctgggacttttgctgtggggccggatggaggatctgtctccccagaatctccggtttgatgccttttcggccctgcggctggtggtgaccgttgttctgctggtggcagtgcatctggtgtatgagtatctgggccgctatggcgcgccggtggaatactgggtcatgatggggcttacagccggcgccagtctgccgggcatccttttgcggggcgcctatggcaagggccattatcgaaagagataagtctgaatttccccggggtttccggggaaatttttttttgcctgttttactttttccctctctgcggtatactggagacaaccactatatttacgcaaaggagagaactgccatgacatttcaggaaatgccttatgagcgggtggatctggccgctttgtgcaaggtctacgaaaccttgaaagcccggatggaaggggccaagacggcagaggaagccgctgctttgctggacgagcacacccgtacctatgagccggccagcaccatgatgagcctcagctccattcgccataccatcgacaccgaagatcccttctacaccgcagaagaggaattttatgcccaggaaggcccggcctttggggaaaaggtcaccgatttctaccgggctgtgctggcctcgcccttcctcaacgagctgcggaaggaatttcccccggtgtttttcaaaaacatccagatggacgccaagaccatttccccggctgtgctgggagaactggaagaggaaaacaagctggtgatggattaccagaagctccagggcagcgcccagattgagtttcagggaaaggtgtgcaacctgtcccagctgggtgtttataaggaagacccccagcgggaggtgcggaaaggggcctacaccgccgaagggaatttctaccgggaacacaaggcggaatacgaccggatctatgacgagctggtgaagaagcgcacggccattgcaaaaaagctgggctttcagaattttgtggagctgggctatctgcgcatgggccgcaactgctatgacaaaaaggatgtggccgtgttccgggaagaagtggtgcgggagatcgtgcccatcgtctgtgagatgaaaaaagagcagcagaagcggctgggtctgccggacttcaagttctatgatgacccggtggtgtgccagggaggaaatccggcgccccagggtacctttgaggacacctatcacaccggtatcgagatgtaccggaagatgtccccgctcacaaaggactttatcaacaagatggacagcatgcacctgtttgatctgatcgccaaaaagggcaagatgaccggcggctattgcagctatctggcatcttacaaggctcccttcatcttcgccaacttcaacggcacttcccacgatgtggaagtctttacccacgagggaggtcatgctctggctgccttcatggcctcggacaaaacccggctgatggagtgcgccatgcctacattggaaggctgcgaggtccattccatgtccatggagtttttgtgctggccctatctggaagggttctatggggacaaggccgacaaggcccgggccattcatctgggcggcactctgtccttcctgccctacggctgtcaggtggatgagttccagcacatcgtttatgaaaacccggatatgaccccggaggagcgcaacgctcagtgggccgctctggataaaaaatatcgtccctggctggattttgaatcggtgcccttctatgccgacggcgcagcctggcagcggcagatccatatctacaccgatcctttctattatatcgactactgcctggcccagtcggtggccttgcagatcttccgtctcatggaggaaaagggctggcaggccgcctttgaccagtatctggcctacacccgccaggggggcaatgataccttcctgggtcttttgcagaaggccgggctggaaaatcccatggaaaagggctcgctcaaaaatgtggcccgggaagccagagagtatctcactgcccatcaaaaagatctggattaaaagcgcatagtttccttccttccgcccatactggagaaaaagggaggaaggacgatgagaaagtgtgtatggttggccgggattctggcgggcagcgtattgctgtccgcctgcggccgcaacgaaaaggacaaggcccaggaaaagaaggacgatccggcccaaaattcccaggaacagacccagcagcaaaccccggaggaaacacctgcccccgatccggtacagccgccggagacggcggaaaacaaagccgtgccccaggagctggccgctgtgagcaccgctttgcacgactgggacgaagggcgcatggaaaacctgcgcctggcctgtcaggccgttcacggggcggtgatcccggcaggcggttccttttcctttaatgaagccctgggagagcgcaccgaggaaaagggttaccgcccggccattgcctttgagaacggggagaaggtgatggaggtgggaggcggcgtgtgccaggtgagcaccaccctgttcctggccgcccagcagggaggcatggagatcctggagcggcatccccatcagctgccggtgccctatgccggggaaggccaggatgcggcggtggaatatgggagcctggattttcgctttcagaatcccaccgccgttcctgtggagatcggctgctggctgacgggggacagcgtcaccgtttccctactttctgtgcctggatgaacacaacgggccttggttctgttgccgggcgcggcagcggtccggtggccggacagccatactctctttgcctggatgaacacaacgggccctggttttattgcagagcgcggcagcgcagtatggccgtggcggctcgccaccgccacctgccggaaaaagtggatgagccactttttccggctctttttttgtgttacaataaagggcagagcaaaaggaggaatgtccatgctgtggcgatgtccggtgtgcggcgggaaattgcaggaagaggaaaaaggcggggtttgcccccggggccatcggtttgacaaggcccgcagcggctatctgaacctgctgcccccttcggggaaaaagacccgggagccgggagacaacaaagagatgatccgggcccggtgggcttttctgcaaaaaggctattacgcccttttggccgatctggcgggggagatcaccctgggggagaaaaaaacgccctttcggatgctggatgccggctgtggagagggctactattcccagtgtttgtgggaaaaagcccaggaaagcggccgggaactggaaatctacggcatggacatctccaaattcgctgtggaccgggcagccaagggcctgaaacagggccgctatgcggtgggaagtctgtaccatctgcctttgggggatggggtgatggatgtgatctggaactttttcgctccccattgcccggaggagtttgcccgggtgctgagaaagaatggacggctgctggtggcagtgccgggaaagcggcacctgtgggagctgaaagagcggctgtacgatgagccctatgaaaatccgggaacggcgccccatctgccagggtttcttctggaagagacccggtcggttacataccccatggccctcagcggggaggatgtgtggagcctgttccagatgactccttatttctataaaaccgacccccagcggcgggagactctttcccaggccgagggaatagagatcactgccgattttctgctgctttgttaccggaaggaggaaggataaatggaatacgaaggccagatctgccgcagtcccatggagcgttcttccttcatgctgccggtgatggtgggttgcagctataaccgttgcaagttctgtatgctgttcaagcacctgacctaccgccgcctgcccatggagcagatttttgccgatatccgccgggtggccgatctgggaggcgatcccaagtgggtctttctgggagacggcaacgccttttccctgcctgcggaggacctgctcaccattttgcaggagatccgtcgggtcttccccagctgccagggggtgaatatggacgctaccgttaccagtattgctcaaaaaaccgatgagcagctgcgcctgctggcacaggccggggtgtctcatctgtatctgggcatcgaaagcggcctggacgatgtgctccggctgatggacaaggatcacaccaaagcccaggccatggagcagatccgccgcatccagcaggcggggatggtttttgacgcccatattatgaccggcgttgccggaaaaggccgggggcgggaaaacgccctggccttgggagaatttttccgccgcacccgtcccagccgggtggtgaatttctccatgttcatccaccggagagcccctctgtatcaactgatccagcagggaaagtttgttccggcggacgaaggggaaaccctggaggagg

SEQ ID NO: 1531 - DNA, 32759 bp, Unknown
  16S sequences of unknown bacteria
tccttctcaagcacgattcactcaaaattcttgactgttcttgcgttctttccttattctgtatcgttttcaaggttcgttgctctcaagcgagcttgtacataatatcacaccctcgtttttctgtcaacactttttttgaagtttttttactttttttgcattttttcttaaaacccttatctttcaacgggttcaggtttgttcgatttgcgcttttctttcgtctgcccccgattttttcgttatcgtccggccactttgtcgctttcctcctcactttatatgctatttttactcaatacccgttctttcatgctcccccagctcccttacctttgtagagttctttcgtcatttctgtaactttccatccaaaccgattgactttctcccaatctttggcatatactctatccgtattatctgttctaatacagttgtaataaggaggcggagtcttgtttctgcttaaccctcaaagtaagcttcccttatatgaacagcttgtcgagcagctgcgcaagcagatcgttttaggcaacgccgctcctggttcgccgctgccttctgtacgtcagttatccgtcgaacttggcgttaacccaaacaccattcagaaggcctaccgggaaatggaacaggaggggctgatcgtctctctgcccggccgaggcagctttgtcaccagcgatgttgccagaatgcaggagcgccagcgcgccgctgaacttgccaatctggaaaaagcgctccgtctgtgccgggagattggaatctcttatacgtccgttcaggcactgaccaacaaggtgtataaggaggaatcctcttgctgaaagccgaccatattcgcaaaaactttggtaccagaatcgccctcgataatgtcagtcttacgctggaacccggccatatttttggtttgctgggcactaatggtgccggaaaatccacgcttcttcgcatcctttccgggctgtaccgtcccgatcacggaaagattacgctggatgacgctcccgtgttggaaacgtcctccagtaaacgggcgatctgttatctcagcgacgagcctgccttcctaatgaacgcctccatatcggaaatggcgcgtctccaagcgtccttttatcccgatcacagcgacgacaaactggcggaactgtgcctgcgcttctcgctgccgctgcatgaacgtatcgccagcttttccaagggcactcaaaaacgggctcagatttgtcttggtctggcccgcaatccgcgagttctcttgtgcgatgaaacctttgacggtctcgaccccgttatgcgggaaagcttcaagcgtgttctcagtcaggagacctgcgaccgcggactaattaccgttctggccggtcataatcagcaggaaatggaggacatctgcgacagcgtcggctttttgcacgaaggaaagctggtgcgctgctgtgatctggacagtctgttgggcgatgtgcagaaggtgcagttcattcccggcgagtcaatggacgattcccggctggcctccttctccccgctgcgggtgcagcgtcaggggcagctgatcgttctgaccgtccgttcacatcgcggagaattggaacaaaggcttcgcgacctaaagcctttgtttttggaatttttgcctctttctctggaagagatctttattttggaaatggaggatcaaggctatgcgaaataaacggcttcatccgacccgttttttcctgcaccgctatttctatctgggcgttgcgatgctggcggtcttttttctggtgctgcccatgcaggccctggttcgtctgccccagtctctggatcgttggaatcaatcggttctgggatccggcggaacgctggccgatcttgccccggaaattcgctccttcctttccgggtcgcttctttattctcttttagggctggaaggactctgcatcctgttcgccgttaccggctttctttctgccatgatcctgttccgtcacctgttttcccggcgtaagggaatgctggttgtctcccttcccgatacgcgtgcgcaggatttcggccgccgcttcgtctgctttctgcttttcagtgtgttgccgatttctctctgctatgggctctaccttctcgtgatcgtcctcaacggtctgaccgattacctgcttttggaaaagctcctcacccgtatggccgtccttctgctgattcatttttatggttttgtcgtcggagtactgtcctgcgtgctgaccggctatttctgggctgctctacttgcgggagccgtgctgacggtttcctttgaggggactttttatctctggagcaccatcgccggacattatctggatacgattcccgataccttctatcgagattggctgtcccgtctctcgcccgcctacgttctatacaaaaatttctatcagcccggagtcgtttcgctttggccggggcttgcggccattctgctcatgggcggactggcgctgtacctataccgtctgcgccccctggaagccgccgagcataccttggccttccatcctttggaatggatcatggaactctttttgggcattgtcggcggaaccgtggtcggcgcggtgatctggtataccgccggaacggaactttcgctgcttctgggactgtttttgggaacgctgctggtttccgggctgtgttatccggtcttccacctgcggctcaccggcattttccagcgctggtatttacccgtctgcacctccgtggtactgcttctggctgtggtagggcttcactatgacgtgttcggttacgaccgctggcttccttcccgggatgatctgaccgccatcacctatcgcccgctcttttccgatgacgccagcgccgttaccctcacttcttccgaagcactggacgcagcctatgactgggccgtccttctgcgggacgaagccgctcaggagcccaacgaaatgaagcagcgcttcacgcgcaacaccgccaacgtctgcatcacttaccagctgggcgggcgagaaatcagccgcatttacgaaaacaaaaccgttcgggctcagagcgccgctctcatgaaaattcttttggaaagcgacgattaccgttctgcgcagactgggcgttatttcctgcagcaccccgaatccgtccgctcggtttccgttttcccggagctgccctattattcccgcagcacctatagccgctgtacggctgacagcgccgacccctcctgcactttttccatcggcagtgtcttggaagcacttcaaaaggatctggtttcccgcacctacgatgatctgctggcggagcctctctttacccttcagctgaccggcctgaatgaagatggacaattttcttctcttgtgctgtcgctttacccctcggatcatcatgtcctgaacgcggttttcggcagccgcaaagcggaagtggtagacttcgtttccggcggctatgcggcctcggaggatgtcatcgccgtcaagcagatctacagcgttcccgccagtgcgctttacgcctcggagcgttccttccatcccgagtgcctgttggacacgcaggtagccgactccccggagcaggcggctcaatgggcgcgccagactgtgaccgatgaaagctcctatcgctactatgcccccgatttccgccctgacagctacagtgttctctatctctaccggcaggacgatctggaggactaccgccgcagcgccgctctcaccttcgatcctctgcacccggaaacgctccccgaagccggtaatttctggttccagtgccgttattttcccggcgaatagctgctgcttttcctttgatgcaggcaaacggaatacacgctttgcttgctggtgggaaggctgacttccccatttccatgcttccgacattcattggtcggcatcgctgaccgccccccgaaatttcttccggcagcggcgcctcgaaagttttccctccgtttctctgccgcagattccctccaaatccatgtgcggcccaaattgcccgtatcccctacgcttccccattttaaaaggcctgcgtttccttttccatagagagacgtaggcttttttcctttgccgttttcttacctcaagccgtgacgcgctgatcaaacgttttttccttttccatgacctttctccctccgccggtgaatcctcatttccgtcaacaccctgcgccatccccatcaacagcccgcattcgttcccttcaaaacggcctctggcttctgaaaaaacattcgtccgccagcgcccgtgaacagtgacccccgcttcacattgcttgctttggactacattgactttttcccctccttaagccgtttcatggagaaagagctatagcatagtatctaggagttttccacatcatctccgcttttgggcaggcaaagacccgccctcctccttggcaggaaaagagcgggtctctcatctattattgcttctctttcggcgtaaacagttcgaagatcggatagtcgtattccttctgtacccgatccatcagcttttgatccctgatggtccatgccgccagataaggcctgaacagcttcttttccagccacatgctcaggttgccgtcctccgccgcgcagtaggccacgaaatggggccgggtcaggcacaggggcagcagatacttcatggcaaagtgctcaaagcgattcaattcgcccggcttccacttgccgccggaagccagctcgccccgcaccacctccggcgcgtgctgacggaaccaccgcactgccaggggatggaagctttccacgcagtacgcgcccttgtagcggcgcagctgctcgtaggccgcctcgcaggtctgggcaatgcggtcgtggtacttgatttccacgatcatgggcgttttgccgtccaccaacgccagcacctcggaaaacaacgggattttcgagccgtccggcagcgggtattcctgcagctgggcataggtctgggtatacaagtccttgtccaccccgcagacccgtttcaggctcttgtcatggaagaccaccagctgatcgtccgccgtcagctgcacatccagttccatgccgtacccggcctctacagcccgcctgaaggcttccaggctgttctccgccacctgatgattgccgtcgtgcaatccacgatgcgcatacagccatcccttgagcgcactgtcgtccggcttttttgccgccggggcgatcagccacagatataccagaaacagtaccgccaaaattccaagaatccaccataccaccgtcatgttcagtcatctcctacatcaaaggcttccagtttgcttttgggcggctcaggcttgttgtcaccgtgccgggccagactgatggtcacaaaggagatcgccaccatcaccgtcgcatagggcatcagggtctgatagcccacgtgttccagcagcagaccgctcaaaatgggcgtaatgatctgcgcagccatggagaaagtgtagtaatatcccgtgtacttgcccacgtcgccgctcttgctgatctccaccaccatgggataggagttcacgttgatcatggcccacgccacgcccaccagtgcaaacaccacgtataccgccggatggaaagcggtaaacagacccgccgtggcaaagcagaccgccagcaggatcacgcccgcctggatcagctttttccgtccgaacttgctggacaggatgcccaccggcagatagctcagcaccgcgcccacggtggccaccatcaggcacagggacgccgccttgatgtcatagccccactgtacctgcatgtaccgggtgaaggccgaggtcacggcgttgtagcccatgaaccagaacgccacggagaacaggatcagccacaggctgcgccgcacgtccggggccagttcgccgaaggccttcccgctttccttcttttcctcggcctccgcctctttttcctcgtcggtctccatggccgccacttccgcagccagcttgttttcccgcaccgtcagcaccagcacgatcacggagatcgccatcagcagcgacaccgccagaaacagcatcgtatagtcgttccggcccgtagcgcccgcgtggaccagcagccccgtcacgcccagcgtgaacacgccgcccagtgcgcccatcaaattgatgatggcgttggccttgctgcgcaggggcttgggggtcacgtccggcatcagcgccacggcgggcgaacgataggtgcccatggcaatcagcagcagcccaagcgggatcacgaacagcagcagtttttcatgattgtccgcatagggcaggatgttcatcaggatgaccgccgcagccgtgccgcccagaatgaagggcgtgcgccgccccagcttcgtgtggcacttgtcggacagcttgccgaagaacggcagcaggaacagcgccagcacattatccatggccatcactacgcccaccagactgtccttcatatggaacgtgttttttaagatcagggggattacgttgtcgtacagctgccagaacgcgcagatagacaggaacgcgaagcccaccagcagcgtccgcttgtagttcagtttcatctcttttcctccgtccttcgaaaaggccggattacccctgcctttccttacttgtccctcatatataccccaaatgaaagccaaaagtcaaaccttgtataacgcttcataaaatggtataataaaggttacatcgaaaggaggcgcaccccatggacagcatgacgggctacggccgtggcgccgcccggcgggacggccgggaaatcaccgtggaattgaaggcggtcaaccatcgttttctggatttgtccttccgcgctcccaaaaatctttccttcctggaggacgcgttccgttcctttctgaatgaaagcggcgtgcggcgcggccatgtggacatttttatcaactacgccaatcaccgggaggacgctcagacggtggtgttggatcgggagcttctccacagcttccgcaaggcgtggcgcgactgcgaagatcttctggatttctgcaagaagcccgatgccgccgaggttctctccatgagcggggcttattccctccgtcaggcggacgaggacgcggaggccgtcacggcactggccctggaagccgcccgggaagccgtggacgcattcctgcggatgcgccacaccgagggcgaagccctcgcccgggatctgctttccaatttggacgcgctttccacccttcgcaatgaaatcgcccagcgcgccccgcaggtgccggaggattaccgcaaacgtctgcaggcccggctggccgaatggcaggtggccgaggccgatccccagcgcattgcgcaggaggtggccatcatggccgaccgctgcgccatcgacgaagagctcagccgtctggaaagccatatcgcccagtttgccgataccgtccgcacagcaacggaagcgggcaaaaagctggacttccttctgcaggaaatgaaccgtgaggtcaacaccatcggttccaaggcttccgacagcgagatcgcccggcgggtggtcgccgccaaatgcgtgattgaaaagctgcgcgagcaggtgcagaacgtagtctgacgcttccgacaggaggaactttcattgcttcgactcattaacatcggctttggcaatatggtggcggcggatcgtatcatcgccatcgccagccccgacagtgcgccggtcaagcggctcattcaggacgcgcgggaaaggcaccgggtggtggactgcacacagggccgccgcacccgcgccgtcattcaaacggacagcgatcatctgatcctttccgccatccagcccgaaaccatcgcgggcaggcttaccgataaagaccccaactccaaagatgaggaaagagaggcttgatccatggctgtttccattgcacgtaaggggatgctgctgattatttccgggccttccggcgcgggaaaaggcactctggtcaagaaacttttgagcagcgaccccagcttccggctcagctgcagcgtcaccacccgtcagccccgagagggagagatcgagggtgttcactattacttcatcgacgacgcgaagtacgcccagttggtggaggaaaacgcctttctggagcacgcgtccgtgcacggccacagctacggcaccctgcgggagcctgtggaaaagatgatctccgagggcctgaacgtggtgctggagatcgatcctcagggtgcgctttccgttatggaaaacgccagcgattatgtcagcgttttcatccttccccccagctttgaggatctgcgcgtacgtctgcatacccgcaataccgacgacccggtggagatcgagcgtcggctgaacaatgcccggggcgaagtccgcaaggtggatcattaccagtacgccatcatcaacgacaatctggagctggcctatacccagctgcaatccattgtccgcgccgagaagcagcgcaccagtcgcttccatccccatattctggacgactgattcgtccgtctgcccatcacttcccattatttgaaggaggaacattccatggccattgtcaatcctaccatcgttgaactgtctgaaaaagtggattcccgctacaccctcgtggtggaagccagcaagcgcgcccgccagctggtggacggcgctcagcctctggtggaccccaaggacatgaagcccctgaagatcgctatcgaagaaatcaaccgcggtctgctcacctacgagcgcgacccggaggaacaggagtaattccatgcgcatcgtcatgggcgtaacgggcggcattgcggcctataaggcctgcgaggtggtctcccggctgaagaaactgggccatgaggtggatgttatcatgacggagaacgccacccgtctggtggctcccctgaccttcgagaccctcagcaagcggcccgtctgtgtggatacctttacccgcaccgaaagctgggacgtgaagcatatctcgctggctcagaaagccgagctgtttctggtggccccggctaccgccaatctgatggccaagctggcctgcggcattgccgacgatatgctcaccaccacgctgctggccaccaaagcgcccattctgctggctccggccatgaacacgggcatgtggacggccgaggcaacacaggccaatctgcgtaccctgcaggcccgcggcgtccactttgtcggtccggaaagcggctttcttgcctgcggcgacaccggggcgggccgcatgagcgagcctgcgcagatcgtggaagccgccgaaaagctgctgcatccccgccgcgacttggatggccttcgggttctcgtcacggccgggcccacgatggagcgtatcgacccggttcgttacctgaccaacgattcctccggcaaaatgggttacgccattgctgcggccgcacaggcccgcggcgcttctgtcacgctggtttccggcccggttcatttgacggctcctgccggagtatcggtcgtgccggttatgtctacccaaaatctctacgacgcaatgatgacccactgtgcttctcaggatgttatcattcaggcggcggctcctgccgattatcgtcctgccgtcatggcttccgaaaagctcaaaaaacaggacggccagccctttgtgctgacgttggtggaaaatcccgacgttgcgaaggctgtcggtgaacagaaaaagcccggccagattctggtgggctttgccgccgaaacggagcatcttctggaaaacgcccaaaagaagctggataaaaagcatctggacatgatcgttgctaacgatgttacccaagcaggagccggtttcggcgttgataccaacatcgtcacgctgatcagccatcagggcatgaaatccctgccgttgctgtccaagaccgaagtggccgaccgcattctcgatcaggtcgccgttcttcgcgctcagacccactgaccggctccaaaaatgacaagctaaggtgaagtttttcaagcttctccttagcttattttattagaaggaaagtttatttgtcaaaggcgctccatcgcccattgcatgatgaagctttctgtctttcttacacgttcagctcatacagaatcgcttccgcttcgcatccctttccatcggcggacagcgtaacgcccctgcccgatttctttgggaaaacgcgggtgctcataaccttttcgccgtcctgaataaagatttccacggaacaacgatccacaaaaatcctcaactccaactgaccatcccgcagcggcacatcggcttctgccgtcatttgactccccgtcgccttttcacctgcggtagagaagccgctccgggtcgcgtcgacacgaagcacctgttctcctccgtcatattcgatgcagaattcctgttctgcatccttcagcagcgacagtcgcaccgtctgtttccccacgttttggaaacggaaaagcatctccgcgcattccctagttgaaaactcccatgcactcttcggagtcaaacagcctttcttttccgttttttctccgtggtatctttcgatttcccgcacaggccgttgcatcagccgtccattttcccaagtcaattcccgcaccagcgccatacagccgttccagccatgaccgagcttgtccgtcggcatctgatggagccagctctgcatccagcccgccatcagaagccgtccgtcccggctttccgtcatctgcggcgcgtaataatcccagccattgtccagcgcagcccggccttcttcgtagaaatgcgcggccttttcatccactgtcccccaaagcacgatagacggattcgtatgcggatattttcttccatccatcggcatgtccatgacgcttaaaagcagcagtgcccgtccgtcccgcacaactaaatcagggcattccagcatctggtcgaacccatccagaaaaatgcctttcatctcccaatgaagcccatcgcgggacgcatactgcaccagcgacccgccctgcccgttgcgattggtcgccagcagccgccattcatcgccccatcggaacaggcaggggtcgcggaaatccacagaggaaccgccctccgggagcatcgctcggccgatcaccgggtttcgctctgccttgatgaaatgagcgccatcccggctgactgccatacactgctgctgatagtgtccgccttccccatcggcttccagtccggcgtaggccaccagcatctcctcgccgtccatctgggcggttcccgtaaaacatccgccttcatctgcgctggtatccggagcaagggctacgccctgccaatcccacttcaccaggtcatcgctggcccaatgtccccagtgcatcggcccccattggctcgaatacggatgatactgtccgtacagatgatattgaccaaaagcctctataaacccgcagggatcgttcacccaccctaccggcggtgctgcatggtaggcggggaaatacttgtgatcaacaaatggacattccattttcacatatgcattggcggcttctatcgtccttttcatccgtgcttgcctcctgacgtttgaatgattttccattcgacgcgcttttcttctttaccttctgaatgcaaaaacggcaggcatttctgcccgccgcttttcatgagcttctcagccctgcttctgcttatgcttgggattttcgcagatcaccatcacgcggcccttgcgcttgatgatcttgcacttttcgcagatgggtttcacagagggacgaaccttcatgtggactacctccttttcttcatcaggaactccgccgtcaggcgaagcggattgctttatcgccgttcagccgcagactggactcagtttttgctgcgccaggtaatacggccacgggtcagatcgtagggggagagctccacggtcaccttatcgccgggataaatgcggatgaagttcatgcgcatttttccggagatctgcgccataatgatgtggccgccggggagctcaactttgaaattcgcattcggaagcgcttccgttacggtgccttccatttcgatgacgtcacttttggacaaacgcacattcctccttttccgggtggggctcagcgccctcgtaagcatccttggctgctttcagcgccttgcgaatgtcgctgtcagctatctttccgccgctgccgccctttcccgaaacggaaatggtgaagggcagcgcgtaaaggtgctttacttgctttttctttggcttttccagagtacgcagccttccgtcgcacagaagaaccattcgttcgtccaatacttgcaaaaccgcataccagtttccggcgtcatggccgcgcgttacgcatacgactcgtccggcttccaacggcgctttcactcttcttcctccgtcagggcaaagcccggatacgaaaggagctccggcagaccgttttcgttgatgacgatcgtgtgctcgtagtgggagcagacgctggaatcctccgttacgacggtccagccgtcttccagctcggccacatgatagtcgcccttggcgatcataggctcgatggcaagggtcattcccggacgcagcttcacgccgtgtccttcccttccaaaattgggaacgctgggttcttcgtgcatattgcgtccgattccgtgacccgtcaggtcgcgaatcacgccgtagccgaagccctccgcataggtttgaaccgcatggccaatgtcgcccagatgatttccgttcaacgccttccgaacgcccttgaaaaagcattcttccgtcacattgatcagcttctgatcttccgggctgacgtttccgacgcctaccgtaaaggcgctgtcggactgccagccatccagaatcagaccgcaatccacggacaggacgtcgccgtccttcaaaatcacccgatcgctggggatcccatgcacgacctcctcattgatggaggtgcagatggatgctggatagccgttataatccagaaaagaggggatcgccttgtgtttccgaatcagctgctcggcgtacacatccaactcagccgtgctcatgcccggtttgatggcttcccgcagacggcaaagcacatcatagagcagcgcaccggcctttctcatgcattcgatctgctgaggatttttcaggtagatcatttgcttgcctcaagtgccttcagaatggcttcgctgatctcctccagcgacagatcgccgcatacagagtgaagcagattagccttctgataaaagtcgatcaaaggcgccgtcttttcatgatacacattcagccggcttaaaaccgtttcaggtttgtcgtcgtcccgctggatcagaggcgttccatccaccttgcaggcggtttcaccgttcagccggctcacatgatagggcgctccacaggtagggcagacccggcggccgctcaaacggttgaccagcacttcgtcagccacatccagatcaatgacggcgtccagatcggcaaaggccgacagagcttccgcctgttccaccgtgcgggggaatccatccagaatgtaaccgttccggcagtcatccatggcaaggcgttccttgaccaacgcaatgaccacctcgtccggcaccagctggcccgcgtccatgaaggtctttgccttcaggccggtttccgtctggttggcgatggcggaacggagcatatcaccggtggagatctgaggaatgttcagcttttcacagatgatcttcgcctgggttccctttccggcgcccggagggccaagaaatacgatattcattaaaatgcctccttcgcttgcatggtcagtgctgcttttcatccaatttcgcgcagaaccaacgaaggccgccactgcacggcacagcttatgataccacatctgcggtaacttgccaatgccgtgccgggcggcttcattggttcttttgcgaacctctcaggaaagccccgggcattgcccgaagtccctccgtctgtacaggatgacttccgcagcgccacggacagctgcgctgatcttacgatcaggtaagcgtgtcgtagttacggctgaccagcagatcatccagctgacgcttggtctccagcacaacgctgaccgcgatgagcaggctggaagcggcgaaaggcacgctggtctgcagacccacggtgaacaggttgggcagggtcgccagaacggccaggaacagagccgcaaacagagtcaagcgattgttggtgcgcgccagaaaatccgcggtgggcttgccgggacgcacgtgcggaagcacaccgccctgctgctgaatgttctttgccatttcatcaggctggaaggaaatggaggtgtagaagtaggtgaacgcgatgatgagcagcgcggtcacgatcatgtacagggggctgtagtagttcatgtaccggctccaccagaggcccaagccgctttcgctgccgccgaagagctgaatcagagtggaggggaaagccatgaaggagtacgcgaagatcaggggcataacgccaacgctgcaaaccttcagcggcaggatgctgctctggccgccgtacattttccggccggtcacacgcttggcatactgcacctgaatgcggcggacgcccatgtccacgaaggtcacgactacgatcatcaccagagcgaacagcagcaccgccagcagggtcagccagggagtcagcgaggtagcgctgaaagcgttggcgatcaagctggtgaagccgttgaacaggttggagatgataccagcgaaaatcagcagagacacaccgtttccgagaccattcgcggtgatccgttcgccgatccacatggccagcgccgtaccggcggccatgctcacgcccaccagaacggtgttgaaccagccgctcttgatgtagcccaggctgtacaccagaccgatggcctgaatcacagccagcacgaccgtcacatagcgggtgatggaggcgatcttcttctggccgtcggggccgctcttggacagacgttccagagcggggatggcgatggtcagaagctgcatgataatcgaggagttgatgtacggagtaatacccatggccatgatggtcatgttggagaagttactaccggtcatcatgttaacgaggtccagcaggggcaggttgctcccgctcatggcggacttaacgcgaacgtagtcaacgccgggagcggggatcacgcctaccagccggaagaggatcagcatgaagaaggtgtagatcagtttcttgcgaatgtcctgcaccttccatgcattgtgaagggattgccaaatgctcactttattgttcgcattcttagccatcttacttcacctcggctttcccgccgagagcctcgatcttattcttggccgtttcggtgaacttcgcggcttctacggtgagctttttggtcaggtctccgttgccaagaactttcacgccgtccagcgtcttcttgaccagaccggccttcttcaaatcttccacagtaacggtcgcgccgtcctcgaacacttccagagcgcccacgttcaccgtcgcgtactctacgcggaacggattggtgaagcccttcttaggaacgcggcgatacaacggcatctggccgccttcaaatccggggcgcttgccgccgccggaacgggccttggcgcccttgtggcccttaccggaggtcttgcccaggccggagcccacgcctcgaccaaggcgcttcgcagcggtggtggaacctgcggcgggttgcagctcgtgcagtttcattgggtatccctcctcagtccttgatttcggttacgtcgatcatgtgcttcacacggaagatctgcccgcggacgcaggcattatcttccttgacaacggtctggccgaccttgtgcaggcccagcgcagccacggtgtccttgtgaaccttcaggctggagatcggcgattttttcagcgtaatagccagtttcatgttcgtcgtcctccttagcccagaatttcttccacggtcttgccgcgcagcttggcgacttcctcagcggagcgcagctgcttcaggccttccagagtggccttgaccatgttgatcttgttgttggtgccatagctcttggtgcggatatccttcacacccgccagctccagcacggcgcgggcagcgccgccggcgataacgccggtaccttcgggagcgggcagaagcacgaccttgccagtgccgtaataaccagtggtctcatgagggatcgaggtgcccagcagggacacgttgatcaggtgcttcttcgcatcctcagtgcccttgcggatcgcttcggaaatttcagcagccttgcccatgccggcgccaacgcggcctttttcgtcgccgaccacgaccagcgcggagaagcggaaattccggccgcccttaacaaccttggtaacacggttgacggcaacgagcttctctttgaattcgctgacctgttccatgcgttgcatgcgttcgtcctccttcttagaattcaagtccggcttcacgagcgccggcagccagctccgccacgcggccagtatacacatagccgccgcggtcgaagaccacctgcttgatgcccgcttcggacgcacgctcagcaaccagcttgccaacgatcttggcagcgcccttcttgtcggtgtccttgatctgggccatgacatccttctcctgcgtggaggcggctgccagggtcacgcccttggtatcgtcaatgatctgagcatagatgttgttcaggctgcgatacacgcacagacgcggcatttccggggtgccgctaatctttttacgaacacgggcatgacggattttgcgatccgtattacgatctcgcgtcttaaacatttgcgttcattcccctttcgattacttaccggtcttgccttccttgcggcggatatgctcgtcaacgtacttgatgcccttgcccagatagggttccggcttacggatggcgcggatatcggcggcaagattgccaacctgttgcttgttgatgcccttgaccacaatggtggtctgagtgggggtttcgaactggatattctccggcgcgtccaaaatgacgggatgggagaaaccgatgttgatggtcagcttcttgccgccctcagcctgagcgcggtagccggtgcccaccagctccagagtcttggagaaaccgtcggtgacgcccaccaccatgttgtggaccaggctgcggtacagaccgtgcatggccttgtggggcttcgcgtcgctgggacgttcgagggtcaggatgttgccttcctgcttcaaagtgatggcgggattcacctcttgggtcagggtgcccttggggcccttcaccgttacggtgttattctcgtccacctttacctccacgcccgcgggaaccgtgatcggaagtcttccgattcgagacattgtcttacacctccattgcgtgtaggttaccagatgtaggcgagcacttcgccgccgatcatttgcttccgggcttccttatccgtcatcagacccttagaggtggagatgatggcgatgcccaaaccgcccagaaccttgggcagctcttcggacttggcgtacacccgcaggccgggcttggagatgcgcttcaaaccggcgatcacgggctgctgcttgccgttaacgtacttcagggtgatcttgatgctgccctgagggccgtcatcgataaaatccaccgacttgacatatccttcgttcagaaggatcttcgcgatcgccttcttggcattgctagcgggcagaacgacagcgtcgtgctttgcgatctgcgcgttgcggatgcgggtcagcatatcggcgatgggatcattcacaaccatgatagaacctccttccgttctttacccgcttaccaactggccttgcggacaccggggatttggcccttgtaggccagctctctgaagcaaatacggcagatgccgtacttgcgaagcaccgagtgggggcgaccacacaggcggcaccgcgtgtaagcgcgagtggagaacttaggcgctcttgcctgcttgattttcatactggttttggccacgttcttaatctcccttctctaagctcactgcgcgaacggcatgccgagcagccggagcagttccttgcactcctcgtcggtcttagccgtcgtaacgaagatcatttccatgccgcggatcttttccaccttgtcgtactcgatttcggggaagatcagctgctcacggacgcccagagcgtagttgccgcgaccgtcgaaggacttgtcgctgacgccgcggaagtcgcgaacgcggggaagagcgatcgagaccagcttatccatgaactcttccatgcggctgccgcgcagggtcactttcgcgcccacgttcatgccctcacggagtttgaagtttgcaatggacttgcgagccttggtcaccaggggcttctggccggaaatagtcgccagctcggcaaccgccacttccagacccttggggttatccttgcagtcgcccagacccatgttgatcacgatcttggacagcttcgggatttccataacattcttgtagccgaacttctgctgcagagcaggcacggcttcattgatgtacttttctttaatacgagtagccatcagccttgcctccctcagtcaatatccgctttgcagcgcttgcaaacgcggacagtcttggtcttcttggtgccatcctcgcgggtgatctcttccttgcggtgagccacgcgggtcgccttgccgcacttggggcagatcagcatcacgttggaggcgtcaatggcgcgttccttctggaagatgccgccctgctggccctgacggcgggccttctggtgcttggtcacgaaggcaacgccttccacgatgaccttgccggtcttggggaatacgttcagaaccttgccctgcttgcccttcacggcgtggtcgccagtggcgggaccggagatgacaacgacctgatcgttcttcttaacgtgaactttcttaagcatttgtcaatcctccatcacagcacttcgggagccagagaaacgatcttcatgaaatccttctcgcgcagctcacgagccacaggtccaaagatacgggtgccacgaggcattttctggtcgttgatgataacggctgcgttgtcatcaaagcggatgtagctgccgtcgggacggcgcttctgcttgcgcatgcggacgataacggccttaaccacatcgccctttttcacggtgccgccgggggtagcgctcttgacgctggccacgatcacatcgccgatggaaccgtcacggcggaaggaaccgccgagcacgcggatgcacatgatttccttggcgccggagttgtcggcaaccttgagtcgcgtttgcggctggatcatatggtttttcctccttgttggaatcgggtgggacattcagcccgcccttggtaggttcggagcgtccatcgaagggcttcatgctcctcccttccacagttcagcccatgatatttgaaatccatgggtgcttatggaataagaggaggtataccctgcgaggacagtgccttttgattacttggccttctcgatgatctcgaccaagcgccagcgcttgtcgcggctcaggggacgagtctccatcacgcgcacacggtcgccgatgccacattcgttgttctcatcatgcgccttgagcttgctggtctggttcatgattttgccatacagcggatgacgcacacgagtcttgatttccacaacgatggtcttatccatcttgtcgctgaccaccagaccttcgcgggtcttgcggtatcctctttgttcagacattgaagcggctgcctccttcttttcggtctaagcccttactgggcgtctttttgttcgagctgacgaaggacggtcatgcagcgggcgatatcacgcttgacgccctgaatgaccatggtgttctgcagctgcccagtggcaagctggaaacgaaggttgaacagttccgccttcagatcggcgaccttggtttcaagctcgttcttgttcattgcttgaagctcttttgccttcattgtgcttcaccacccgcttcgtttttgttctcgcgcgcgagaattttggtcttaagaggcagcttgtgagaggccagacggagggcttcacgcgcagtctcttcgggcacgcccgcgatctcaaacagaacgcggccgggctttaccacggcaacccagtactcgggagaacccttaccggaacccatgcgggtctcagcaggcttcttggtaacaggcttgtcggggaagatcttgatccaaacctgaccgccacgcttggtgtaacgggtcagggcaatacgagccgcttcgatctgctggctggtcacccagctgggctcggtagcgacaaggccaaactcgccataagcaaggaagttgccgcgcatggctttgccgttcatgcgtccgcggaacacgcggcgacgcttgactctcttgggcatcaacatagcttatctgcctccttcggtattggcggcgaccggcgctttcttgggcttgggaagcttctgtcccttgtacacccagactttgacgcccaagcggccataagtggtcttggcttcggcgaagccgtagtcgatatccgcacgcagggtctgcagcgggatggacccttcgtgatagtgctcgctgcgggcgatatcagcgccgcccacgcggccgcccacggtgcacttcatgcccttggcgccggcgcggagagcacgctggatgctctgcttcatggcccggcggaaggagatgcgcttctccagctgctgggcgatgttctcagccaccaactgggcgttggtgtcgggcaccttgatctccatgatgttgatgttggcggggctgcccaggaacgcttccacgtccttcttcagggcctcgatgcccgcgccgccgcggccgatgatcataccgggcttcgcggtgaagatgttgatggtcacgcggttggcggaccgctcaatgtcgatgtggctgatgccggtggaatagtacttttccttcagcatttcgcgaagtttgtaatcctccacgaggttattcgcgaaatccttcttgccggcataccagcgggtgctccaattgtagataacgccaacgcgagcaccgtggggatttactttctgacccattgataaacctcccttggattacttctgatccagcacaacgctgatgtggctggtgcgcttgaggatgggggacgcgctgccgcgggaacgggcaacgtaacgcttcagcgtggggccggggttggcgtacacttcggcaacgtagagggacttgcgatccatctcgttgttgttcaccgcgttggcgatggcgctgttgagcagcttgtaaaccacggggctcgccgccttgggggtgtacttcaggatggccagagcatcagccacattcttgccgcggatcaggtcgatgacgatctttaccttgcgggaagagatgcgcacgtacttggcatgagcggacgggcgagtatcgcgggccgccatgtgggcttgcgccttcttctgggtattggttgccatgaaaactcactccttccgcttacttcttaacactggctgccttttcgccggcatggccgcggaacgtgcgggtgggggcgaactcgcccagcttgtgtcccaccatgtcctcggtcacatagaccggaacatgcttgcggccgtcatgcacagcgatggtatgtcctacgaaatccgggaagatggtgctggaccgagaccaggtcttgggcacagacttcttgccggagttgttcatttctacgatgcgcttcatcaacgcttcgctgacaaagggtccctttttcacggaacgactcattgagaggcttcctccttccttggatgcatgggcttacttgcccgcgcgcttcacaatcatcttgttggaatacttcttgtgcttgcgggtcttcaggcccagagcaaccttaccccagggggtaacaggagcgggcatacccacagggctcttgccctcgccgccgccatgggggtgatcgcaggggttcatgaccacgccgcggacggtgggacggatgcccatgtgacgggtgcggccggccttaccaatgcggacgttctcgtggtcggtgttgcccacggttccgatggtggctttcgcatccataggaaccttgcggacttcgccggagggcagacgaacctgcgcgtacaggccttccttggccatgagctgagcgctcataccggcggaacgaaccatctggccgccgcggccgggcttgatttccacattgtggatcagcgtgccgacggggatcgccttgatgggcagcgtgttgccgggcttaatatcggcggtctcgctggagatgacggtgtcgcccaccttcaggtccagaggagccaggatgtagcgcttctcgccgtccgcgtagtgcagcagagcgatgaaggcgctgcggttggggtcgtactgaatgctggcaaccttcgcggggatgtccaccttatcgcgcttgaagtcgataatgcggtacttgaccttgttgccgccgccctgatggcgaacggtgatcttgccctgcgcgttgcggccggcgttcttcttcttgtactcgagaagggacttttccggcttagtagaagtaatttcctcgtacgtcaacaccgacataaagcggcgagcgggcgaggtcggcttataaactcgaatagccattgattcttgtcctccctgctttattcggccatgccctcaaagaactcgatggtcttggagtctttggtgagggtcacatacgccttcttgatttccggggtgcggccggcggtgcgtccctgccgcttcatcttgcccaaggtgcgcagggtgttgaccttgtccaccttgatgcccttgaagatgctttccagagccagcttgatttcggtcttgttggcgctggggtgcacttcgaacacgtagcgcttatcggcgaagccgtcgtaagaggcctcggtcagcaccgggcgaaggataacgtcatggggattcttcatgcatatacctcctctacgcctttgagagcgtccttggtgaggatgatcttgccggccttcagaatgtcgtacacgttcagggtgttgacataagaggtttccagcttttcaatgttgccggcggcgcgcaggatggtctcatcccggccgggcagcaccagcatggtggtgttcttggtctcaaagttgcccaggaacttggccatcagcttggtcttggcttccgccagcttgagctcgtccacgacgatgatctcaccggcgttcagcttggaggtcatggcgctcttgaaagcaaggcggcggaccttcttgggaacgttgatgacgtaatcgcggggcttgggagcaaacacgacaccgccgtgcttgaactgaggcgcgcggttgccatggtgacgcgcgttaccggttcccttttgacggtagatcttacgaccgccgccacgaacctcaccgcgggtcagagcgctctgcgtgccctgacgcttgttggccagaatggagcgaacgaccagatgcatagcggcggtattgatgggggccgcgaagatttcttcgctcagctccacttcgccgatggccgcgccttccatgttatacagtgcagtcttaggcatggtgtactttcctccttttaagccttgcaggtgttgcggaccagcagcaggccgccgttcgcgccgggcaccgcgcccttaatgaggagcaggttgcgttcctcgtccaccttgacgatctcaaggttctggacggtcacgcgctccacgccgaagtggccgggcatgtgcttgttcttgaaaacgcgggacggatcggagttagcgcccatggaacctacgccacggtgatacttggaaccgtgggccatggggccggtgtgctgattccagcgctggatgacgccgctgaagccgtggcccttgctcacgccgctcacgtcgatgcgctcaccagccgcgaactgggaaacggtcagctcgctgcccacttccagctcagccgcattgtccagcttgagctcccgcagatagcgggtgggggcgacgccagccttcttgaagtggccagtcatgggcttattgaccagcttcttggcgcggttttccgcgtaggtgtcaaagcccacctgaacagcctcgtagccgtcggattcgatggttttcttctgcaccaccttgcaggggccggcctccaccacggtcacgggtacgaggcggccatcatcggtgaaaacctgcgtcatgccgattttcttgcctacgatcgctttcttcatgatgtcgtaacctcctgcattagttgttaagcttgatttcgatctcgacgccggcaggaagatccagcttcatcatggcatcgaccgtgcggggattggggttgtggatgtcgatcaagcgcttatgagtgcgcatttcgaactgctcacggctatccttgtacttgtggggggcacgcaggatagtgacgatctccttctccgtcggcagtggaatggggcccgataccttcgcgcccgtccgcttcgcggtttccacgatccgctcggaggactgatcgatcaggttgtgctcgtaagccttcagcttgatacggattttctggttggccattttcgttcctccttgatattcgtctcaagtacaccgcgccgggtgtgtccatcggccgcttttacttgggcgcaagccgttccggggctttagccccttctcagcagcgccctttcaggctgccgttgcaccgcctccgcagtgtctcaagtccgtcgcccgattgaacgagctggtccacgataattacccgccatggccatggcggcaacttaccgcttcatccctaaacagacagcttcagtagtatacctcaaacctccgtcgattgcaagtcttttttcaaattttctgataaataaaaagtttaccattaaatgcgaacggcaggttcggcctgctggatcgcattttttgtttatattcaaggctttcggggggtgaaaatgtggcgtatcggtatatcagccttgagggcaggcgcaaaattgccagccagtacagggcgggagcaaggcccgcagacattgcgtctgcaatcggcgtttcgacggctaccgtctatcgggagctgcaacgcggttatacgggcgaaacggatgaaaacaagcggcttatttacgacccaatgatcgcacaggaggccgtgcagaacggtttcagacgcaggggccgcaaaaggcgcgtcaagccgtaaagggtgcgcagcaccgaggggcgaggacagcggcgcagccgctccgcagacccgaagcctacggcccgccgcaggcgaggacgtaggccgcaagaaagggtgcgcagcaccgaggacgaggacaggccgaagggctaccgcagtccgaagcccacgacagcccaaagggctggggtgggccgcaacaacaggaggaatcaaggatgctatttgccatcagtcgatatttgaagcacagacgcttttgccgcgctgcgctgcatgactatttccgatatggctttgagtaccgggggacgcggtacggcaggccgtcacgctggcgcgcctagaaaggaagaacacacacacagatgaaaatcaaagctcttgccaattattgcaagcaaacaaagagcgtcgttttgctggatcaatacgacgaaagcggcgtgctgcaaaggcagtatgttcaggccgggagcgcggttttccctttggacgggctgccgctgctgaacgaagatacgctgattgccattctggatattcctgcggacgaacgatgtgattgggtggtgcagcggacaaatgctcaatgcgctctttcatatgtgcaggacaacgaagaaaatgaccaactgtccgaattggccggaatcaccttttcggccaacggatacgacttgcagccggtctataccccttatgggcttgtgaccatcaagggtgcgaagcaccgaggggcgaggacagccccgataaggggctaccgcaggcccgaagcctgttacccgctgaaagcgcgggaacaggccgcaaatgacagcagtacaaggcgcgtcattgcggacagttaaagggtgcgaagcaccgaggacgagcacgccgcgtagcggcagcgcaggacgaagcctgcgacccgccgaaggcgagggggcaggccgcagcagaaaaacggcgcagtatttcgcccgtctgataaacggcaacgttacaatcatcgtcaaaaacggctttatgctgatcgctgccatcgttcccgtgattcgatgggcggatgaaaaggcggttcagttcatgcgggatgctgccggttacgccgccgttgcttttcagcgacggcaaagtcagggggctgaccttggagaaaacgaagaatgaggaagcgggaacacccaagatttttgatgcggaaggaagggaggaacggccatgaatcaccaacagcggcgcgaagccgccagcgccggaaggatgcagcgggaaacgcttcctgtgccggaggtatgccggggatgcgatttcctttatccaaagatcggcgctctgcgcgggcggcaatgcgccgcctttgtcacctgcacgacgggcgaaagctgcggagccagaagcagccctatcccctacagaccgaaggaggaacggaaggcatgaacattcaggaattttcacgggaagtacatcggaacgccgtggaacacggctggtgggataagaaacgggaaattgcggagatcgtcgcgctgatccacagcgagtattcggaggcgctggaagaataccgggcgggcagaccgctggtgtggtatgagtgcgggaaaaaggacagtccgaccgccatttgcggcccggagagcgaagaaaaatgccgctcatgccaaaattccgtctgcgaataccgccgggaaaagcccgaaggcgtggcggttgaactggcggacgcttgtattcggattctggattatctgggcgaagaagaaacgagccttcggggaatcgacaatctgaatgagctgatcggaatggttccggcggaggcgtatttcgtgacgctgccgcgcctgatctgcaatatgcatttgaaattatcccttgcctatcacaacctgcggaaagcagaaagcggggaagtcggacactattttgcccgtggaatgtcgcttctttatgaggcgctgggcgcaacgtgcgcgtggatcgacgaacaggggctttcggcgaaaaagattctgctgctgaagcacagatacaatcggaaacggccttaccggcacggcggaaaggtgatctgatatggcagctttcgaatttatggcaacgcccttgaatggcgcgcagcgccgaaaaatttgtttgtggaaatcgtctgcgtgctggcctccgtcgcgctggtggtagccgtatgggaagccctgttcagccagcgattcaaaaaggagaaaaacaatggtggaactgacggcggaggacatggcccgttatgccgatgaatgctgtaaaaaggccgcggagctgtttgacgaagggaaaatcaagcgggaggccgtaagcgaggccgccgcctctatgggcaggatcaacggcgaactgctggggcgcatcatggcggccatacaagcggggtatgcggcgggttatacccgctatatggaggaaaacaggctggatgaagacggttttcccacaaaggccggagccaaaaccatcgacgactgccggaaatgcaaatgcaattactgcgccaatttggaacagtgtaaaaggcggcagaagggcaaggagcagctgccggaggatggaaagccagcgccctgcgtcggatgcggcggaggggaaattttcgccaagaaggaactgccctgcatgggatttgcgcaggccgatacgcccaactataccaacgaatagcagggtcggccaaccaaaaagcggcctgcgtggacaaacgcaagccgctttctatgggcttatgcccaaaggctattcaacactcccacattataccatgaaaaggacggaaaagcaagaaaacaaggggcttcaagcgccttttgacccttgtaaaaaccattaactattcacgcaaagcatgattatgcacgttgaccaagggaggccgaaggccgactagcgccagaaatggccggaggcaaggaggttccgcaaagcggaacgagcgttgaggacagtcctgaaagggctccgcagacgcgaagcctgcaacacgccgaaggcgcggggcaggccgaatatgaagcgcgtagccaagcgcaagcggagcgcggggcttggccgcagttccccggaagagggagggggtacgccttagggggaacagggggaaaccgcgcacggtgtcccccgctccccctaggcaggtcagggaaaacggcagcaatgggaaggcaatcaacacacaggatgaaacagccccttcacgggacaacatggagggaacacaatgccatactttgagcgaaagaccaccagcgggaagctggtggaggtggaacggtactttgcgacccgagacggaaagcgtctgccaagggcaggcaacgagagcgaaagcacggaagaacagcagaagctaaacgagcggcacgcgcaaaagcggctgatgcggcttatcaacgccaatttcgacggagaagccggagaccagtttgtcacgttcacccatgcggaggacatttccgagaagcaggcccggaaagaggcacggaatctgattgaccggctggatcggctgcggaagaaaaagaagctgtcccccttgaaatacatcatcgtgaccgaacatcagggtcgctggcatcatcacgtgatcctgaacggcgggttatcgctggcagaattgggggacgtatggaacaggcccaggaaacgcgggcggtttctggtgtcgacgctggatgatctgtacacctatgaggacttggcgaagtatctgaccaagaaccataagccgcccaaaggccggaaggggccagtgcaaagcgcggcgaggggtgaaaacagttccggcaaggagccacgccgaaagtatgcccgccgctggaatgccagccggaatttgaaacagccggccgttcagaaaaagccgatcaagcgcccgccgtccgcccgggagccgaagccgccgaaaggatgtaccctgctgccgaactggtacacggcctgcgaccgcttcggaaacctttatcaatacttcgcctatatccaaaggccaaagaaaaacaacaggaggaatgaaaatgctgtttccaaggatcggacgtaaggcgtggattctgacggatgtttacgaaaagacctgcgccgtgcccgtgacggtgattccgctggaacaatcggatttatgggaacttctggcggctgcgcagggcgcggcaaggccgcgttatgcggtgcgctggcagctctgtgaaggaagggatgaatatcatgaggattactatttggacagcaggcgcggcctgtatggcagcgcagaccgggcgctggcggcgctgcgccgaatggaacgaaagcggccacgggccgaagctgtgaaggccgcgtggaaaggaggcaatgagccatgaaagcagttgaaaatagggagcgcatcaaagcgggggcaggcccgaagcccgtaccccaaagggcagcagacgctacgcccgttccttcggaaagcgtggagcagcagcggcttttcctatgggccagaatgcaaagcggaaaatacccctgtcttacactgatgtatcacattccgaacgaaggaaagcgcagccgggcaaccggcggacggcttcgggcggagggattgaaagcgggggtgcctgatatttgcctgccggtcgcgtgcgggggctgtcatggtttatatatcgaactcaagcgtcagcacggcggacggctgctgcccgcgcaggccgaatggatggaaaagctcaaagcgcagggctatcaggtggccttatgccatggatgggaagccgccagcgagatcattttggagtatctgagagggggaaccgatgcatgaaggtgatttccatcatcaatctaaagggcggagttggaaaaacgatcagcgcgatcaatctggcctatgcgtttgccgaactgcatcaaatgcgtgtgcttctggcggacaacgacaagcagggcaacacgtccaagttttttcggcctgcacgacgatcaggcccccagcatggccgacgtgctgacggtcaagggcttcccgattcaagaggccattcgaaagacggcctatgatcggctggacgttcttccggcgaatatgtccctgcttcgggcgaacaaggaaattctgctggactgttccagaccgcagcaaacccgcttgcggaaggcgctgcgggaagttgaaagcgcatacgacatggtgctgattgacaatgcgcctgatctgaacatgagcgtgatgaacgcgctggttgcctcccatgatgtaatgattccgatcaagatcgacaattttgcctttgacggcgttcgggagattctggaacaggtggaggcggtacgggagttcaacgaggaaatccgggtggcgggcggctttgtgaccatgtaccagaggaacaacgtcaatgcgcagggcgtggagcatttgcagggagcggacggcctgcccatgttccgaacggtgattcgaaagaccgtcgcggtggatgaaaccacctttgccggggttcccctgctgaaatacaacgagcgcagcacggcggcgcgggactatcgggcgctggcggaggaatatttgaaattgtgataggaactagcacaatttggcgaaggggtcagcacaggccaaagcccacgacccgccgaaggcgagggggcaggccgcaaagaagggtgcgcagcaccgaggacgaggacagcccgaagggctaccgcagtccgaagcccacgacgcgccgcgggcgtggggtgggccgcaaagaagggtgcgcagcaccgagggctgaggacagcggcgcagccgctccgcaggcccgaagcctgttacccactgaaagtgagggaacaggccgcaaaagaagggtgcgcagcaccgaggactgaggacagcggcgcagccgctccgcaggcccgaagcccgcaacccgaaggggagcgggccgcaaagaaaggagctttgccacatggcgaaattcaacatgaacgatcttttgaaccggcaatccaaaaacgaaaacaggaaggacggcggctttgaaatcacaacgattccgttggatcggatcgacccttcctccgccaacctttacggcatccgggaaattgaagaactggcggccagcattgaaagcatgggacttctgcacaatctggtggtgcggcggaaagagggcgggcgctatgagatcatcagcggggagcgccgctaccgcgcctgcaagctgcttcgggacggcggaaacaagaactttgagacaatcccggcaaaagtggaggacgcgcaaagcgacgcgctggcggaactgaagctgatctttgccaacgccaccgcccgggaactgaccgattacgaaaagaccgtacaggcccagcggatgaaggaactattccggcagcttcgggcggagggatatgagatcaggggacgtttgcgggagatcgtcgcggacgtgctggacgtttctccggcgcaggtgggcaggctggaaagcgtttccgaaaggctgattcccgaatttaaggaagaactgaaaggcggaaacatcggcattaccaccgcatacgacgcttctaccctgccggaggatcagcagcggcagacgttggaagcctaccggcagcagggggcggaggcagtgaagcaggctgtcaggcggaaaagctgccgggaacgggtggaggaagcattttccaagcgggtctgttcgtttggcgggacgtgcggaaacgccgccgggatcgccgcccacgtaaagaatggcaatctggaaggctgcgccgggtgctgccagtgctgcatcagcgcgaaggacggttcctgtgctttcgtctgcgaagccgtaaagaagcagaaggaagcgccgaggggcgaggacggcggcgcaggccctgaagcgaaagccgcgtggccgcagtccgccgagggcgaggaaggcagaacggtcagcgggaatgcagggcagagtcagccggaacgagctgccttcgttatcacgccggaggttccttccggcagaacgtcggccatgaaacgggcggcgcagcagcttcggacggtcgcagaacggattccctatgatgcgtcctgcgaaaccgaagacggcgaagagatcaatatgcgaagggtttgtcttcatgccgcgacgctgttggacggcaaagcctaatgaaaagagggagggatttaggatgaaaacggaaggcgtgaacagagcggtgaaggcggcgattcaggaggccgtcagcactgggctgaaagccggggttctctatgcggagcgaaagccgaaggacgcttacaaggacaccgagaagcggctatatgcttatccgcttctgatgaaaaagatcgtagaggacaaggcgcggcttctggacatggagcagaacggag

SEQ ID NO: 1532 - DNA, 5919 bp, Unknown
  16S sequences of unknown bacteria
tttcttttacaaagaccgccggatcttcgatgtcctctgggtcggcaagtgccggatcggtatcctcgataactgtcttttccggttttctgccatcaaaaagggtgtccagccatgccgcgccttcacgcacggtcagagggcaggtatctgcatatgccttccggaagcttcctgttgaattttcagacaatccaaccactccgtagtatatctgcaccggtgacggcatcgccgcaaaaatcggactgtccttctcctttaaaaatgcccctacctgccgtgggtcatctgccgtgagcactttcccgtcctccataatgaccacccgatccgaggcatgaaaaatatcctccagccgatgctctgtgatcaggaccgtcgtgcgcagctcccggttgatctttcgcaccgtattcaaaaagtccgaagccgcaatcgggtcgagctggctcgtcggctcatctaagataagtacatccggctgcatcgccatgatcgaggcgaggttcaaaagctgtttttgtccaccggataactccgtcacctttttgtgaaaccagccctggatgccaaagtagctcgccatctctgccacccgcagacggatcgtcttctggtcgacgccgaggctttccagcccgaaggccagctcatgccagaccttatctgtcacgatctggttatccggatcctgcatgacatagccgatccgggcactttgctcacgcagcccgacatccccgatcggagtcccgtcaaaaagaatctccccggttcgcttcccgtgtggggtgatcgcacttttcagctgccgcagaagcgttgtctttccacagccgctccgcccgcaaaaagtcacgtactgcccgcgctcgatcgtcagattgatatcatcaagtgctttccggcctcccgccgtcgggtaggaaaagctcagatttttgatctcaaaatgtgccatttcaattcctccgtaagattgatcccagccggaattgcaagaaacagcgcatacgccgcaactcccgctatcgtataaaaattaccaggcccggcgattgacaatcccggcgtatattctgcctgcgcgccgccctgtaatgtacaaaagccaagcaccagaagcagcccagccatcccgcaaagcatcagacgatcccgtacctcgaaccggtaaatggaaaagctcgtccgcttcctgctacagccgtagccgcggctcctcatactgtccgccgtcgcaataccgccctccaaagcccatgaaagcagcgccgagagcacaatcagaccatgcctgatctgttccgtggttttgccctcctttgtgcctttcccgataccccggcgcgcagcaaaaagctgtccggcctttttctggtaatttggcacgagccgcagcaccatcgtcaggacgagcgaaacagacggggaaaaacgcccgaacagatataaaaatttatcctctgtcatctccgtattgtaggaagcaaaccagagcagcaccgagataaacatccctccaagcgccatgccgtacaaaagtgcctccatggtatacgggcgttccgggatcagatttccgatgtgccacacaaacagcacccgatccccatacgtattaaagacgggattcactaccgcaaggaatataaacagtggaagcagtccggataaaacatgccaggcagcacgccccttcacaatccggtagtgcagcgccgcaaaaaacacagcgcacagaacaaacgccgggtggagaaagaacatccctccgacgagtgccccgatataaaataaaaaattaatgagcggatgatattccgcaaatgcatcacgattcatgcttcttctccgcacgccgcaccagcaccagaatgagcaggcagaaggcagccgcaccgccgcccgctgcaaacggccataccggaaccttccgttcttccttcccggatgcatccagcaggcttgccgtatcacccatcatgcccgcaatgccatactcagaaaactccgatgcctggaagacaatgtcacttccggaaatttttccatctaagaattccagagaaccatcctccttccggtggacgacaaccgctgtctcatagtcgccaagatccaccatcggcagctttacctttacgagctgctccggctcccagccctcgccgtcaagcgtattgacaaaattgatctcactcatcgaaaaaatttcgctcttttcgccgagtacctccttgatcttctgctcctgttcttctgtgagcagctgtgggcgtaccgagagctgcacataccatggaagtgcatcatctgcattgtcccgcaggtctgtcccagtcgattcgtcatagtgatagcgtgtgccaaggctctccaaggctttctcaaacttcggatagcgcggggactcctgtactgccttctgctcttcttcactcagtgccgcatacgcctgataggtgccggtcagggctgcgatctggtcctgcgaatagtcatctgcggaagacgggagcctttttagcttctttgtcccgtgcaggatatctgcgatctctgaggttaccttcctcgcagccaccgtccataccgtgcctgcagtggatgtttctgcgtggaccgctgtagtgccaccggtgcgttttccagcttcgcgctgaataactttgccctctgcatcggtctcactctcgccttccttttttgcggaagcgccgcccgctttcgtggaagtgctgccaccggacttcgatgccgtggtgccaccgcgcttcccagaagagaggttgacggattttgtggaaccggacggctttttcgtcgtattgtcattccctgtaccggagccgctgccggaggatacgcctgctttgagcttttgcagctcctttagcgccttttccagcacacggtaattgccaaccttcgcctttaattcctcacttaaggaattgtaggccgcgttcgcctcggtgatctgtttatctttatccaacgtcacctgcccgatcgcagaaatgagctcctttacatgcgacacctcaagctcatcagcttttgccgatgcctgctgcagggccgccttttcctctgatgtaaccagagccttctgtgtctcattcagtgagttataaagggaaatcaccgcgcgcacggaggacacattttcatatgccatctttgagactgccggaagtgctttgatcaacctctgcacttcttccgttttatcatagtccgacttcaccgccacatcggtcatgtcatagagccggttctgcccgtttttatacctctcataggccgtcagtgcatagtaaccctgctcggtcgccatctggttcatcgtaccggaagagagatgcttaaagcctccgcctgcaacagaaaacgaaagcagaccgtctacaacggatttcccgtttttgataaaccggctgtcggtattcgggtcgatcccaagggaagagagtgccacgatgacctgtgagcagctctctgaagtgctcgatcctccggatgcatacgtgccatcggaaagctgaaggtctgagagacgctgcagcgccgcatcgactgccgcctttacctgcgcattgctgtcataatacggggatagtgcctgaatccccataccggtcaggtccggatccgccacctggccggacatcgcccagccgccatcctgcgtacggtgatcgagaatatactggatcaggttctgccgcgtcgtctgcgtcttcccggctgccgctgtcgggatctcatagttatgggaatcaaacgcgatcagtgcaaacatcgcgccgtttacgccctgccataccgtctggtcaaaatccgataacggctctaagaggttgtagccgccgacgttcgtggcatcctcaccaagtgctgtcagtgccaggatgacgcgggagtattccgtgtatttcttctcatggaggatgccctttttctcctttacctcctgaatgacatttgccttatactggctgtatactgaagcatcgacctcctgcccgctccgcgcaagtcctaaaatctgccactccccattgatcgacccgatggacgggatcgactgcttcgccgacccggcgagctcctgcccggtcgaggtgtaggcatccgaaatctgtgccggggatgcatagagggcgatgccggaggtcacttctgaagaagcttctgtagagagttccgtttccgtctcaggctcaaattcagtctcactttccagctcagatcccgattcactttcatcctcagattcttctatattatgtccctgattatccttatcacgagaggctgactcattttctgtagccggtgcatcgtcaaccatgtcagctttctcgccattttcctctgtgctcgcatccgtcttctgctgactactatccttgacatcatccgacttcttctgtccgtttgtatctgtacactccttctcatcatctgcaaatttcacaagcagcaccgcgcgcacgcccatcgtcccgtccgcgccgagcacgccaagtgtgatctccgcatacatcccatcctcatcagtgatgccgtagactgtgcgctgctcgacgctcatctcagatcccttgaaagtaaacttttcaagtgggagcgtacaggtgccatcctgcagctgcagcgggtatacgcccacaccggatacctgcgccgcactataaagcgccgtatcgccatccaaaaggtacgggcagagctgccacttgctttcggattctgtaaaatatccaccccagcgtgcaaagaataaaagatctgtcaggcccgtcccgcagtcctttcctgtcttctgcaccaaaagctgcagggcatccgtcccctttggaaccgtcacctgaaaaacgccgtccgcatagtccaccggatgcgtcgtcccctggcaggtgatctgcgccggtgccgaaaccgcagagaccggaagtgcagtgccatcctttgtgcgcacggtaaaggaaagtgtctgtgctaacgccgggtctgtctcaccggcctgacccttctttttatcttcatccttctttttgtcatccgcttcagagcctttttctgaatcagacttcgtttcggtagttccggcttctgtgtccttcttatccgtcacgtcctgaccggaagcctctgtcccggtctcggaacctttttctgtaccagcgccggtatgatcggaagtctcgcctgacgtcgtttcttctgacgcatgttccgcacctgcagccgctttgtctttttccgaagccgccacagatgattcctgcgcgccttccgtagcagatgtgctgccagcttctgcaccggaggtctgtttttcttcttctgccttcgcagccgcttctgtctcttccgcagttgcttcttcctgcactggggcctgtgtctcctttggtgcgctctgtgctgccgtctcggcttcttttgctgccgtctcttcctgtgcctgtgtcgctgcctcttccgcctgcaccggatacagcgacaggctgaccgccagcgagcatgccatcgtcacattcaacagccgatataatcctttatactttttcatactgtcttcacctgccctccatcagcccataccgccaccgacgtctgcgccgaggccgttgcacgtatacgtccagacaatcgtatcgccatcctccagatagtaggaagaacagccatagtttgggaaccagccgtttaccttatacatccatccggactcgttgccacagtcaaattcatacaggttgttaatgccttcgacgtagtagctgttgtaaagcggtgtccacgatgcctccatctggatgcccgcgtaagagcagacgcgggacaagacgtcatagaccgtctctcccttttcaaattctacggtactcgtgctcagga

SEQ ID NO: 1533 - DNA, 5389 bp, Unknown
  16S sequences of unknown bacteria
gtccctgcgacgattgagtggcagcagtgcctcctgcacctccacttttttgacaaactgagcccgcccttccgcatggaaaggcgggcttttgggatttcccttagatttgttcaaacaagagccgcatcaggtcggtgccgtccatcagcacgggttcggactccatctcccgctcgcagaacttgcgcaggggcgcgcggccgtccttttccagcgcctttttcaccgtgcggctgtcgtagatagcatagggcacgggcgcgccgtcgtgggtgcgggtggtcagcagggtgggatggtcgctcaacaccagcaggcggaagtcctcgccccgcatggtcagctcgtccagaatagggccaacgacccgatattccacattctggatggcttccagcttgcggcccagatcgcccgcgtgagccatttcgtccggtgcttcgatgtgcaccgcagcaaaatcgtccccgtcggccagcgcctgcagcgcgcaggctacttttccctcatagttggtgtccagatcgccgttggccccttccacatggggcgttttcagtccggccagaccggcgatgccccataccagcggaacggcgctgaccaccgtgccccagtggccgtatttttccttgaaggagggcagttccatggccgtggccgcgccccagggccagatcatattggcgggcagcttgccctcggccacccgcttctgattgatgggatgatccttcagcacttcatagctgcgcagcatcagggccttgatatcctcggccatcttccgggcggcagcgtcgtcggtctcccgcagcagatggggcagatggggctcgacgggctgttccagcacgttgtgaggctcggtcagccgcacggcggacaggtcgtgcgcgtccgttttcatcacgcccacatggcggaaggtatcggtaacggtgatctccagccccgcgtccttctgcatcgccgcgaaggtgggatcggccagcaggtcgttcatcagggtgacggcctcctgcccgtggatattgccgccgttgtggctgtggatgaccagcgcgccgctttcgtccggcgtgacggcgcacagattcacccggaagctgacgcagccctgaggcaccttcacgcccatgcccgccgcttccagcacgctgcggcccgtgtaatacttccggggatcgtagccaaaaatgctgagaatggcggtgtcgctgcctgcgggcaggccgtggggcaccgtcagcgcccggccgcaccagcagcccgccgcccggtcaaaagcgttcagcgccagcgcctccagcggcgttttgcccgccagctggggcagataggtatcggccatgccgtcgccgatcacaagcacatatttcatcaggtttcccttcctttcttctgtcccaaacagacctactgcgccacccggataatatcgtcccgcaggcggtagatggtcgcgccgtactttttgcggcagaaagcgtccacgaaccagtcgatcttcttcaccgcatcgaactgcaaatagccgtagcggatgccgttgcgcttttcgcccttcatgttgctgtcgcaccagcggacggtgtccgtgtccgggtcgtagtccgcaatgaagatcatgctgtgcgcgcccacgccgtagtaatagttggcggccatctggaaatagtcgcccttctgcacctgctgaaggaacgcccgcgccttctgccggttttcctccgcgctcagggacgtatcgtagcggaaggatgccgccgcgtagaagggattgccctcgctggcgggcacatccttccattccacgccgtacacgtagtcggtgcattcctcccggggcttattatccgggattttcaggggcacgttgggaaattccgccatacggaacgtccccgcgttggcccggaaaagatagacggtgtagtttttgcacacataattgctgctggcatactgggcctcatgcgccttgccgcccgcctgttcgtattccttctgggccatggcaataatcccgtcgataaaggcctcccgggcggcgggatcgcccccggcggacgcgttgcccacgggcggctgggtctcggcaggctccgcggtttcggccgcttcgggaatctgggcctcctccgtatccagaatggtcagggtcacttcctcgtccgccagagcggggagcagcgcgccccagatcagcagggcggaaaacacaaggcacaggaacgctttctttcgcattcgcaaatcctccttcattcagcggtcagtccagtcccagcttggggtagacctcgtccacgtccagcgtggcaaaatagtccctgggggtctcggcccggcggatcagctggaacgagccgtcctcccggcgcagcacttccttgcagcggagcttgccgttgtagttgtagcccatgctcaggccgtgagcgccggtatcgtggatcaccagcacgtcgccgacctccgccttgggcagcagccggttgacggcaaacttgtcgttattttcgcaaagactgccggtcacgtccaccagctggtcgtggggcaggtcttcccgggcgggaatggtgatatggtgatacgcgccatacatggcggggcgcatcaggtcgcaggccgaagcgtccagccccagatagtgccggtaaatgttcttttcatgaatgatgtgggtcaccagccagccgttggggccggtcatatagcggcccagttcggtcttgatggctatgccccgaatgccccggcgggtaaaggcctcgtcatattcccgggccacgcccgcgccaatggcctcgatatccgcctccggcgcgtcgggcagatagggaatgccgatgccgccggacaagttgatgaagctcagggtcaggccggtctcctccatcagttccacgcccgtctcaaacagcagccgggccagcgccgggtaataggccgggtcggtggtattgctgcacaggaaggaatgcaggccgaagcgcttggcaccgcccgctttcagctcccgcagggcctgagagagctgcgcccgggtcatgccgtacttggcttccttgggctcacccatgatctcgcccgccacggtgaacgcgtcgcccggattgtagcgcaggcagacttcttcgggaatgccgccgttatcccgcagggtggccacgtgggtcgcgtcatccagattgatataggcgttcaattcccgggccagccggaactcctccggcggcacatcattggcggagaacataatgtcccgcccctgaaagccgcaggcgcgcaccagcatcagctcggtcatactggcgcagtccacaccgcagccctcatccttcaaaatgcgcagaatcgcgggggtgggcagcgccttgacggcgaaatactcccgaaactccggcacgcctgaaaaagcggctttcaggcggcgggcggtgcggcggatggccgcctcgtcatagaggtgaaagggggtctggtactgctgcgccgcggccagaaacacctgaccgggcagggaaaaattgggcataggcagcatcctttctttagcaaaatccccgccggggacgcatccggcaggtcgatgtcattgtagcatagttcaccgggaaataacagccgcgaaatcctgccaaacagaaaaaaatcaaccggccgaaacggaaaaacatccccttgcccttcttccgtttttgcactataatttttaagtcccgacagaataacgagggggtaaagcagacatggcggaaaaaccgcagtgcgtagtcattttggactttggcggacagtatacccagctgatcgccaggcgagtaagagaactgaacgtatattctctggtgctgccctacacggcgacggcggaggaagtacgggcgttggaaccgcagggcgtgatcttctccggtggcccggccagcgtattggatccggattctccccgggtagatgaagaaatttttcggatgggtgtgccggtcctgggtatttgctacggaatgcagctgatggcccatctgcacggcgcgcccattgaacgcggcgcgcagcgggaatacggccgcaccgtcatgcaggtagacgatgtgcacgatcccctttccaacggcatgagcgcttccagccattgctggatgagccacacctatcaggtgaagcagccgccggaaggcttccgggtgctggctcacaccgcgtcctgcccggtggcggccatgggcgacgatcagcgccggatgtacggcgtgcagttccaccccgaagtgacccacaccgacgagggcacccgccttctggaaaacttcctgatggatatctgcggttgccgcggcgactggagcatggaagcctacattgacatcgccgtgcgccagatccgtgagcaggtgggcgacggcaccgttcttctgggcctttccggcggcgtggacagcgccgtggccgccgcgcttctctaccgcgccattggcaaccgtctgacctgcgtgtacgtagaccacggcttcatgcgcgccggcgagagcgatcaggtggtggacattttcaccaagaccttcccggtggagctggttcacgcggacgcgtccgagcgcttcttcgccgacctgaagggcgtgaccgatccggaacagaagcgcaagatcatcggccgcgactttgtggaggtcttcaaggaagaagccaggaagctgggcaagcgcgaccattttgcccagggcaccatttatcccgacgtgatcgaaagcggtcaggtcaagggcagcgcggtcatcaagagccatcacaacgtgggcggcctacccaaggagctgggctttgaaagtctggtagagcctctgcggatgctcttcaaggacgaagtccgccgtttgggcgtagcgctgggtctgcccgagagtctggtctaccgtcagcctttccccggccccggtctggccatccgcgttatcggcgagctgacccccgaaaaagtccgcatcgttcgggaaagcgacctgatcctccgccaggagatcgccgaggccggctgggacagcaagatttcccagtacttcaccgtcctgaccaacgcccgcagcgtgggcgtcatgggcgacgagcgcacctacgcctacgccgtagccatccgcgccgtcaccaccgacgacttcatgaccgccgacgtggcccaactgccctacgacctgctcggcaagatcgccacccgcatcgtcggcgaggtcaacggctgcaaccgcgtcctgtacgacgtgaccaccaagcctccggccagtattgagtgggaatgagaaaaaagtgaatatgatgggcgaaaagccttgaaaacactcactttttgaaaatctcattcctcatttgatagcaa

SEQ ID NO: 1534 - DNA, 32759 bp, Unknown
  16S sequences of unknown bacteria
ggccggacttctccctttatgggaaaaatccgaccttgttactcaaaccaatgtcataatctgaaaagtcaaatttgacatcacactcaaaccttgttacaaatatattatatatgatgaaaagggggttgtcaagtgataaataagttttgtgaatgttgaagatgtggtttttttaatgataggtttacatttatttcaaaatatggtgaaagccgcaccgaacagtgtataacttgcttttagagtgaggatcgctttttggaattttgcatttaaaaattatttttaaacctgtttctgtattctttaggcgaggtgcctacgctctttttaaacattttatatacataggtggcgttatttattcccaaaagctcagacatttcttcaaccgtaacattgctatgctcaagcatatattgcatagcctttatttttaatttcgtgcggtattgcacggggctttcgcccaaatattttttgaaatttcttctgaagcccgcgctgcttatattgcacatagcggcgatttcctctaaagaaatatcgttaaagggatcgcgctcgattattttaattccctgcgctatggcggaatagtctcttgataaggctttggaattgcccttgcccaatatagtgagcacctcgtacacgcttgataatatgtttacgggggatttaataggctcctcgtaccgccttaccacctcttttatggcgtgggaaagcgccgatgaaaagggggtggttatcagaaaggggtgcggggaaaaggtgtaaagcttatcgtcttctttaatatgaaattctattaaataggcgtcctgattggaaagaccgcaatcgttattgaaaattgtatagttactgccctcgggcaggcagacgatactgttttgcgaagcgaaaaatgaagtgccgttttcgtttaaatcagtgtatatgccgttgcacccgtttaaaagaataattccgtttattcttctgtggctgccgttgctgtaggtaacgccctttacccatttctggcgctcggcgtgaatatcggttacttcaatattctttgagtataaatcctcaaatgtaatgagatcaagcccctgcatattttttctccaatcgcgtaaaatgctttgataactgaattataccacagcgacagaagtatgtaaagctgttttgcatattatatgtgagcgaaaagtatagtaaagtgtgctgaaaagtttatttacagccatatataccggggggtataattaagtaaaattcagaaattgggtgtttatatgaaaagagtgaaaatatcggaattacttgaattttcaaaggctgctttaattaaagcgggcgtttccgaagaaaatgcggcgctaaccgcggaaacgctggtaggaaccgatatgttcggggttttgacccacggaacaaaaaacctgcccgggtacatacaaaagatgaacgcaggcgggcttgacccgaaggcagagccgagcgtgctgtgcgagggtccgtcattcgccgtgatgaacgggaacagggcggttggaatggtatcggcttataaggcgatgaagctggcgataaaaaaggcaagggaaacgggaattgcctatgtaggggttaaaaacagctgtcatttcggtgcggcggggtactatgccaatcttgccgcggcagaggggcttatagggctttcaatgagcaataccgacccggttatagcagtgccggggggctgcaaaaaggcaataggtacgaatcctttctcctttgcggcgcccgacggaaacggtaaaagtatttttcttgatatagcgctgagcaatgtagccgcgctcaaggttattatggcaaaggaaaaagggcaggaaatacccgatacctggcttgtggatgaaaagggtctgcccacggcggacgcctcgctgtttccgcaaaacgcaagcctgcagcctatgggggcgcacaagggctacggcttagcggtattggttgagcttttatcggcggttataacgggcgccggaatgttaagcgaggtggcaagctggaatttggacctttcttctgtaaataacgtgggtcacgcgtttattgcaatagatatttccaaaatgatgcctgccgatgtatataacaaacgtatagcgcaaatggctgacgagctgaaaaacgcgcccctggcagagggcagcaaaagaattttcctgcccggcgaaatggaatgggaaaagcgtgaaaaggcgcttgcaagcggtgaaattgaaattaccgacgcgcacgccgaggggcttaagggcttagcggaaaaagccggtacagcaataaatattttttaataagaggtaatgaaaaatggataaaacaatgtacggtattttaaaaaccacgggaatttgccctattatggtaaatcccgagcttgattttgcagcggacgcggcgcacgcccttgcggagggcggactgccggtgtgcgaggttcttttgcaccgcgatgaatactcgcttgaaagaataagaagcattgcgaaaaatgcgcccgaggtaattgtgggcgcgggctcggttatttcgcttgaggacgcaaagcaggctgccggcgccggcgccaagttttttgtggccccggggcttgtgcccgaggtggtagagtacgcccttaaaagcaatatgcctatactgcccggttgcgttaccgcaagcgatatttccatagccttgaattacggcataaacgtgcttaaatttttcccggtttaccaaatgggcggggcggagaccctggcgcagtatcacggcggaccgttcggcaaggttgaatgggtggtaacgggcggccttaacggaaagaactttttaccgtttgcgggaattgattatgttttagcgtcgggcggcgactggatgtttgccgagggcaacgccgtaaacgaaaagaattacgataaaatagtgcttaatacgcgcagaacaattaaggatgtgctggagctcagggcagcgaaataatacttcaaagaggtaattgcagatgtcttcaattcagtttgattttaaaaacaaggttgcggtaataaccggcgccgaaaggggaatcggtcttgcaatagcagccggatttgcaaaatgcggggcggatattgtaatagccggaattatggatgaggaatttgaaaacgccgagagaataataaccgccgagggcgcgaagtgcctctgtattcataccgatgtatcggatgaaggctcggttaaagcggcagtagcgcttattaaagagaaattcggcaggattgatattcttgtaaacaacgccggaataaacaaattagcccccgccgaggaaatgccgcttgaggtatggcaaagaataataaatgtcaatcttacagggccgtttcttgtttgccgcgaggcaggcgcgcttatgattgagcagggcgggggcaatatagtaaatattgcctctatgtccggtttgattgtaaacccgctgccgcagcagcagtgtgcatacaatagctcgaaggcaggcgttataatgctcactaagtgccttgctaatgagtgggcaggtaagggtatacgggtgaacgcggtttgccccggctttacaaacacgccgcttaccaaaaagcggcttgaaacgccgaacgatccggctgttaaaaaatggataggcggcaccccgatggacagggtggcaagccccgatgaaatggtgggaatagtgctttactacgcaagcgaccttgccacatttacaaccggcacctgtattccgatagacgggggatatacctgcctttaattcaaataatttaacggagagagaccaatgaacagtataaccgatacattcaaaatatataacggtgccgaaataccctgtatggggcttggtacctggcaatcaaaggatgacaccgcaacggctgcggtgctttcggcgctggcgctcggctaccgcctgattgataccgccgcggcatacggcaatgaaaagggcgtaggcgcgggaataaggcaaagcgggcttaaaagagaggaaatttttgtaacaagcaagctgcgcaatgccgaccacggctacaaagcaacgcttgacgcgtttgatttaactatggaaaaattggggcttgaatatcttgatttataccttattcactggccgaaccccgtgcagttcagaacgcactgggaggcggcgaccgcaggcacatgggcagcgtttgaggagctttataaaaagggtaaaataaaggcgataggcgtaagtaattttatgccgcaccatatagatacccttatgaaaacggcaaaaataaagcccatggtaaatcagcttaaattatgcccgagcgttacccagcccgaggcggtggagtattgccgaaaaaacggtattgttgttgaggcgtacagcccgtttggaacaggcggtatttttaaggtggaggaaatgcggcggctggcggataaatacggcaaaacaatagggcagatatgccttcgttggtgcctgcaaaagggttttgtttcattgccgaaatcggcaaatcctatgcgcattaaggaaaatacggaaattttcgattttgagctgacggataaggatatcgacctgatttcaaacctcaaggggtttgttaccgatattccgagacctgatgaaattctgttttagctatgagaatacttaataaagaggcactgacgaatcacggcgataaagagggcagaaaaattgttgccgagctgctggacgcggggcttgattcgatagatccgtattacagggtgaaaaattttgttaagcttgaaaataataaaataattcttgacgaccgcgggtatgaaatggcaggcgacccgcacagcggcagagccgaatatgatttaagctactatgacaggattttcgtaataggcgccgctaagggcgtgcagagggctgccgccgcgtttgaagaaattctgggcgatcgccttaccgccggccatgttatagcaaagcacggcgaaagggttatatgtaaaaaaatcggcgttaccttggcggggcaccccgttcctgatgaaaagtgccttgaggggtgcagggctattgaaaggcttaccgaagacctgaacgaaaaagaccttgtgtttacaattttcggcagcggctgcggctcgctttttacataccctgccgacggcataacaatggctgatatatccgcttttacccatatgatgcagatagaaaagggcgtgcccacaagcgagcttaaccaaatacgcacccatatagataaattcaagggcgggcggctgctcaggaaaatgatgcccgcaacggtggttaattttgtaacggctgacccctcaaaaatgaatacccccgttttgcgcgtttcgtactttgaaatgctaagaaacaacacatttttccccactgtggcaacggcctctacctttgaggattgcataaaaataattaaaaagcacgatgcgtggcaaaaaacgcccgagtctattaaaaaaaggcttgtttcaggaaacagtgaaaacgaaaatatgtcggttgaggaatacgaggggcttaattgccgctttttcgggcttatttttaaaaacagcaccgtttaccccgcggtaagaaataaagcaaaagagcttgggcttaactgtgttatgctttcggaatatatgcaggcggaggcgcgcgaggcaggctttgccgatgcgggaattgcgcttaccgcaaagcgtatgggcgagccgtttaaggcgccgcttgtgcttatgtcatcgggtgaaaatgtggtgactgtgggaaaagaaaccggcgtgggcggcagaaaccaggaatactgtattgccgcggcaatgtatatttcgggggaaaggggcgttgttttcggtgcggttgataccgacggaacagacggtcccggcgggcttaaaataagcggcgcgcccgagtgtcttgcgggcgccgttaccgacggatataccttaagcgaggcagaggaaaaggacgtcaatttagagcttgcgctcaaaacccacggaacaagcgcgcctctgtggcagctggggtgcggggtgagcgccgaaagctgcatatcggcgctggatttaagaattatatatatcggcgaataggaggaaagggttatgtctactttaataaaatcggttaaggcgcgccaggtttactcaaacagaggtaagccgggcgttgaggctgtaattaccactgaaaacggcgctgtggggagggctatgtgcacatcgggtgtatcggtaggaacacacgaggttgattttgcgtttgacggcggtaaaaaattcggcggaaagggcgttcggtgcgttgccgaccgaattaacacaattgccgcccctgcgcttataggcgttgataccgcaaatcagcttgcggcggataacgcaatactgaatataggcggaaacggcaaggaagccttgggcggtaatgcaacggcggctttatccgccgctgttttaaaggcgggcgcggcggcgctgggtattccgctttaccgtcatataggcggcgcgggggctatgtatcttccggttccgggcgttgctatggtggcgggggatgaacgctacggtggcggaataacaacccccggcggcaagcctacaatgtcggttatggcgttcggctttcacacattttccgaagcctcatacgcctgctgggaggtacacacgcgctttgccgagaaaatgaaaaggaaattcggcggtttgccaaatataagggactttatatctgtgcccgccggaatttacagctccgataaggaaatatgggaggaaatgctcagaaccataagcgaggcggggtatgagggcaaaatgggctttcaaatggatgtggcgaccgatacataccataacaaggaggacggtaaatactacggtctttttgataaaaccccgaaaaccaaggaacagctgtatgatttttatatgcagataataaaggattacccctttgtaataatagaggacccgttcaatgaggacgattacgatacaactgcggcgcttacaagggaaagcggaatacaaattgtgggcgacgatttatttaccaccaacccaaagcgcgtggcttacggcatttcaaagggcgccgcaaacacggtattgctgaaggtaaaccaggtaggcactatttcggaggcgctggaaatgattcagtacgcttataaattcgggtatgcggtaatgccctctgacagcaggggcgagggagcggctattgccgattacgcggtaggtataaacgccggctcggtaagggaaagcgccataggcgaccgcggcaacagattccttgaaattgaggaggagctgggcaaaaacgcaaggtttataggtgcgaggggtcttaaaggcttcagaaaccggcaaagagccgatgaatttgaaaggaacaggtgatagggctttatgaaacagtacataaacggagaactggttgagggcaagggcattgtgaacgatgtgtatgatcccgcaaccggcgaaataatagaaagctttaagggcgccacaagggagcagaccctggaagcgcttgccgctgccgatgaagcctttaaggtatggtcgaaaacgccggtaaacgagcgcgccgagtggctttacaaattaaaggctgcctgcaccgccgaaagggataagcttatagaccttgtttcctttgaatcgggcagaccctatgccgccgcctgcggcgatgttgattggctgcttataagcctttcatattacgcagagcaggcaaagcgcatagaaggcactgttttaccctatcagggcagtgggaataagccgaattaccaaatagtgacccgacagcctatcggggtgacggtggggcacattgcgtggaattaccccctcggcaatgcgagcataaaattagccccggctattgcctcgggctgcacctgtattataaagccttcaagcgaaacgccgcttgccacgctttatgtgggcgaaatagcggcgaaaatcggttttccgaagggcgtgcttaatattatttcagggcctgcgggcgaggttgccgcaacgctcaacgaaagccgtattccgcgtatgataacccttataggctcatatgagaccgggcttaagcttatgcagcaatccgccacatcgcttaaaaaatactcgctggagctgggcggcaacgcgccggtagttgttatgccggacgccgaccttgacgatgttgcaaaaaatattgtggctaaaaaggtaggctttgcggggcagacctgcgttaattacaaccgaatttacatacacagaagcatttacagcgttatgtgtgaaaaaattgcggctgaattatcaaaggtaaagctcggtaggtataaggatgagggttacattatgggtccggttataaataaagccgcaagagacagaatgacagagctgatagacgacgccgtagccggcggcgcacggcttgttatgggcggagaggtgcccgaggaattttcaaagggcagctatataacccccgcgctgcttacagacgtaaacgacggtatgcgcgtgtcaacagaggaaattttcggacctattattccgctgcagccgtttgataccttagatgaggctattgaaaaatccaataaatccattttcgggctttcggcgtatttcttcgggcataattcccgggaaatgagcaaatattttgaaaatgttaccgccggagaattttttgtaaacggcggcggcggaacagagttttcaccccacgcgggcgcaaagcaatcgggtatagggtgcgataaatcaaagtggtctatggaagaatattacgacattaaatttatgtctatgataccctgacaggtggctttaatggagaagaaatacgatattataggaatagcgaacccggggcaagatttggtggtggagctgccggaaatgccatataacgccgtaagcagcaaaatgtatgattgcagctttcggggcgggggctgggttgccaccgcactttgcgcggcgggcagcctgggcgctgaagccgcttttttaggtatagtgggcggcgatgccttcggcaggcttataattgatgattttaagttcaatagggtagatacctctcatatcattgtggaaaaggataaaaggagtaacttttgcatttgcataaccgagcgcagcaccaaatcaaagcatataatctcccgcggcggcgagctgcgcgaggtggagccgaaggatattgatttcgattttgtaaggtctgcaaaaataatgcacgttgggtttgtaaacgaggctgtttgtgcggctgccgacgtcattcacgcggcgggcggcaaggtgagcgttgacgcggcgtattacaagccgtatgtttacgaaaattacggaatttttgatatttttatcggctcggaatattattttgacggcgtatgtgcagagctcggcaagggtaaatcgagtgaaatggcgcagcaggaaaaaattgaggtaatgcgttacattgcctcaaagggacccgaaattgtaatattcactttcggtgaaaacggctcgcttggaatttgcggcggggaaagcttttatcagcccgcaatgaaggttgaggtggccgatactaccggtgcgggggatgtttaccacggcgcgtttcttacggcttatttaaagggtatgagcatacccgaatgtatgcgctttgcaaccggcgtttcatcaataaaatgcacaaagccgggcggcagagccggaatacccgatttaaaaacgcttgaaaggtttttggcaacaggcgaggttgacgcggaaaagctggataagcgtatgcagcgttacaaattcgggctgcagcaataaaacaaaacggaggatgagaaaatgctttgttcaatgaaaagtgtgcttgatatggcagaagaagggggctatgcggtcccggcgtttaatatttacaatttcggcagccttatggggattaaaaacgccgcaaaggaaaccggcgcgcctgtaattttgcaaatgtatacaaggctttttgataccggccttgcaaaatatttaatgccggctttaaaggaggttgcaaacgagcttacaactccggttgcaatacaccttgaccacggcgcgggcatgccgcaggcggtaagggcgattaaatacggcgctacaagcgttatgattgatgcctctaccaaagcctttgaagaaaatgttgaaacaactcgggcggttgtaaatattgcaaagtgcggaggcattaccgttgagggcgagttgggtcatgtaggctccgccgcaaacggcgatgagacaggcggctataccgaggttggcgcggcggctgagtttgtaaagcaaacgggggttgacgcccttgcggtcatggtgggcaccgcgcacggaaaatataaaaaagcgccggttctggcaatagaccgcatagccgagctgcacaaggcggtaaactcgcacttggtgctgcacggcggctcgggcgtgcctgacgaccaaattaaggctgccgtaaaagcgggtgtacgcaaaataaactacgcaaccgatgtgtgctgtgcctatatagagtgctgcaagcagcttgacccatacagtgagccgtttgatatgctgctcacccaccccgaaaacgcagtaaaggaatttgctgccgacagaataaggcttctcggcggcgcaaggtaaatacgctttaaaaatacgaatggagctttgattatgctaagcaacagtgtgaaaataggtcttgtgccgcttaggcgcgactgtacgccgcgcccgggacagttcaattgggaaattgctgaaaaaagaggcagagaaacggtggcgtatattgaaaagaactatgccaatgacagtgtttcgtttgttgatttaaagggcgttatcgacgttgaggtgctttggtcatgtaatgatgttgataaggtgacggggcatttccgtaaaaacggagttgacgctgttttccttatcgccgccaatttcggaaacgaagaagcagcgggattgcttgctaaaaaaatggataagccggtgcttttgtggggtccgcaggacgacgcgccggatatgaccgacggtatgcgttacaccgactcgcagtgcgggcttttcggtatcagccgccagcttatgcgtatgaacgtgccgtttacatacattgaaaattgccgcgtggattcggaaaagctcagacacggcgtggatagctttgcaagaaccgtgtgcgcggtgaagaattttataggtatgagaataggtgtaatagggcaaagacctatgccgttttgctctgtaatatgcaatgaggggcagttaatggaggaatttgacattcacctgatacctataaatcttgcccttattcaggacaggtataataaaatttcggaaaaatacccgaaagaaataaaggcgggcgccgagaaaatcagagcaatgtatgagctggataaggtatcagatgagcttgctgaaaagcaatatgttttttatattcttttcaagagcctttttgaggaatttaagcttgacacgatttctgcggaatgttggtcggcattacagcttcttgtgggcgctatgccttgcaccgtttacggtatgcttgccgatgagggctacattataagctgcgaaaatgatgttcacgcggcaatgacacaggctgtgctgaaatcactgtcattcgggaaaaagccgccgcttttcggcgagtttaccattcggcatccagtggatgaaaacgccgagcttctgtggcactgcgggcagtttgcatactctgcaaggaaaaaaggcagcttttgcaggtgctttaatatgcgcgaaaattttgaggcggaaagcgggcactatacggttgccagaatagaccaggatcacggcagatattcggttattgccggcgggtgcgacagtgtttccggaccttatacaaacggaacgtacctttgggcgaggtttaataaccttgatgcatgggagcggaaattgattgaggggccgtatattcaccacgtttccgagattgagggcgactacactgctgaaataaaggaattttgcaagtatgtttcaaatataaaatttgaaacggtataggggaggggctgtatgttaaaaaaattaaacgagcttaacaatattaaaatttacagcgttacagacggggaatttacctcctacggcaaaattattgatattgataccgcggaaattataggggcggcggaaaaattcgatatgcccgaaaatgtaatatatatgccctctgcgccggagtttgaaaagctttctattgcggaaaaattaaaaaacggctgttacggaaccttacccacgcaggtgggctattgctgcggtcacagcaccaggcttaatgcgaccgagtggcattcctcaagtgaaataaatattgccgcaaccgatttggtgcttattctgggtcacgtttgggaaattaaagacgacagaatagattcatcactattcagggcgttttttatacccaaaggaacggcggttgaaatttacgcaacaacgctgcattactgcccgtgtcaggtgagcgacgggggcttccgttgtattgtggcgctgcctgccggtacaaacacggcgcttgaaacggaagctgacgataaaaagctggttgcaaaaaacaagtggcttattgctcatattgaaaacgagggaaagagaaaaagcggagcggtaatgggaattaccggggaaaactaccgcattaaatattaaggaactgtttagacttgaaaaaaataaatgtaactgtttggaacgaatattttcacgaacgaagctcagaaagcgtgggcaagatttaccccgagggaatacatagcgcaatagcaggaaagctttccgcctttgaaaatttcaatgtaagaacggcaacgcttgatatgccgcagcacgggctgacggacgaggtgctcgataataccgacgttcttatatggtgggggggcacgcaaagcacggcgagctgttgcttgacgaacgcaatgatactctggaaataaggcgtttcggtgagaatccgaaattataccattgaaaacactaaccgaaagcggtaatgcacatagcggcgggaaagcggtacaggttcataaataatgaaaaaagttaaaaggagcaaaaaatgccgaaaatattcgatatagattttaattatgaaagaggcacggttatctcacttaaaaaccctgaggataaggcgcatatgaattgggtagagggcaccgaggaatggggaatgattaaaggcgctgagattgtctcggttgaaaaaaacgggaacggtctcacggcggtttacagaacgaagcatttgcttgtaacggtgcaaaggcaaatttcgggggataaataccgcgaaagctacagctttgaaaattaccatgattatgatgtgtttttcaaccgcggggcagtgggcatatatgcaacctttaacgataactacgataaagcgagcatttgtatgacccaaaagtgccacacccacttgtggtgcggcggaaattcatcatatatacgcgccgtgaaaatgggtccgtgtgatttcgggctggggcttgtgcttaccgagggcagccttgatacctacagtattgagcgcgatttaaaggagcaaagcaacgaccgcggagattttattttgcacccaagtgtttttaacctgcgcccgggtgaaaaaatgaatatagaatgggagcttttttggtataaggacggggcgttttgcgcggcgattgagccttatgacagcgttttgctgattgacgcggaaaattacaccgtttattccgatgaggatatagttttttcggtaaatcgcccgaatgtttcggttttaattgacggagaacaagtgccgacagagacaggaaacggcagaacatatgtaaaatacaagccgcagcgactcggtaatcacgatttttgccttaaatacggtaaatgtgagacaaaggcacagttttttgttcaagtaccgtttaaggaattggcgcgcaagcgggctgaatttataacacagaagcagcagttccacagagatggcgactcgcttgacggcgcgtacctgatatacgataatcaggataaatgccttatttacgatgaaatattcagtgattacaatgcttcgcgcgagcggcttgttatgggtctttttattgcaaaatatttgcaatatgaccgcgacaaaaaaatgtacgaaagccttatgaagtattataaatttgtatcgcgcgaattttttgatgaggagagcggcgcggtttacaacgccgttgggaaaaatcctgcaagaaagcggctttataacgcaccgtggatgtcggtatttatgcttgaaatgtataaccttacgggagagactgtatatcttgacagaatgtataagctgctttgcgtttattatgaaataggcggggagcggttttacccaaacggactttcaatgtttgaaacggtggaggcgcttaaaaaagcggggaaaacggaaaaagccgaaaggcttaccgctatgtaccgaaggcatattgataatataataaaaatcggcacctcataccctgagcacgaggtgcgttatgagcaaacgatagtaacgcccgccgttacgctgatagcgcaaatgtatcagataacgcacgataagtcgcttattgaagaatgccgcaagcagcttatgatactggaaaaattcaacggcagacagcctacgcattatatgaacgaccttgccgtgcggcattgggatggctactggttcggtaagcgtatgctatacggcgatacatttccccactcggcctcaattcacagctccgacgcgtttttgcactattatatgataaccggcgatgaggaatggaaaaaacgcgcagtgtgtggggcaagaaataatctttcggtttacagaccggatggcagcgcctcctgcacgcggttgcatccgctttttgtaaacggtgtgcgcggcgagtattatgatgaatttgccaacgaacaggacggcttgctttattttatgataaagttttttcatgctatgtaaaatgcgcaaaagctgaacaaaatcaatttttaaagaaaattttccctcagccggacaaaatgaagtgtaccgacgcgggagtgacctgcaagggcggcttgcggtatagcgccgttacggtaacaacgacagacaaatacgaaaggtaacagttgaatattttaagagtcaagcctcggttcacaccgtaaggataacgaatacttctatgccatatcttgaataaaatgaattatgcaagttctacgaccgtctttgtaagaagagcatctccaaaactcctgatttttctttaagcttttataagcacaaaagtgaagcttaaaaccataatcggcaggactatattctaatattgttccgtatataaagcaaatcgatgataaaaatttgtatccgacggctggagaattacaaaaaatcggagcttttttgtatattaaaacaagaacgagcgagttattgttatcgacgttataatctacctgttgacaatgttttatgttatttatataattaaaccattaaattatatggagtggattgctatgatattgttgcgttattacagactgcttgatttaataaacgaaagtaatgttttggatgtatctgagccgttggtagtcaattgcgccggcagggaaaacaaagaagaggtctttcacttgaaccgtccgcacggaagaaaagacaatacattgatatatatgatagagggaacgatgacatacaaccgcaatgacggcagtgtagcaacacttaaaccgggaatgggaatttttttacgacacgataaaattcagaattattacggttctttttcattttactggattcattttacaggagaatgttgcgacagcctacttgataaatttggatttgggcacgaatttatttttgatatcggagagaatgaaaaggttataaggcgatttcacaaaatatttgacgagatgatgttgagaaaaaaagacttcgtttattattcttctctttatttgcaggaaatatttgttgaaataaagcgctctatttcttcctctggattatcaaaaaggaatttgcataagtcgttttcctacatacataataatttttcgaaggacatttcaattgaagaattggcgcgtatggaaaatctgagcgtcagccaataccgtaagctgtttttaaaaacggttgatatttctccgaaaaagtatattgcgtcgctgcgcatatcctatgcggtaaatcttttacagtacagcgatgaagcaatacccgatattgccgcgcaaagcggctatcccgacctttgctatttttaccgtacatttaagcagcttaccaatatgacccccgcagagtgccgaaaggcaaaaaacataatgtgaaattataaaatcagcgccgatgtaccgtttgcggtatatcggtactttttttgaaattttggtgaaaaaatgagcgtttcattcaaaaagtgacgaaacagataattgaaatagcgctttgactgctactataatatttatgtaataactacattttacggtgggatactatgttcgatttatctataacatcatcgcttgaaaaggtgctgccgcgggcgacatataccggcagcagggtgagtgaattttccgcgctttcgggtgagatgatttcgtttcaggcggtagctgccggggacgagggcatttacagctttaaaacggaatatgacggagaggctgaaattgaaagcttttttgtaaaaaacgttgcggttggcttagctgcgcacccgcgcgcctgctccgaccccgattacataagccacgcaccgggaatataccccgatattttagagcctgccgacagggactggatgtatataaacaatatatacaaatcgatctggatacggctgaaggcggaaaagggcttacacacggttaaaatcagcttttttaatgagcagggggaaaaggcagccgcggcagaggcaaaaataaacacgtcagccgtttgcctgcctgcgcaggagcttaaatttacccagtggtttcatactgactgcattgccgattattacgggtatcaaattttttccgaagagctgtgggatatgacggaaaaatacttgaggactgcctacaataacggaataaatatgatacttacgccagttttcaccccgccgctcgataccgcggtggggcacagccggccgactgttcagcttgttaaaataaaaaaggacgggaataattacagctttgatttttcgcttttacaccgctttatatcgctttgccacagcatcggctttaaatactttgaaattccgcacctttttgcgcagtggggtgaagacggagctccgaaaattgcggcggaggtaaacggtgtcgagcgggaaattttcggttggtctactgcgattgattcatccgaatatgataattttctttcggcttttatgccggcgcttaaaaatcagcttaaaaaagagggagtatttgaaaatacatacttccatatatccgatgagcctgtaaaggaaaagcttgaaaattaccataaggcaaggcggacggcgcttaaatatctttctgattgcaaaataatagacgccgtgtccgagcaactgaatggagaaaatctttttgatattccggtaatgtctaccgcgctgcttgcaaaaaacggtatgccgcaggctgccgagcgttggtgctattattgcaatgccgacagcgtaggagtaagcaaccgctttgttgcaatgccatcatccagaaacaggtcaataggtgtgcaaatgtataagtttaaaatacagggttttctgcattggggctataatttttattattcgcgcttttctcttttaaagctgaacccgtttcttgaaaccgacgccggcggcgcctttccctcgggggacgctatatcggtataccccggaaaggaagggcctatgcccgctataggacttgtggttttcaatgaggcaatacaggatatgcgtgccttcaaaaaacttgaaagctacataggctttgaagaaacagtgaaatttattgaagatattttaggcactgtaaggtttgataaatgctttaacgatgcgcaattgcttggcctgagaaacagggtgaattcaaaattgacggagcttgcaaggctaactgaatgagcgttttatacaataagacaccaatattacaattgaaatattgcttttggtaaaatataataataattacaaagagacactgcttttttagggcgaatacaatgcttttttatctttttggggtgaaaaaacataaacctataattacaagaggaaaagtgcagagaaatatgctataataaatacaaacaagtatagtgctttttgtacatcttacatttgtaaaaacgataatgctgcagtttattcgcattgacttgattgcttttaaatcaaacttgtgattggagggaattacacgaggctttaagtgttgtgggcagagaggtaaagcgcggcgatataacgcttattactccgacaaactcgcacaaagtgagagatatagattcacttattatatataatgtgatgttcgaaactgaagcgattgatgtcgaaatgcttaataccatactattaaaaagcgcgaataaattcggtcggcgcttgtcggaaagggagtctgcctatgcgctcggtattcttgaatatgcagataccgagtttcgccaaaagaacaaaaattacgaacggtttatgattgatactgtaaatcaattgctgacaatgtaatgaatgccttgtaaatatgttatgagagcgatttcggttcgctttagcatttttagagggagtttaaagaaaagttcggctgaacgccgcttgaatttcgcagaaagcaataaaaaataacaaagaaaagagagtgcgctatgaatcagaaaaaatgtatgcaaacggtttcgctttttcttgcggcaactgtgcttgccggtgcgtttaccggctgccgcagggtgaaaagccacaaggaatacgtaaattccgagtatgagtttaccgtaaaggaagagcctgaagataattcaccggatgagtcttcgtcttcagcttcctcgggaggctcggtcataaccctgccgagtggcagcagcagttccgacggaattaccgcaacgggaaagcgcattattcttgaatataccgatgaatttttgttctccgatcatcccacattctactggaacgagccttcaaaggggcagacggtgaacatctcgctttacgataccgcaggcaaggctatattcaacaagcgcggtctgaccggctcatcttataaatgcgagcccgcacttaccgacggaaaagaatacatacttaaaatgacctatacggatatagacggcaaggaaaaggtagtaaacaccgtgggtgaaagcggcaaaaagctaaaatgcatagcaagacgcgccgcaaataacggaaagaatttcaactttaaaaattccataagctttgatgtgctcaataattacctttcgcgggcggtcacctatgatataggaacaagcggcagaaatattgacgagtgcatacgctttttaacaagcgtaggggcaaaatacgttcagcgagccacgggcgagtggtatccaagctatgcatatgagcagaataacttcccgcagtggaaggcaaagcttgcggctgcacattcggttgaccccgatattgttttcgaggcgtgcatttttgaggtttcgtcacccggtatgaataatatccccataccggaatgggtgttcaaggcgtttgggcttacacccgaaaaacgcaatttcaatgtaaaccttaccaagtttaaggacggctacggtgttgaccattgggaaaagaatcaccacatacccgatattaccacaaccgaaatgcaaatgtttgtttattacagggcgtgcagctttattgacgtgggctttgaggcgcttcacctcggtcaggttaagcttaccggcaaaaacgatacaaacaatgcaacctacgcaaagcttataggtatgatacgtgattacgccaaaacccacgcaaggcgcggctatgtgcttataaacgcgcacaataataactttaccggacccgacggcactatgcttgccgatatgattgtggcgcccgtgcgtgttcatgcggcggcgggcgaaacaaagcacgaggttagtgaaactaacccgcagcgctgcataatagaaaaagggtactggaatgactctatttatcaggcgggaatttcgggtaaatcgccctcgggctggtatgccgagaaatacccctaccttgtagagtttgataattacggcttgagcggcaccgatactaccgaccccaactcctatgtatggggcaaggatgaaataggctggtatgttgttcagccgcagtggtatcgcaaggagtttatgaattaccttgtgaccacaattaacggatttaacgaaaacggtcatatctcatttgtgggtcaccgcggcggcgagttctactcaaacaacaagtcggcgctgtgccccggcggcagcggcgatgaagatttcattagggaaattttttcaaaaaattaagattaaaccggcataagggtgatttttaaatgctaaagaaaaactgtatagcgtgcctattgagcatatcgcttgccgcaacggcgctttttaccggcggcacgtcatacgcggcggaaacatccgctgcggcgcagagcggcaccctttcagacggaaaaaataaatacagtgcatattcggctctttatgctgtagccgtgacacctgataatacggtggttatacccggcggaaagaattttaccgcagcagacggcgcagaggcagtggcgggcagctatggcgggcgcgacggcgtgcttatttggaaaagcaagggcggcagcgttacctggcgctttgaaatgccgagcgacggcaaatactcggtaaggcttacctatttttcacttgatgccgacgcgcaggatatagagctggggctgctgctggacggtaaaacgccgttttttgaggcaagccagttggttttgcccaagtgctttcactccgaaaccgaaattaccaaggataaaaacggcaatgatatacgcccaaagcaaataccctatgacgaatggataaccgagcctttgggcgaccatacgggagtgagcgataagccctacggcttttaccttacaggcggcgcgcatacccttacgcttacgggcgcgcttgcgggaatagcaattgaaaaaatagaactttataacgaaaaagagcctgtttcatacagcgagtattcaaagggcgcaaaggcggcaggcaataaatacaccaaggcatatgaggcggaaacaccgctttatcagtcggcaaaaacgctttacccggtgtatgaccgaacaagcattgatacctccccctcagacccgataaagctgcgctacaacacaatagggcagagcaactattcatcacacgggcagtatattgtgtggactgttgaagcacccgaggacggctactactatttaggcgcgagaataaggcagaacataagcacgggaacaaactcctaccgcagactctatgtaaacggcagcgttccgtttaaagaagccgaaagcataaaatttgaatttaacaaccgttggcaggattatgttttcggcggatctgagccatggcttataaagcttaataagggtgaaaaccaattaaagcttgaggtgatatcgggtgatatgaccgaggttatagcggagctgcaggagcttgtaaccaatgtgaacgagctgtaccgtgaaataattatgataaccggcgcgtcgcccgatacctaccgcgattaccacattgataaggaaataaaggattttaatgagcgcgttaagaatatgtcggataaggcgcaggcggtatttgaccgcgcggtaagtctcggcaacagccgctcgggaaatttttcggctattacaaagctaaagcttttgcttgacggctttattaaaaagcctgccgaagttccctcaaacatatccacgctaagttcatatgcctcgggtatttcagggcttatgactacggttaaatcacagccgcttgagcttgataccataaccgtttcaacaaggaccgataaattatctaccaaacgccgcggcttttggggcaatattgcttttcaggcaaaggcgtttgcgggatcgttcagcgaggattattcttcaatcagctcgggcgatgaggaaacaaaccgcaaaattgaggtttgggtaagtacgggacgcgaccaggcgacagtgcttaaaagcctttccgacggtgtttttaccccgaaaaccggaataaccgctaatataagcattgttgcgcaaagccttatacaggcgtccctttcgggtatgagccccgatgtggtgctttttgttgaacagggaagtcccgtaaaccttgcaatgcgcggcggactcacgccgctttcgggatttgatacctttaaggatgtaacggcacgctttcaggcgcactctatggacgcctacctttataacggcgattattacgcaatacctgtttcggaatcgttttctatgatgttctaccgaacggatatttttgaaagccttaacctgaccccgcccgaaacctgggacgatatgtataaaataatccgtgtattgcagcagaacaacctgaccgtgggaataccaaatgccgattcaagcaatgttatggcggttgatacaggggtgtttgcaacgcttttgtatcagcgcggggaaaaatactacacggatgatatgaaatcgaccaatttcggcagcgacggcggcatagaaacctttaacatttggacagagttttataaggactacggcttgcccaatcagtacaatttcttaaaccgtttccgctcgggcgatatgccaataggcctgaacggctacacattttacggaatgttaaagcaaacagcgcccgaaattgacgggctttggaaaatggctttaattcccggcacgcgtgataaaaacggtaatattaaccgctctgtttgcgccacgggctcctgcgccgttattatgaagggcagccgcgataaggaggcggcgtggaagtatattgagtggataaccgataccgacgcgcaaagctcctacgggcaggaaatggaggcgcttctcggttcttcaagccgctttacaccggcgaatgtaaaggcgctttccaacctttcatggacatataacgagcagcagttaatttattcacagtggaaggattcctttatgctgccgcaaataccgggctcttatattgttgaccgcaacttaataagcgctttccgtaaggtggtttattcatcagccaaccctagggagacaatagttgcctacaataatacaattgagaacgagatactgagaaaacgcaaggaatttaagcttgactgaaaacaaagccctgcaaacgcagcggcagataggagattatgatgacaggttcaaaaaaacgccgaaaaagtttgcgctacacgcttggcgaaatgaagagccacagaacggactatttaatgctattgccgtatatgctgcttttcacatttttcacggttttacccgtaaccgcgtcaataatactgggatttacggactttaatcttctgcaaatgccgaattttgtaggactggataattacataaatctgtttttaaatgatgatattttcgtaatagcggtaaaaaacacccttatgttcgcggttgtaacaggacctataagctattttgcctgcctgatgcttgcgtgggtggtaaacgagctttcccccggaatgcgcacatttatgacctttcttttttacgcgccgagcatttcgggtaacctttatgtaatttggagctacattttcagcggcgatatgtacggctgggcaaacggaatacttatgaatttagggttaatttcaacccctattgcctggctttccgatgccagatatatgatgaccatagtaatggttgttcaaatatggatgagcttcggaacaggctttctttcatttgttgcgggtcttcagggaattgaccgcagtatgtacgaggcgggcgctattgacggtatttcaaaccgctttcaggagcttatatatttaaccctgccctcaatgggaccgcagcttatgttcggcgcggtaatgcagataagcgcctcgttttcggcgggcgcggtttgtatggcgctttgcggaaatccttcaaccgattacgccacaagcaccattatttcgcatatttccgattacggcacgacccgctacgaaatgggctatgcctccgctatggcgacgctcttgtttgtggtaatgattttaacaaataatcttatttcaaaaattctgagaaaatacacagcctgctaagggggaagaagtatgaaaaaaccggtaaaacggagtataggcggaaatatcgcccttacgctgctcttagttatactcggggctttttcggctcttccgtttgtatattctattttgcagtccttaaagccgcttgatgagctttttgtgtttccgccgaggttctttgtggtaagacccacggtggataactactaccttttatggacgaatgttcaggaatcctgggtgccgttcacaaggtattttttcaacagtgtttttatttcggtaaccgcaaccacgctgcacattttagtaagctctatggcggcgtttccgcttgctaaaagcaattttcccggcagaaatgcaatttcaaagcttatagtgctgtcattactgtttacaggcggcgttacggcaataccgcagtttgtgcttatggcacgcaccgggtttatgaactcctattgggcgcttatactgcccgcggcagccggaagtatggggctttaccttatgcagcagtttatgagccagctgcccaccgcaatgattgaggcggcaaaggtagacggcgcaggaatgtttttaattctttggaaaattgtaatgccctctgtaaagcctgcgtggcttacacttattattttcacatttcagggcatatggaactcgggcggcggctcatttattacaaaggaaaaccttaaaaccctgcccgaccttttaaaacaggtaacatcttcgggaatttcacttgtgggaacggcttcggcagcggcggttattatgatgattccgccgattttggttttcattcttacacaaagcagcgttattgaaacaatggcgcaatcgggcataaaggagtaaacgtgaatgcgaaaaagtattttaaaaagaacagcagcaatcgcgtttgccgccgtgctttcgtttgcctgccttaccgcttccgctaagagcgccgataacgcatatacctacgattcgtggggaaacgcggtggaggtgccatcggggtatgaggcaacgctcagctttggcaccgaaaaagccgccgcccttaaaagccctatggatatgtacgcctgcggggataagctttatgtgctggatgccgggaataaccgcatagttatatacaatacggatttcaagccggaaaagataattgataaattttatataaccgaaaacggcacaaaaagccttaccgagcttaacgaggcgcagggtatatttgtaacgtcggacggcagaatttacattgccgatacagcgaacgcaagggttattatatgcaataccgacggtatggtaaagaccgtgcttacaaagccggaaaccgagaattttcccgattcgctgcaatttaagcctataaacgttttggtggacgacgccgacaacacctacgttttagccgacggattttactacggcgctattgtgtatgacgccgagggtaattacaaaagcttttacggggcgagcaaggtaaaggttaccgcctcgcttattgcagatagattctggcgtaaatttatgaccggcaaacagcttgattacacaagaaattatcttcctgcaacctttacttcatttgatatagactcaaaaaactttatatacaccgtaactgctgataaaagcggagctataaggcggctcaattacctgggaaatgatattttctcggttgagcagggacccgacccgctggataaatcggtttacggcgacagaacgccgcagtatataggcggcacatggtacaacacaagctttgcggatattgcggtatcggaagaagatttcgtttacgttctggaccgcaccaacggcagggtgtttcagtatgataaggactcaaaccttataaacgttttcggcgcaaagggcaaccaaaagggaacctttaaaacgcccgcagcgattgaaacggttggcagaaatgtgctggtgctcgaccaggataagggagaaataaccctttttgagccgaccgactacggcaatgttataagtgacgctaccgtgctttaccacaagggtttatttgacgaggcgtttgataaatggcaaacagtgctttcctataactcaaactgtgaccttgcctaccgcggcataggcagagcgtatttacagcagggcaaatatgccgaaactatgaaatacgcaaagctcgggcaggacagacttggctactcaaaggctttcaggttttaccgctcgcagctggcgcgaaaatattttgttcccgcggcggcggtgcttgcggttattatagcggcggcggtaattatttccaaaaaccgcgataaaataaggcggcgccttaatatatcgccgcgaaaaccgcgccttttcaaggcaaaaaatatcatgctgcactcggtgaatttttacgaaaagctgcacaccgataaatcaaaaacaacgtttataagcgcttgtgttgtggttttcttattcttcatagggcagataatcgcaagccttgccaccggctttattttcaataaaaacaacattaccgaatttaacggcttttttataaccgcgcagtcattaggctttgtggcaatatgggtcttgagcgatacggttgtgggcagtctccggttcgggcacggaaatgtgcttaatattttcaacggcacggcggcggcgcttgttccgtataccgccactatatacataaacattattttaagccatttattcgtttatgaggagcagggaattatgagcataatttccgcaatagggcttttatacaccgttttcctgctttaccagtctacaagaatcaatcagaaatacacggtgctggaggcggctgcctcaatgcttttggatgttctggtggcggtaataataattctgctgcttgtcattatttatatgctggtgcgccagatgtttatttttgccgcaacggtattccaggaaataatttaccgcatcaattagtaaaggagatttttcgcatatgttgaaaaaagcgttggcgggtattttaaccgcgcttttatgcacaggttgttttttcggcactgctgttgcggcaactgaggtttttcgtgaaaacgcatttacaaaatgcgccgaaaattccctttacgaactgtatgttataggcgcgggcgagcgcagcggagaattttacgttaaaagcaaatcgggcggcgaagcattttactcaaacccgcaaaaccgcgatttttcacccgacggactgcgtgaaaccgaaaaggaaagctcgcagcttttaattcagctttacagcgaaaaaagcggagcgctgagaacccttaacagctttacgggcgcgggcgaggggaaatatgtcaccgttgctttaagtggcaacggctttgacacggcttatagaattaacggcgcagttaagctgaagcttaaaatccgcctgacggaaaagggatttaccgccgaaacggatgtctcaaaaattaacaacataaaaaacaatgtgattacaaatattcagcttttgccgtatttttcagccgcgccctacggcgagcagggctggtcgcttgtgcctgacggcagcggcgcgctgatatacaacaacacagaaaaggcgaacgctgcggtttacgaaaaggcggtttacggcggcgacgcagcctttgccgaaacggtaaaggcaaccgaaaccgagcaggcttatatgccgttgttcggcgccaagtcaaacacaggcgcgtatcttgccgtgattgataagggcgccgaaaacgcctatatcaacgcggtatcagctaccgacgccacggtatacaaccgtgtgtactcctcctttaaaacagtagggtcggataaaatttcaatcggcgagggcgtcggcgaaatatcggcaaataccgaaacttacgatacctcatcaccgcttacaaagaaaataaaggtaagctaccttttagccgaaaaaagcgctgattattccgatttagcccggctttatcgcgaacatttggggctgaaacaggtcaatataagcgccgagccctcggtgtttttagagctttacggcgggcttaaaaggaaagagagtgttttcggtattccgcttacggtatttaaaaagcttaccaccgtaaagcaggcaaaagaaatcacgagctattttaaagagcaaacgggcgctgaaccgatagtatcttaccgaaataccgacacggcaataatttcgggcaaaatacagaataaataccgctttaaaggctcgctcgggagcaaaaaggagcttgaagaacttaaaaagctttgcggcggcaatttgtttttggaaaacaatattttttctgccaaaaagggcggaaacggcttttcctccgtcagtgatacaacggtaagaattaaccgcaacagcataatgctttataatttcaaccccgccactactcttaaagataaaaagctgccggcggcttacgttattaaatccgtaaggcttaataaaatttacaccaagtattttaattcattaaataaagcggggtttgagccggcgtttataaatctcggtaataccgcgtactcggattttgatactgacggctacataagccgtgccgatactgtgaaaatattcggcgcacttcttgaaaaatacggcaaaaacgggcttgtgtactcacccaacgcctatgtgtttgcggcgggtaaatacacggctgatacaccgttatattcctcaggctatgatattatcagcgaggacatacctttttatcagttagtgctttcgggcgttaaggagtattcaaccgaaagcttaaaccttgcagctaataccgatgttacatttttaaaggcgcttgaaagcggcgcgtcgcttaaattcacctttgtttacggcaatataacctcggttaaaaacacgcagtatgattaccttttcggggcggatttcaataaccgtaaaaaggagaccgccgaataccagaaaaagctttctgcggtatataaagagcttggctcgcgcgttgtaaaaagaaattccgtaatcggcgagggcgtgcggcttaccgagtttgataacggctcggaaattattataaactactctgaaaaggcagtaaaaacagagtttggaaccgttgaagcgggcaattatcttacagtaaaggaagggtaatgttaaatgaaaacacaaaacggcaaaattaaaaagcatcatctttcctacacaggcagaaaagcgctttacggctattgctttattgcaatttggatactcggctttataaacttttttgtccgcccgcttattgatacggttatttactcatttaatgacgttcagtttgacagcagcggcataagccttacttttaacagcttttccgcctaccgcagggcgctgtttgaagaccccgacctgttaagagagctgctcggctgctttacggagcttatttattctgtgccggtaatagtggtgctgagcattatgattgccgtaatgcttaacgaaaattttgtgggtaaaacgtttttcagggcggttttcttcctgccggttataatttcaggcggggcggtgctttcggtaatacgcggcaacgatatgatgtctatgatggttgagggcacaaaaagcggaagtatgcttgaaatttcaaacgtgcagacactcattcaggagtttgcgctgcccgaaaagctttcgggatttttaataaccgtatcaaacaccgtgtttgatatgctttggaaatccggtatacaaatactgctgtttttaggtgcattgcaaaccataagccccagcatttacgaggcgtcgaaaattgagggtgcctcgcggtgggataacttctggaaaataactattcctatgatttcgcctatgatattgcttgcggttatttattctattatagatagctttaccgactcgggtaacgccataatgagccgcattttaaacaatgcgaattacctaaaatataccgatggctcggtgctttcggtgctgtactttatttcaaccctgctgtttatcggcattgtgtattatgtattgaataaaacgctgccgtattccggctcaaagaggtgacgcttgtggcaaaacggaaaaataaaggtctttcggcgctgccatttaaaattttcaggtttactattcttttagggctttcctatatactgctttatccgcttatatttatgttttcaatggcgctgcgtccgcttgatcaggttgccgaccctactatagtatggattccgaaatcactgacgctaagcaacataatcaatgttttcgggtttatgaaattcggaaaagccttcggcaatacaatgcttattttcgtgctgagcgccgctgtggaggttatgacctgcgctattgtgggctacggctttgcaagatttgacttcccgctcaaaaagctttggtttgtgggcgtcttacttacaattcttgtgcctacccagtgtattatgattccgctgaccctgcaaataaggtatttcgactttttcggaataggcaggctgctttcggcctttggaataaacgccaccgtaaatatgctcaacaccccgtttgcgctttatgtgccatcgctttttgcaagcggaatacgctcggggctgttcatattcatttaccgccagttctttttggggctggcaccagaacttgaggacgcggcatatattgacggctgcggaccctttaaaacctttttaaaggtaatgctgccgctttcgagcgggtcaattatcatagtgtcgcttttatcgcttgtggcgcactggaacgacacaatgttttcaacctttttctttgaaaacttagatacacttaattctcagctgtcacttttgcaaagaatcgtgtcgcagagcgtaagcggagatattgtgggggcgaccgcagcctatcagcaggcgggggcgctgctgtttatgcttttcccaatgacgatatacatcatcttccaaaagtggtttaccgaaagcatacagacctcgggaatagtgggataaaccggtatacaggctttgttaagtctttatataaatacagccgtaaggcaaaaggagattattatgaaaaagtcagcattaagattatttgtatttttactttcgctcgttttgattttttcctgcacggcgtgcaaaaaatcaaacagctcgggtgatgaatcgcttaccgatagctttgtcgatattatttatgacaatgaagaaagcgacagcaccgacagtaccgacagcagcagcaaaatcgacgcaaatcacggcagcagcgtagcccttgacacaaagaaccttgaaaaggactctaacccgcagaaggagctgcaaaagcagcttaaggactccgcaaagggcaagacgctcaaaatactttccacctggggcgaagacggtcttatgaaccagtgctatcgctcaatgttcaaggcgctttgcggcggtaatcttgaaataattcgctgtgccgattggagcggtatgcagcagaagttagcccagatgcatgcggcaaacaacgcgcccgacctttacgaggttacaaaccaggactacccctcggtagtttacaggggaattattgagcccttaagcgaccacattgactttaacaacggggtttacagcgacgccgaccgcaagcttttaaatgagctgaaattcaacggtaaggtatacttttggcctacatttaaagagccgaacggcgcgagaaccgggctttgggtgaacgacagtatttttgagcagttcggtatacccgaaaaccagagaccgaaggcacttgttaaggcgaacaactggacatgggacaccatgtatgaccttataaagaaaaccactgataaggctaagggcatttacggtcttgcaacccccgaaaattcaagcttcccctacggtatggcggcaactacgggcgaggaccttattaagtacacaaacaacggaattataagcaactttacatctgccaatattacccgcgctatgaatatgtttaagaaaatgagcgacgctaactactgcataattcaaaaggcggcggacaccttccagaacggcaaggcagct

SEQ ID NO: 1535 - DNA, 2969 bp, Unknown
  16S sequences of unknown bacteria
ccggtggaggggatcgggcattatgagccgctgcggcattacgcggaggtccatgtgctgctggagccgcttcccccaggcagcggcctgcagtttgccagcgcatgccgggaggatgatctcgcgctcaactggcagcgcctcatccttacgcatatgcaggaacaagagcatcccggggtgcttacgggatctgcgatcacggatctgcgcatcacgctgctcagcggacgcgcgcatctcaagcataccgagggcggggacttccgtcaggcgacctaccgcgccatccgccacggcctgcgcaagggaaagagcatcctgcttgagccttatgatgagtttcggatggagcttccgcctgagatgatgagccgcgcgatctatgacatcgagcagatgggcggcaccttcgtcatccagcacaatgacgcgcagcgctgtgtgctcagcggcagcgcgccgagcgtcggcctgaatgcctatgcttcaaagctggcggccttcaccagaggaaggggacgtctgcagcgcgccatgaagggctatgcgccgtgccacgacgcggaagaggtcatctcgcgcatcggctatgactgtgaacgggacctcgaacatccctgcggttcggtcttctgcgcgcatggggcaggcttttatgtgccttgggacgaagtggaggagcatatgcatctgccgctgtccttcgtgcagccgcaagagcagcgcctgcaggagacggtgaagaaaacgcctgtgcgcagggaaggcagcgaggatgaggagctcatggcgatctttgcccggacatacggtccgcagaaacggcgcatctctgaccgggagagctatgcgcggcatgagcagcagcgggaacagatccgggtagacctgaagcagctgcctgcctgcttgctcgtcgacggctacaatgtcatccatgactgggaggagctgcgcgcgctggcacaggacaatctggatgcggcccgacaccgcctgatccagatcctgagcaattatcagggataccggcagtgcacgctgatcatcgtctttgacgcgtacaaggtcaaggataatcagggctccatgcagaagcaggacaatatctatgtcgtttacacgaagacggcgcagaccgcggacagctacatcgagagtgccacgcatcgtctggcgaaggagttccgggtcacggtggccaccagcgatggaatggagcagctcatcgccatcggccagggggccagccgcatgtctgcccggcagctgaagctggaggtggagcatatggccgaaactggtttccgcgcttatgcgcagcggcagaagaagggcggaagcaggccgctgcagcagctgcgcgagctggccgtggaagaagaggatcctttgtcaaaatgatgtaaaaaaacgttttgggtcatccaaaccaggggataattatgatataatagccgaagtaaagaaagaaggtgtgatatatggctcctgagcccgatgtgaacagttgcacgacagccaaggacacagaaagacaggaggcatatatgcattagtcctcctgtaagatgaaaaggaggataaatggatgcttgaattttacaagacgattgataatgtgaccaagcgtatcgacagtccggagcatggctgctggatcagcgtcgttgcgcccaccgacgaagaaatcagctatctgatcgatgagatcggcatcatgccggaatttgtcaagtcttctctggatgaagaggagagctcgcatatcgactatgatgacgacgagaaccagacgctggtcatcgtcgactacccgagcgcggatgacagcgatgacgacgcttatgatggccgcacgctgcagtatacgacgctgccgctgggcgtggtgatcatgaagggctatgtcatcacgatcagcctgtatgagaacctgaatatcgaagatatggcgcatggcgtggtgcgcggggtgcgcacggacatgaagacgcgtttcctgttgctgctcctgctgcgcatctctcagcgtttcctgatctatctgcggcagatcgaccgtctgtcatcgaagacggaacagaagctgcatcagtccatgaagaacgaagagctcatccagatgctcggtctggagaaatcgctggtctacttctcgacctcgctgaagacggatgagatcacgctgaacaagatcatgcgcggcaagctcatcaagctgtatgaggaagatcaggatctgctggaggatgtgctcatcgagatccatcaggccatcgagatgtgtaacatttactccaacatcctctctggtacgatggatgcgtttgcttcggtcatctccaacaacctgaacatcgtcatgaaggtgctgaccgtcatcaccatcgtgatggcgatccccaacatcatcttcgggttctatggcatgaatgtcaacggtcttccgggcgtgcagtggtggtggttcccgacgctcgtcgcgatcgtcgccatggccatcgcgacatggatcttcaagaaaaaggatatgtttcactgagcgacagtctgcggactgtctttttctatcggcagtgctgtgataaaatgagggcagggaggcggtaatgtgcttgttcagcaaacttatcattctccgcttggcgatatgcttctgctcggggatgaacatgccttgcgcggcgtatggttcaaggggcagaaatacttcatggccggcatcgatgaaccggcggtatgtgcatcatgcgatgtgctgcggcagacggcggcatggctggatgcttactttgcgggaaagcggccggatccttccgcgctttcgctagatccgcatggcaccccctttcagcggcgcatatggacgatgctgctgcagatcccttatgggcagatcacgacgtatggcaggctggcagaggaggcagcgcagcgcatgaagcgggaacggatgtccgcgc

SEQ ID NO: 1536 - DNA, 19121 bp, Unknown
  16S sequences of unknown bacteria
cattgacccgggcaccatgagcccttaccagcacggcgaagtcttcgtcaccgacgacggcgcggagacagacctggatctgggccactatgagcgctttgtcgacgagagcttggacggtaatgcctccgtctcctcggggaaggtcttttggaatgtcctgaaccgggagcggcagggcggctatctgggcggcacagtccagatcatcccccatatcacagacgagatcaaaaaccgcatttacgccatggagcgggacgatgtggatgtcatcatctcggagatcggcggcaccgtcggcgatattgagagccagccctatctggaggccatccggcaggtggcctgcgagaaggggcggcagaatgtggtgtttatccacgtgccgctggtggtacagatcccaggctccggggagctgaagagcaagccgacgcagcattcggtcaaggagctgctctctgtcggcatccagccagatgtgctggtctgccggacggacgcgccgatgacggaagagatccgccggaagatcggcctgttctgcaatgtggagccggaatgcgttattcagaatcagacggcctcgaccctttacgaggtgccgctgctgctggagcgggaggggctggcaacggtcgtctgccggaagctgggcctgccggaaacggtgccggatcttgtggagtggacggcgttggttggccggatcaaaggcgcgcaccgccaggtgaaaattgccttggtggggaaatacacccagctgcacgatgcgtatctcagcgtagtggaagccctatttcacggtgggacggaaaatgatgccattgtggaaattgaatggatcgactcagagcagctgacggcggggaatatccgtgcgcagctcggcggctgcgatgggattctcgtccctggcggctttggcgaccggggcgtggacggcatggtcctggcggcccggtatgcccgggagaaccgggtgccgtatctgggcatctgcctgggtatgcaggtctgcgtgatcgaatatgcccggcatgtactcggctgggcggatgccaattcatcggagtttgacccggcgacggcgcatccggtcattgatctgatgccggaccaggtcggcgtgaccgccaagggcgggacaatgcggctggggcagtacccgtgtatgctggcaggcggcagcctggcccaggcgctgtacggcaccggtcagattgctgagcggcaccgtcatcggtatgagttcaacaatgcgtaccgccaggcctttgccgcgcagggaatgcggttttcaggcctctcgccggacggcagcctggtggagatggtggagctgccggagcacccgttctatatcgcggcccagttccacccggaatttaagagccgccccaaccgaccccatccgctgttctccggcctggtcgccgccgcgttggctcaaaagggcgactaagctttgcgcgcgtgggagcgccaaagagatactgattaaaaaatcgaggcagctgcaagttttgcagctgcctcggattttttgtatttttatgaattatgcctggggcgacgccgtgcgggctgccttgcttcttctgcggcggcggggacggcggggcttttgctgcagccgttcataggattgtgccgtctgcgaatcggcctcatagagcatccggttggcctgcagcgtaccgccttcctctgggaccagccggacccgcagcagatacggcccgtgctccgggcaagtcgtcatcgtcaggtaccgtttgccctgctgggggtaccattttgtgatcttcatctgcgcgccgcaggtggggcagcagttttcaggaccggccagattggcaaatgcgtcctgcttgctggcaaagccgtggtagaccttgcggctgatgcagccgggaacctgtgcaccgtggagcccatcctcatgcgttttgagggagcggccgtattcggccatgccccggggcaggtccagccgggcacagatgcaggcggtgtgatatgcgtcgcccaatgcgtcgtgtgccggacgggtcgcggcgatgcccatctcttccagcgcggtttttagggccttttgctgtgtgccgccgccgatctgggcgttgtacatcatctgggcgttgtaccaattttgaacccactgggcgtccagctggaacaggcgcagattctcggtcagaatgccaatgtcgtcaaagccccaggtcaggaagatgcagtcgtcaccgcaccagcggtgaaagacctctatcgcgtcagggaaatccagcccttcggccttgagcttggactctttaatgccggtgagcttgctcacccgcttgttcagccgcctataatagcggggcttcacatagagctgcagctcgtcggcgacggtttggtcctccagcatccgcacggcgccgatctggatgatttctccatgaatcggaaccgggagctgcttttgcgctgaaggggaaccgggccagggctggttccattccaagtccaaaacaatatagtacatgtccggcaggactcctttttgcatttctttgggtgcagtgcactgcgtgcgctgctttctgcagaatctgatgtttttgccgcaatcatagcgcctttgcagatccgcgtgcaaattcctttttattctaccatattgctctgcgcttggcaacaaaatttcccgctgcctgtgcatccttgggcagaaaattccgccgcaacggcaaaatgtatcaaaacagcctcctgggaaatactgtatttgcgccgctttggcgtccggcggcctgcgggctgccgagtcaagacagacggaggaacacggccatgcaggggaaagtggaaatatccggggtgaacacggcgaagctgacggttctgaaaagcgatgagatgacgcagctgctgcagcgctgcaagcagggcgatgaggcggcgcggcagaagctgatcgagggaaatctgcggctggtcctgtctgtgatccagcggttttccggccggggcgaaaatccggacgacctgttccaggtgggctgtatcggccttttgaaggcgatcgagaattttgacccggcgctgaacgtacgcttcagcacctacggcgtgccgatgattgccggggagctgcggcggtatctgcgggattttgggcccctgcgagtcagccggtccatccgggatacggcctataaggtcctgcagtgcaaggaggcgttgctgcgggaaaagggccgggagccgaccctgacggagatcgcccagcagttggagctgccgctggaggaggtgaccgagtccatggacgctatggcaagcccggtctctctctatgagccggtgtattccgacggcggtgatccgctgactgtcatggaccaggtgcgcgatacgaaaaataccgatgagcagtggatcgagcacatcgccctgcgacaggcgatggagaagcttgccgaccgggagcgccgcatcctggcgctgcgcttttatgatggcaagacgcagatggaggtggcccaggaggtgggaatctcccaagcgcaggtctcccggctggagaaaaacgccctgcagagcatccgccgcgccatctcgtcgtaacgcatattctggcggcctgccgcataggctgaaatccgggaagagaatccaggaaaaatccgggtagagaatccgaaaggagggctgcggcatggaaaaccgcctggcgacgctcaagtgcaaggaggtcgtcaatatctgcgatggctgccggttgggctatgtctgcgatgtggagctggatctgctctccgggcgtatcatcgccctgctgctgccggggccctgccggtttttcggcctgtttggccggcggcatgattataggatcccctggggcagcatcaagcgcatcggcagcgatattatcctggtggatgtagagctggccaaggtctgtgtgccccggggcaggcgggattggccttagaaaaaaggcgggaaaagtttaaaaaagtgcttgcgttttagggaaaataaaagtataataacttagctgtgcgtaacagcaaaaaataaaccacacatccggagattctgcgctttgtgccgatctcggttggcggagaagatgattcgggtggcggtaaaacaaaaggagtattcattatgtctgtcgtatctatgaagcagctgctggaagctggcgttcacttcggccatcagacccgccgttggaacccgaaaatggcaacctacatctacaccgagcgcaacgggatctacatcatcgacctgcagaagacggtcaagaagctggaagaagcttattctttcgttcgtgacctggcggccaatggtgagagcctgctgttcgtcggcaccaagaagcaggcacaggacgccatccgtgaggaagcagagcgcgtcggccaattctatgtcaacgcaagatggctcggcggtatgctgacgaacttccgtaccatgcgtacccggatcgaccgtctggcgcagctgcgcaagatggaagaggacggcacctttgctatgctgcccaagaaggaagttatcaagcaccagggcgagatcgccaagctggaaaaatatctcggcggcgtcaaggacatgaagcgtctgcccggcgctctgttcatcgttgaccctcgcaaggagagaaacgccatcgccgaagctcgcaagctgcatatccccatcgtcgccatcgtcgataccaactgcgatccggacgagatcgactatgtcatccccggcaacgatgacgccatccgcgccatccgcctgattgccgccaccatggccaacgccgttgtggaaggccgccagggggaagtcctcgtcgagagtgaagcagcccccgccgcagaggaagccgctgaggccccgaaggcagaataaattctacagattttacaatagagcgcctgcccccgccggtgggcgctttctaaaagaaatacaggaggagaacaattatggcatttactgctgctgatgtaaagaaactgcgcgagatgaccaacgtcggcatgatggactgcaaaaaggccctgagtgagaacgacggtgatatggataaggccattgaatggctgcgggaaaagggcctggccaaggctgccaagaaggcgagccgcattgcggcagaaggcatggcgtacgctgtcgtcgagaacggcatcggcgctgtcgtcgaagtcaacgcggagacggactttgcctccaaggcgcccgtgtttgtcgactttgttaaggatattgccaaggtcgtcgtcgataatgacccggcagatctggaagcccttaaggcgtgcaagtaccccggctctgatctgactgtcgcggagatgatccccgagaaggtcatggtcatcggcgagaacctgcagatccgccgctttgcccgcttcggcaagaacacctccgtgtcttatgtccatgctggcggcaagatcggcgtgctggtcaacctggaagtctccggcggcattgacgccacccagatcggcaaggacatcgccatgcagatcgccgcgctgaaccccagattctgggacaagagtgacgtttccgacgctgtcctggaagaggagcgcaagatcctggtcgcccagatggacaacgacccgaagatggcttccaagccccaacaggtcaaggaaaagatcgccgctggcaagatgaacaagttctttgaagaaaactgcctgctgcagcaggacttcgtcaaggatggctccatgtctgttgagcagtatatggcgagtgcggccaaggcgttgggcggtagcgttaagtttgtggatgctgttcgcttcgagaagggcgaaggcatcgaaaagaagcaggaggacttcgctgcggaagtcgctgcccagatgaacatgggcaaataagccaataacggcatgagttttccacagcgcatcctgtggaaggaatctgtgaactacccacctgaccggtcggccaatttggcctgccgggcaggtgggtttcttgcgtgtgcgaaaagagggaagttttcggcattctccccgtaattgggacagaaaccgatttcatacgctattttgtgggaaaagccaggtgcttccctggaaattttgcatgatttcctccacttttgcaaaaacgtgacgggtataaaattgtcgacgtaatctgaaataacccctgaaaaacctgcaaatattcatttttatatacagaaattttgccgctttccacagctggtggaatggaaaaaatggcgtgttctttggagtttttcacattgcacacaggtttatccacaaagatgtcccgttgtgcacagctgcgcatatacagacggcagttaacataagagattcgtcacggtgcgacaagttttgcaatctccgcctcggataaatgcggaaatagcgcccggttgatgcctgcggcgaggatccgggccatgtgcgcgatgcgggcgtcgatatcgctgggggtaacaatgagcccggcctgggatgggtctccccggagcgttcccgcagaaatgacggtcggcacgccgacggcgatgaccggcacgcccatggtccgccggtcaaaggcggtgcgggtgttgccgatgccgctgccggggacgatcccagtgtcggctagctgcacggtgcagcagaggcgtttttcctcgcaggctgccagggcgtccacggcgatcaaggtcccggcgccgctggcctgggcaattccgcggacgatctccgcgctctctagcccggtggaagccaggacgcccggggcgaaggcgcagcaatcggccaaggggccgaataggtccggcagacggcggcgcagatggcgggtgaccaaaatatgcggcagcgtccggggtccgatggcgtccggcgtgatggcggcattgcccagcccgacgatcaggaccggccccggcgcgggccccagtagctgagccagttgcagccccaggacctgcccggcccgttggggcgcggcagaggggtcccgcagcagcgccgcaagctccagggtgatatattgcccgatgggcttttccagccgccgcgcggcgtcatcggtctcaatcttgatctgcgtgatggagatctcattctcctcctgctgctgaatgcggacgccgggcagtgtgcctgcgccggtgtggacctgctggtgggcttccagggcaagatcggtgtgattcatgtgcgctcctttccggtctgcgggaaagatacggcccacagaccaaagacggaaaattttttcgagaaaatgagaaaaaactattgattttctgcaatttaccaactataatatatttctgcatgaggttaaatgcttgcggtaagatcttataaacgctattgaggaggtgtattccgtgcccaacattaaatctgcaaagaaaagagtcgaactgtccaagatcagtaacgccagaaacaagatgtacaagtccactctgaaatctacgctgaaaaagtttgatactgccgttgctgaaggcgaccgtgagaaggccgatagcgcttacaaggcagccgttaagatggttgatcagtctgtcacgaaggggatccttcataagaataacgctgcgcgtaagaagagcagcatgacggtcaaactgaatcacatggcttaattcatggctttttgggagatgctgcgtgcagcatctccttttttatcctgtctgggtacggtatacggatagtttgccgcaaattcggaaaatcataacgacggcggaaagggggcggcacaatggaattatttgacagtgtgcagtatttaaagggtgtcggcccggccagagcgaagctactggcaaagcttggcattgaaacgatttatgaccttttgacctactacccccggtcctatgaggaccgcagccagctgtgccccatttgcgaaatggaggtggggaagcctgcgtgcttttccgccatggtcatacaacggacccgcaccggacttacccgcaatgggcaggcggtggcaaaaatcgctgtggccgatcataccggacggctggttttaacattttttaaccagccatacctggaccgtcagttggaatatggccagacgtactttttttacggcacgctgcagggggatgaccggggctacggggtgatcaatcccgtctttgagtccgcagaaaaggaaggtgtcttgacccggcgtatcgtgccggtctatgggctgacggcggggctgcgcaacggcgcactcaaccggatgatcgcgcaggcactggagctgacggaccagatgccggatctgctgccccagcaggtgcaggcgcggtatgacctgtgcagtgcgcggcaggcctaccggcagatccacgcgccgtcgtctcaggcactgctggaggcggcgcagcggcggatcagctttgaggaattttttatcttctctgcagggctgcagctgtgcaaggcgcggcgggccgggcggacgaaggctccctttgccgagacggatctctcagcattttacgcggcgctgcccttcgccctgaccggggcgcagcggcgggtcatcggggagatcttgcaggacttcacccaggggcggccgatgtgccgcctggtgcagggcgatgtgggaagcggaaagacgatggtcgcggcggctgcgattgtctgtgcggcaaaaaacggtgtgcagagcgcgctgctggcgccgacagagatcttagccgagcagcattttcaatccctggcgccgctgtttgaacgccttgggctgcgctgcggtcagctgacgggttcccaaaaggtttcagaaaaacgcgcactgcgggctgcgttgcaggcaggcgagctggatgtcgtcatcgggacccacgcattgctgtccgggacgacggcctttgcaaatctgggcctggtcgtgacggatgagcagcaccgctttggtgtggcccagcgatcggcactggctcagaagggggagctgccgcatttgctgctgctctcggcgacgccaatcccccggacactttccatgatcctctacggcgatctggatgtctcgattctcgatgagcagccgccgggacgccagccggtggatacgttcctggtctccgaggcactgcggccccggatcaatgcgttcctccgcaagcaggtggaggcggggtaccagtgctttgtgatctgcccggcggtggaggagagtgagacgacggagctgaaatcggccgagcaatgggccgaggcgctgcggcaggcgctgccggagctgcagatcgcggtggtccacggccagatgaagagcgaggagaaggaagcgatcatgggcgcatttgcccaggggcaaacgcagatcctagtggcgacgacggtcattgaagttggggtggatatccccaatgcgaatctgatcgtgatcgaaaatgcggaccggtttggcctgagtcagctgcaccagctgcggggccgggtcggccggagcgagatcaagagctactgcatcctggtctccaacacgaaaaacccggagacacggcagcggctcaaggctctgtgcaagacccgggatggcttcgccattgcccaagcggacctggagctgcgggggccgggggacctgttcggccagcggcagcacggcctgccggtgctgcgctgtgcggcgctgagcagcagcgtgccggtgctgcaggcggcacaggaggcagccgcggcgtatttggccgatcccgccagcccggacgggccggaatttgcgccgctgatggaccgggtccggcggctgtttgataacagcgcggaattattcttgtaaagccaccatttttgaaaattgctattgtacccggcaggaaaatgttgtaaaatacaggcgaacttcaaatgtttggttgttttatgaaaggtggaagcgttatgaaaaaaccgattgttttagtaattatggatggcgtcggcaaaggggacggcggtcctggcgacgcagttgcccaggcgaagaccccgacgctggataagctgtttgccacttgcccctatacctggctcaaggcccacggtaccgccgtcggcctgccgacggatgacgatatggggaactcagaggtcgggcacaatgcgctgggctgtggccagatctattcccagggcgcaaagcttgtgggcgaatccatcgaaaacggcagcctgttccagtccgagacctggcaggacctgacgaacaattgcctggaaaacggcaaggcgctgcattttttgggcctgctgtctgacggcaatgtgcattccaatatcagccacctgatcgccatgctgaaaaaggccagggagctgggcattcgcagatgctactgccatatcctgctggatgggcgcgatgtcccggcgacctcggcgctgacctatgtggacgagctggagcagacgctggcctccctgcggggcgaaggctttgactatgctatcgcctccggcggcggccggatgcagatcacgatggatcgctacgaggccaactggcccatggtcgagcagggctggcgtacccatgtccagggccagggccggatgttcgcctccgcacaggaggccatcgagacctaccgcgccgagactggctgcatcgatcaggatctgcccgccttcgtcgtcgctcgggatggccagccggtggcgaagatcgccaatggcgacagcgttatcctcttcaacttccgcggcgaccgggcacaggagatctccctggcctttgaccgcaaggactttgatcatttcgaccggggcgattacaccggcgtgaaatttgccgggatgctccagtatgatggcgacctcaacatcccgacccactatctggtgcagccgccggtcattcagaatacgctgacagaggtgctgtgcgcccatggaatccgggaatacgcggtctcggagacgcagaagtacggccatgtcacctatttctggaacggcaaccgctctggcaagatggacgagaagctggagacgtatgaggagatcccctcggacgtcattccctttgagcaggcgcctgccatgaaatccaaggagatcacagactgcatggttaagcagatggcctccaagcagtttgacttcctgcgctgcaactaccccaacggcgatatggtcggccataccggcgtgatggaagcggtgatcactgccatggagtgcgtggataccggcgtgcagcgaatcctagatgcggcagaccagtacggctacaccgtctgcgtcacggcagaccacggcaatgccgaccagatgacagagacgaaaaagggcaagacgtctatccggacggcccactctctaaacccggtcccgttcatcatctacgacccagatcagaaatggacgatcaaggatggcaagtacggcctggccaatgtcgcgccgactatcgtgaaaatgatgggcttccaggcgccggattgctgggaagagagcatgatctaagttttcggcacaataaaatgcaccggcagcgtgtgtaatacggatgccggtgcaaattttttatttggagcaataaattttggataatcgtttgactttttagaaaataacgtatataatatggctatgagtcgtcaaactcgagagcaagccaatatagctgcctgcctaagtcctcagggcaggcagcagcaaaaaaccgcatcgggaagtgcggttttttgtattttttccctggagaagggggcattggcggaaaggaaccggtaggatgaacgagacgatcgtatctgtacgcggggtcagcaaggcatttggcgcggtccgtgcgctgcaggatgtttcgctcaccgtacagcagggcatggtgaccgccattgtcggcgacaatggttccgggaaatctaccttgatccagctgctgtccggcaatctggcaccggacagcggcagtatcaccgtcggcgggcagacctaccggcgactgcaggtccggcaggcgctggatatgggaattcggacggtctaccaggacctgagcctggacgcctgcaagaacagctacgagaatattttcctggggcaggagctgcggcggggaccatttttggaccgtcgccggatggcccaggaggccgtggcgctactgcagcagttggagatcgtgatcccagatttgactgtcccggtgcgggtgctctccggcgggcagcggcagggggtcgccattgcccgggccatgcgcaagccgggcagcctgctgctgcttgatgagccgacggcggcgatgggcattcgggagtcgcaccagacgatggcgctgctgcaccggctgcaccaggctgggcatacgctgctgctggtcagccatgatatttaccaggtctttgaccttgcggaccggatctacgtgatgcgggctgggcggtgcattgcagatatttgggcaaaggaatcttcaccggaagcgctgcaccggctgattttgcagcgggagcagggggtactggcatgaagcaatttttgcagcgccatggagcgctgtggctgctcatcggtttttgctttgcgatgggcctgtttttgcagctgcgcaccggcctgttctttgccggtaagaacttgacgaacgttcttgaggccagctccttccggttgctgctggccattggcatgacgtttatcattgctgctggggcgatcgacctttctgtgggggcaatcttatccctctctgctattttagcggcaaagtgtatgcagaacggtatggcagtcccggcggcggtcctgctgggcctgctggcgggcacggccatggggacgctcaatggcgcactggtccactttaccggcatcaacgcgtttatcatcaccctggcgacatcgctgctttaccgggggctggcgctggtcgtgaccctgggcacgccggtgagtaagctgccggaggcgttccgcgtttttggctacggggatttttgcggcatggagcggggtgtaagcatggcaatcgtggtactgctgctggcgctgccgctgctttacaaaatgcgttggggtcattatatcatgaccctgggcagcaatccgatggcgctgcggcgcagcggtgtgcggcttggaccgtggcggatcagcgcctttgcgctgatgggctttctttcagccttggcggggatgatcatcacggcacggctcaattccgcggagcccaacgccgggctgaatatggagatggatgccatcactgccgtcattatgggcggtacgccgctgcatggcggccaggccgcgctgattgggacgacggtagcagtgctgctgctgagcagcatccgcaattgactgactctgctgcgtgtttcgtcctattatcagcagctgatcaccggcgtgatcctgctgtgcgccgttatcacggcggagctgcggcagcgccgacagcgggtataaaatcggcataagggccaggactggcctttatacataaaatgatatggaggaaaaaacaatgaaaaagttacttgcactgcttttggcaatgctgctggtcgtctcttgtatggcgggctgcggcagcgacaaggcgacagaccctggcagcgcggcgccggcgacaggatcggatgagctggcaaaccagcccgacgcatcgaccggcgatggcgcggaggaggcctctgtcgccgatgcgctgtatgcggaatttgacaagtccatggcggaacagctgggcgatgtcccggctcccaacggcgagaagattggcgcggtcatcatctctctgacaaatcagttctgggccaatatgaaggactgctacgaaactgcagcggagaaactgggcgtcagcattgacgtgcagaccggtacgacggaaggcgatacccagagtcagctggatgttttgatgactatggcggatatggactatgatgtcatcatcgtctcccccattgatgggacaaacctgattcccggtattgtcaagtgcaacgaaaatggtattaaggtcatcaacctgggccccggtgtggatacggacgcgctggcagaggcaggtggccatctcgatggcaagatcactgtcaacttcaaagaacagggtgcgacggttgccaatgatatgatcgcgcggctgccggagggcggcgaggtcgctatcctgcagggcttgaccggcgctggccagtccgaaggccgtaccgccggtgcgacagacgtgctggaagctgcggagaacatcgacctggttgcttccgtcccctgcgattgggatgcgacgaaggcctttgacgcgacgaaggatattctgacggcccatccggacctgaagggcattttcgcctgcaatgacgtgatggcgctggctgcggtcgaggcgctggaagcagagaaccggacggatgtgctggtctacggtgttgactttaccgacgatgcccgggcagcgctgaaggaaggcaaaatgaccggcagtatgtcctactccagcgtgaagtacacggaagctgcactgcagctggctgtggcgatcgcgcaggggaaggaatatgcggatcccatctatctgccgctgacgctggtcacctgtgacaatgttgcagagctggacgactgggcctgatggagcaccttgttgaaacagcgcttttgacccatggcctgcgttcgatcaccaatgcggacctggccgcccagtggcgctgcccggcggcgcgactggcgtgggtcgaccgtgggcgcttgcagatcggcgacctttccgccttcctgccctttcggacccgggcggctgaggtctgccgcattgattgcaaccagttggaggcggcgctgacgcacggtgtcagcggcgcgctgactgccagcgggacgatggcggcctgcgcaaagctggggatcggcctggctgtcacctgcggcatgggcgggatcggccctctgcggggtgaggccctgtgcccggacctgccggcgctttgtcagatcccagtggcgctgatcgcgacctcgcccaaggatatgctggatatcccggcaacgcttgcctggctgcaagcgcggggcgtgcatctggcggggccggattgcaccgggtatttatttgtgcggccgccggtggcgctggagctgcccgggaccgcggtggagacggcagcgcaggtccggcagctgacgcaggacggcggcctgcttctgctgcagcccattccagcggcgcagcggatcaccgaccgcagtattctggaagctgccatggcggcagggcgcgcagcggaggacgccggggcgtactatcaccccgctgccaatggggagattgaccggcggaccggcggcgtctcctcccagatccagctggtgtcgctgcaggagaatatccgcctagctgccagcctggcataaagggaacgctgggtcgcagcaccgtgcaatctgcgcgggctgcggccctttttcgcaatttttggggttcctttttcagccgtgtgtggtataatgtttaagagtataccgttgtgcacagcatttgcgtgacagagataaaaaaggagcaagcgtatgaaacggacgaactatatctcctgggatgaatattttatgggcgtggcgctgctggccgcgcagcgcagtaaggacccgaacacacaggtcggcgcctgcatcgtctcgcaggataatatcatcctctccaccggctataacgggctgcccaacggctgctccgatgatgaatttccctgggagcgccagggggaggagacgaagtacccctatgtggtccatgcggagctgaatgcgatcttgaattccggcgggcgggtgctcaagggcgcgaagctctatgtggcgctgtttccatgcaacgagtgcgccaaggccattatccagagcgggatccgcgaggtcatctatctgagtgataaatacgccgataccgataatgtccgggcgtcgaagcggatgctgcacagtgccggtgtgacctatcggcagttggatacgcagctggaggagatcagtctctcgttttccgtagacgcgggttaaagcgggctgcctgcgggtatcctaaaggtaggtgcgccgatctggtcgcaatggctggatttttgcgaaaaaagtttttctacttctttacttttttcctggcgcatgttattataaacgtgctgccgtatcggcagaccccaattctcagtttcaggagacgcctccggtccggagggctccgccagcctgggacttagttttgcgggtattttcagaaaggtggaacaaattatgatttccaaagaagcaaaggcaaagatcattgccgagaacgcaactcacgaaggcgacactggctctcccgaagtccagatcgcgatcctgacctaccggatcaacgagctgacggagcacctgcgggagcacaagcaggataaccattcccgccgtggcctgctcatgatggttggtaagcgccgcagcctgctggactatctggccaagaaggacatcaaccgttacagagcctgcatcgccaagctgggtatccgtaagtaatatgcacaaaaacgggtggcccacacgccacccgttttctgcgcagcgctggaaaatcaagaccggcgcgggaaatgatttagcagttgaaagtaccaccgccgcggcggcggcagtttcaagtgctaaacctcccgcgccaagcatttttgactgaggaggaaccacatgatcacccataagcagtaccccaaccaccacattttcgaaacagagatcggcggccgcacctttaccgttgagacgggcaaggtcgcagagctggccaacgccgaggcgatctgccgttatggcgataccgtcgtgcttgtcaccgttaccgcttcggcgctgccgaaggtcggcatcgactacttcccgctgacgatcgaagtcgaagagcggatgtacgccgtcggccggattcccggcagcttcaaccgccgggagggccgcccctcggagcgcggcactctgatctctcgcctgatcgaccgccccatgcggcccctgtttgacgacgagctgcgcaacgacgtcgtgctgacgaataccgtcctggcccaggattacgacaatcccgtcgagatcgtggcggccatcggctcctcgctggtcgtggcgtattccgatatcccctggaacggtcccacggcgacgacgaacgtctgctatctcgatggcgaatacatcgtcaacccctcgcaggacgagcgcaacgcgtcccagtgctttgttaccatcgcgtcgacccatgagaaggtcgttatgatcgagacggaagccaaggagattcccgaggatatcctgctcaagtgcatcgagttggcgcacgagacgaacatcaaggtcgttgaatttatcaactccatcgtcgcttgcatcggcaagccgaagttcacatttgaaaaagcagcggtcaaccatgccctgctggacgatctgtgcgcctatggcatggaccagatcgaaaatgcgctggatacgccggacaagaacgtccgcgaagagcgtctgacggcggcccgcgttgattttgcaaaccattttgcggaaaaatatgaggactttgaggataacatcgaggtctgcctgtataagatgcagaagaaggtcgtcaaaaagtggttgctggctggcaagcgcgtcgatggccgcggcatggacgagatccgtccgctggctgcggaagtcggcgttctgccccgggtccacggctccggcctgttcaccagaggccagacccaggtcctgtccatctgcacgctgaataccctgtccatggcccagaagctggataccatctatcaggaggaatccaagcggtatatccatcactacaacttcccggcgttctccacgggcgaggccagagcgagccgctcaacgtcccgccgtgagatcggccacggcagcctggcggaaaaggcactgctgccggtcatcccgccggtggacgaattcccctatgccatccgtgtggtctcggaggtcgtctcctccaacggctccacgtcccagggctccatctgcggctctacgctggcactgatggacgcaggtgtgcccatcaagcggccggtggccggtatctcctgcggcctgatctccgaccaggagacgggcgagtggagaacgtttacggacatccagggcgtggaagacttccacggcgagatggacttcaaggtcgccggtacgacggaaggcgtcacggcgatccagatggacctgaagaacgacggcctgacgatggagatcattgccgatgcgctggagcgctgccgcaaggcccggctggagatcctgcatgagatcatgctgccctgcatcgcagagccgcggaaggaagtctcggaatatgccccgaagatgacgacgatccacatcgatccggacaagatccgtgaggtcatcggctccggcggcaagacgattcagaagatttgcgcagataccggcgctaaggtcgatattgaggatgacggctccgtcttcatctccgcggtcgatcatgaagcggtgcgcgctgcccagaagatgatcgaggacatctgcttcgtgccggaggtcggcaagctgtattacggcaaggtcgtccgcatcctgcccatcggcgcgttcgtcgagctggctccgggcaaggacgggctggtgcatatctccaagctggagaatcgccgggtcgagaaggtggaagacgtcctcaatatcggcgatatgacctgggtcaaggtcatggagatcgacgagaagggccgcgtcaacctgagccggaaggacgccatgcgcgaaatgaacggcgcgggcaagtaattgtatttctgataagatcgcctatgaccggtgcgccgcaccgttcatagctgtatctggctcacggcgggcttttgatgaaacgccaaagaaaaggagcaagcgcatggaacaggcagaatttcttgcggcccagcagcaggccgaagcccagggggcgggctatgctgtcctgaccctggcggcgatcaccgggacgacctcccgtacccaggggaagatgctgatatttgaagacggcagaaccttgggtaccatcggcggcggccc

SEQ ID NO: 1537 - DNA, 13359 bp, Unknown
  16S sequences of unknown bacteria
cagaaattgacctgctttccagcggtactcagtactttgcactttataaaaatgttcattttataacagcagccatatacaatgtttcatttgtagtaaagcctgacggattagcaaatgcggttattaaggtggatggaaaggaagttgcaaatccagttcaattagaggcaggaacatataatattgaggttactgcagatggttatgagcctttgaataaggagatcacaattactgctgatactgcaacacatacacagacattagaattaaataagaaatattcgggtggttcatatattcctaaagacaatgtaaccaataatcccgcagacaagagcacaactgccgaccttactccggttgttaagggagataaggctgaaacaacagtagatgccaaaacagcggataagatcgttgataaggcagtagaaaacaactcgacagaggtagtgattgatgcagcaggcaataacagcgtagcttcatcagaagtagctatacctgaaaagacagttaaggaactggctgaaaaaacagatgccaatctggttattaaaactgataacggtaaagttgatttagacaagactgcgcttgatgcagttgcagcgcaggcaggaaatacaggttttgtcagactgataatcgaaaccattaagtctgatgaaaacatctgccatgtaaacctgaaacttataacatcaaacggagctgttaaggacttcaatggcggtaatgtcaaggttacaattaacctgtccaaggagcttgcagccaaggatgttgtatgtgtatacatcaatgacaacggtatctacacattagtaaacggacagaagaacgcagacggtacatacacctttacaacaggccacttctcagaatatgcagtaatggctaaggatgaggctgataaggctatggctgaacagttagatatcatgattaaggaagttaatcttaaagtaagaacatcaaagacatcaaagaagaacatcaaagctgtagtatcgggagatataactgcgctgacagatgcaggatatacagttaaatacaagttctacagatcagcaaagaaagctgcaggatacaaagctgttaagaccaaggatacaaacacatacatcaacactgccggcaagaaaggcacgaagtactactacaaggctaaggctatggtatacagcggagatactttagcaggacagacagttcttaaacagtgtaaatacggattgagaacttggagtaaataaataactttaacaggaaaggagctcttttgggctcctttcactcatttgtgattgacaattcacagcagcggatatagactttgtatatcagtaaaacagaggtatacgagaatgataacagtaaccagaaacgtgatatgtccgcagtgcggcaggattatgggaacaagagaagcagagtataaacgtgagggatttttgcaaagcgatgatataatttccgatatgatatgcaggaaatgcagagagaaaaaagaacttgaaatcttgaacagagctaagcagagcaaagtgtgaaatgcagctctgtttttaattgcttgacaaaggtatgggtgaaaagtataattagttatacaagttatacttttaaaactggaggtaaacctatgaaatttcctgagggcaaatatatgcagccggttaaaatcggcgagaagggccagatagttattcccaaggccgtaagagatatgtttgacttaaaacccggcgactcggtgcttctgcttgcagacaaggagaaaggcattgcaataacggaactgtcggtggcagaccttatttttgacggaattaaaaaaatgggaggcaaaagcgatgagtgataaaaggggcatagagataaaagacctgaccaaggtgtttggcagcaggacagcagtagataatatttcacttgatataaaggacggagagctgtttgcgctgcttggaattaacggagcaggcaagactaccacaattaaaatgcttacagcgctcagcataccaacctccggagacgcactgcttaacggttattcagttgtaaacagcccggacaaggtaaaggagattgtaaatgtatctccgcaggaaacagcagttgcaggaaacctgacagtaagggaaaacctcgaatttatagcgggggtatatgatgttaaggatagcgacaggattgagaagataatttctgaatttaagtttgaggaaataataaatcagagagcaaaaacactttcgggcggctggcagaggagactttccattgcaatggcgctgatatcggatcccgaaatactgtttttagatgagcctacacttgggcttgacgtcatagcaaggagagagctctggaagataataaaggggctgaaaggacacaagacaataatacttacaactcactatatggaggaggcggaggctcttgcagacagtatagcgattatgaaagcaggccggattacagcctccggcagcgcgcaggagcttattgaaaaagccggaacagaaagctttgaagacgcgtttatcaaacttgtgggaggtgagctgtaatgaaagcgtggaactttgcatcaagaaacataaaggagatattaagggacccgctgggaataatattctgtgtgattttccctgtggctatgataggaatgtttcagcttatagggcattatacacctgatgcatactggtttaacatagatgttcttatgccaggaataatagtatttgcatttgcctttgtaatgctttatatggctatacttgtaagcaaggacaggacaacctcgctgctttcaagactttattcctcacctatgaaaacctcagactatatcatcgggtatggagttccgggaattattctcggatatttacagataattatatgcgttatagtatcatacataattgcggcagcaacaggtgtgagcctcagctttggcggcgtgctgcttaactttgcggtggatctgcctgttatagttgttatgacggctatcggaattctgtttggaagtattctgtcggacaagtcggctccgggagtatcaagcgcaatcataactataagcgcggtgctgggcggcgcgtggatgcctcttgaaactatgggaagtctggagaccgtatgcaaattcctgccgtggtatcctgcaacctgtatgggcagaatggcagtatcgggcgaatacgaaggcttttggatgtaccttgttacggatattgcatatgccgtggtaatttcagtgcttgcggtgattgcatttaaaaaaatgatggtaaaggacaataaataatatggagcagaaaatttgtgtaattacaggcggatcatcaggcatcggtctttgcacggctctcgaaatgaaagcaaagggctatgaggtttttgatataagcagacgcagagagggcgcggcgggtataaaccatatatccgctgacgtgacagatgaaaagcgtataaacgaagccgtatcatatatcatagacaaagcgggcagaatagatgtgctgattaacaatgcaggctttggaatatccggcgctgtcgagtttaccgaaaccgcagacgccagaaaacagtttgatgtcaatttcttcggaatggtcaatatgaacagagccgtaataccgtttatgcgcagagccggaggcggcaggattgtaaatataagctcggtggcggcgcctatagcaataccgtttcaggcatactattcggctgcaaaggctgcaataaactcatatacaatggcgcttatcaatgaggttagaccttacggaataagcgtgtgcgcggttcagcccggagatatatgcacaggatttacgggagctagagaaaaatcatatgcaggcgatgaaatatacagcggcagaatttcaagaagcgttgctgtaatggagcatgatgagcaaaacggcatgaagccggaaactgcggctcatttaatagcaactgtcgcttcagccaaaaaagtaaggccggtatacacgataggctttaaatacaggctgttttgcgcgcttgtcaaaatacttcccgcaggactggtgtcgtatattgtgggcagaatatacggcggatgatatacgcaggatattgttttgcgtctgcgttttgtatataataaatatcaggattaaggaacgagaggagagcgtgtaatatgaaaaaattaatacttaacggaagtcccagacagggaaatacggtagctgcaatcaatgcctttatgggcggtgaagataaggattttgaaatcataaatcttaaggctaaaaaaatagcgccgtgcaaggcctgtcttttctgtcagaatgagggcagctgtgttgacaaagatgataccaatgaagtaatggataaggttgaagaggctgatttcattctgtttgcaacacctgtatactggtggggcgttacagctcagctcaagcttgcaatagacaagctgtatgcaagatgtaatctgctgcagggacagaaaaagaagataggcgttattgccataggtgaagatgagcttgagggacctcagtacaggattatagaggacactttcaggtgtatagcagactatcttggctgggatatggtattctatgagcctgtaagcgccggagaaaaagatgaccttgccaacagacctgatgaccttaaaaagattgcaatgctggcagacaaggtaaaatagttgacacaggcagcgcgatatattaaaatgtttttgtcaggcgaaagccgggcttaaggcaacagattattaacatctgcgggacgatatatatccttcagatgtttttttatattttcgggatatgattggcaagaaaactacggcgaaatgacctaaccccatttacgataaagtaacaattcaggggcagtgaataaaataggtaaggtgataatttatgagagagaaaaagacaaaaacaaatgaacagattgcggttaagatatcagtggtaagcggagcaggcaacattgtgctggcggcattcaaactctttgcgggtatttttggcaggtcggcggctatggtttcagatgccatacactcactgtccgatgtgttcagcagcatggtggttatagcgggagttaaaatagcggctaaggattcagaccacgatcatcagtacggacacgaaagaatagagtgcattgctgcaattatactttcagtggtgctgtgcgctgtcgggcttggaataggatattcaggagttaaaacagttctttacggcaattatgacagcattgaaacaccgggtcttatagcccttattgccgctgtgatttcaatagtatcaaaggaagcgatgttctggtacaccagaaacggagcgaagaagataaactcaagcgcacttatggcagaggcgtggcatcacaggtcagatgtactgtcatcggttggaagctttgcgggaatacttggcgcaaggcttggatttcaggtgcttgaccccattgccagccttataatctgcgtgatgatattaaaggttacggttgatatatttatggaggccgtaggcaagcttacggacaaatcctgtgatgatgaaaccgttgaaaaaatggaagagattgtgatgaagcaggagggtgtgcttgcggttgatgatatcaagacgagaattttcggagcgaagatatatacagatgtagaaatagcggcagacggaaatctgagcctttatgatgcgcacggcatagcggagcgtgtgcataatgaaattgaaaaaaacttccccgatgtcaagcactgtatggtgcatgtcaacccttacaagggcgggcaggattagatgctataagttcaagctttttatttctaggcagtcttttgatggctgcctctctttttaatgcggcggatctgtcaggaagctcctcataatatacaaggctgacaggacggcggcctctggtgtatttggctccgctgccgctgttatgggtatttactctggcttcaatgtctgttgtccagccggtataaaaggtgccgtctgagcattttaaaatatatacatagttctttttttccatacaactttcctcgtatatattataatatcgcttatgccttttgacaagaagccggtatcgtgatagacttaattaactaaaaggaaagtggagagatttatgatagtattattgacaccgtttgaaacgacaacagggctggcggcagctatcgcagcagtaaacattcttatcattatagccataatctttatggaaagaaaaaaccccgaatccactcttgcgtgggtactggtgcttacatttctgccggtggtcggacttatcctgtatatgattttttcacagaatatcgcccgaaaacagatattccggctgaatcccgatgaggagaaattcgtcagctcatcactcaaaaaacagatggatgcaatctcaacgggcaaatacgagtttgttaatgaagaagctgccgaatggagagatatgatcagactcaatcagagatatgacagtgcatatttcactcagaacaatgaggtagagctttttacagacggcagagagaaattcgaaagtctgattgcagacatcgaaaacgccaaaaaaagcatcaatatcgaatactatatcatcaaatgggataaggttgggatcagactcctcaaggccctcgaaaagaaagcaaaagaaggcgttgaggtaaggcttcttatggatgctctcggatgcagacagattacaaagcggagaatacagcctcttatggatgcaggagttaaatgtgcgtttttcttcaggcccaagatgaaaatcttccttatgaggcttaactacagaaaccacaggaaactggttgttatagacaacagcataggatacataggcggattcaatatagcaagagaatatctgggcctcaaagagaaattcggatactggagagatacacatgtcagaataagaggcggagctgtccacgatattaatgcaagattcatactggactggcgttttgcctcaaaagaaaatttggacttttcatcaatatttctcgaagaaccggtaaatgcgggcaatacaggcatacagatagtaacctcaggccccgacaacgaacggcaggaagtcaagagagcgtacatgaagatgattgtatccgcaaagaagaacatatatcttcagacgccatattttgtacctgatgccagcattatagagtcactcaaagttgcggcgctttcgggcatagacgtgagagttatgataccatgcatgcccgatcacatatttgtgtactgggcaacctattcctatgttggagaactgatacgctcaggcgtcaaggtatacatatatgacaacggatttctgcatgccaaaacgcttgttgttgacagtcaggttgcaagcgtgggctcggccaactttgacaagagaagcttttccctgaacttcgaatccaatgcgattatatatgacagggacatagcctgcaaaatggagtcggcatttgaaaacgacatcacactgtgccaccagcttacacaggagctttatgatcagagatcactgattataaggtttaaggagtcaatagcaagacttctgacaaacatattatagagatgaacaaaatcccccgggtcttgcgtagaggacttttcgggggattttaaggttttagcaggaggggatacaaagctctgtgccgactgtcagattatatacatcgacatcggggtttgctttcattatcgcatcgagtgtaaccttgtgcatctttgcaatcatatacagagtgtcacccggttttacaatatgaactgccgcgcatttctttttattatcttccgcaggacccggaatacaaagctcggtgcctatccttaaattatatggatttctgattttgttggctttcataagcagctccacaggcacgtcgaatctgccggatattgaatacagagtatctcccggctcaacacagtatactgcaacacaaacatatctggacattaaatcacctttccttttttatatatactatttaaaagagagcggatttgtgatagaatattataaatttgagcgaaagaggtttgagcattgaagagaagaattgacccgacaattataattattctggcgattatgctttatatgaattacagaaacggcgcattttcaaatccaagagaatggattctgagtatgctgataatgcttccgggaattatagtgggactttcatttcacgaatttgcccacggctttgtatcatacaagctgggcgatcccactcccaaaatacagggcagagttacaataaaccctatggcgcacatagagcctgtgggatttatagctctgctgctttgcggcttcggctggggcatacctgtgtcaatagaccctacctattataagcacaagagaagagatgagcttctggtgtcgctggcaggcgttgttatgaaccttatcattgcggttgtatttgccttttttataaggctgctgtttgcggcaggcatagagggaagcgatcttggagatatactgataaggatttttgtgcaggttgcaataatcaatctggtgcttatgatattcaatcttatcccggtaccaccgcttgacggctttggaataatcacgcagattttcgatctccggaaatacgactggtactacaaagtatacaacaacggattttatatactccttgtccttatactgtttggcattacagacagaattctgtcgcctgcagtaagtgcaatgtggggtgttctgtgcagatacattataggtatatactaaacgaggaggattcaaatggaatacagacagcaggtatatgattttgcagagaaatatatggattattttcttgatatacgcactaccaaagaggatttagaggaggcaggcttcggcaatgcctgctttaatctgggttttggcgctgacggaggacgtaaattcatagttatgtgccacgacagcaatgcctttgacgatacggacgaccttgcaagagttatagacaaggttgacaatatcaatgttttaggctctgcggtttctgccaaatgggacatggcggaaactctggatgagcatactcgcatgtggataagcatagccctcaaaagactcaaggatatgaccgaggagaaggagcctatgactgttcaggagctcagcgcgcttcttgcagagaagagagatgaaatcctcgaaaaaacagaggtcaacacatgggatatcgactgctggatacacgaccctatccagattgtaaatatggactcgggcattgcatacgatgtttcaagagtgatcggtataaccatagatgatatacttgacgcagttgccagagagcagatgatgtcaatgatgttctgatatgaatacagttgagataaagagccttacaggctgctttcccgacagaatagagggaacggataaatggtactctgcgcaggaatgcagggagcctttctgtgatttatatgaagctgaggaaattgcagcctcaggcagagaattttgcggtatgaactgtcacctgattgaatttcctagaggcagggtatacagtccttttgatacggagcagaatgtatatgtcagtgctccggtatattatcagggtaatttctacttcctgaggactgatttcagcagacgtattgcaggcatctacagctatgtaccctctgatagtaatccgtcgctcatagatgagataagccttgatgatatagaggactgctataacctgaggcttacggtatggcctgtaacccttacaagagacgataatacaggagttttacagataatatggcctgagagaacagatattgcccttgatgaaaacgaaacgttgatgttcagggacggcggcagtctgtatctgtcacagtggtgtgaggaaccgtattattacgaactccttacagtcagagatattgcaacaggggaaattatggagaaatcaaagggcagtctttacagaatgcctgagggagtatactggagattatgaaaaaatggggatttgttgaggttttagcctggatagttatggcggcggcctttgcagctgcggcatatgggatgaaaattctgccggatcagattgctgtgcattatgacataaacggtcagattgataaatacggctctcctgcaagtcttttcatacttcctgcaattatgcttttctgccttgcgctggtaagctttgttgcccattttgtcaaaccgcagcactggaatatgccttttgaagtcagagaggcaaacagcgacagagtgtacggagatatcagacttatggtgtatctgatagagcttgaaacctctgtattcacattgtgggctacagtcagggaattcggtcagagtatgaacggtatgggaattgcagtagccgtatatatggttgctatggcggtgacaatagtgcttttgtgcatcaaagccaaagcggacaacaactcagaggaaatataacaggcaaccttacataactgtaaggttggaggcgggaaatgtaagccgaagaaatggctggacatttcctttttatatataatacggatataataaaaaatgatccgggaggaaatgagatggctattttagaggttaacaatgttaaaaaaatatataccacaaggtttggcagcaacaaggtgcaggctttgtcagatgtatcgttttccgttgaagagggcgaatacgttgctgtaatgggcgagtcgggctccggtaaaaccacgctgctgaatataatcgcggcgctggataagcccactgacggcgaggtttacttaaacggcaggaggttttcggatataaaggaggcagagattgctaaattcaggagagagcatctgggatttgtatttcaggagtttaatctgttggataatttctcgattaaagacaacatactgctgccgctggttctggcaggcaaacagtatcacgaaatggacaagaggcttacacctgtggcaagaaagcttggcatatcggagcttctgtcaaaatatccgtatgaggtgtcaggcggtcagaagcagagagcagctgttgcaagagcgataataacagacccgcagcttattctggcggatgagcctacaggagcgctggactccaaagcatcagacgagcttttatcgctgttctcatcaataaataatgacggacagacaataataatggtaacccattccgttaaggctgcatcaaacgcaggcagagtgctgttcataaaagacggcagagtatttcaccagatatacagaggagcaagcagcaatgagcagatgtatcagaaaatatcggatacactgacagtccttgcaaaaggtggtgagcacgatgcgtaaggcattatatatgcgtcttgctgcaggtaatcttaaaaagaaccggcagctttacggtccctaccttatagcctgcatagtaacggtaatgatgatgtgcattatgatattgcttgaaggcgacaggggattaaatacaatcgaaggcggacagtcggttgcagcaacgctgatgttcggatgtatagtaattgcgatcttttcccttataatacttgtgtatataaacagcctgctgataaagcagagaaaaaaagagtttgcgctctataatgtgctgggtatggaaaaacgccatatttcaaaggtgcttttctgggaaagcgcgtatacggcagtaatctcaatcggcgcagggctgatattcggagctgttttttcaaagctgatgcagcttattcttatgaaaataataggcggtgaaatcagcttcagtatagatgtttcattttctgtgctggtatttacggcggcaatatttgcggtgttcttcctgctggtgctgcttatgaacataagaaccatcagaattgcgcagcctgtcgagttgctcagagggggcagcgagggagagcgcgagccgaagtcaaaatgggttcttgcagtgcttggcgttgtattccttgcggcaggatatgttatgtctattatgactaaagatgtggtttctgccataactcggtttttcatagcggttatatgcgtaatcatcggaacctatctgatgttcatagcgttcagtatagttctgctcaaagggctcaaaaagaacaaacgatattactatcagacaaaacactttgcaactgtttccggtatgatttacagaatgaaaagaaatgcggcggggcttgccagcatatgtattctgtcaactatggtaatcgttacggtgtcaactactgtatgtctttatgcaggcatcggcgacattataaaacaagcttatccttacgatgtcaacgtgaaatactatccgtacagtcagcagacatcagatacgctttccgcggatgccagggacattgcgcagcagcagggtgttgaaatcaaagaactctatgctttcagcaagctgagctttatggcaaacagaaaaggtgatacgctgagcattgataaggacacagccgacggccgtattacaaatgatggatttgtcgatgtcaccgttataactccggcagattacaaaagaattacaggggaagacgcaggacttaaaaaaggggaagtgctgatatacagtgaaaacggcggctttggcgataaagtggagatattgggagaagagtacaaggcttcagaaataaaagagtttccggaagcaacgctttcaagctcggctgcttcacgctgcggtattgttgcagacagcagtgaggcggtagaggctataagccggagatacgaaaagcttatggactgtgagtcatatataaacgggggaatgtatataaatcttgacggcactgatgatgaaaaaatagcttttaccggtgagcttaatgacagaatacaggataatacaggagaaaagctgaattatgaatttatgtcggcagaaagcagacagcttatcgaaaaagacggaagctattcgttttacggagcgtttttcttcttaggtatgttcctgggacttgtatttatctttgcaactgttatgatcatatactacaaacaggtttcagaggggtatgatgacaggaaaagatttgatataatgcagaaggtgggaatgacagaggcggaggtcaagcagacaatacgctcacaggtgctgattgtattctttcttcctctggcggcagcggcaatgcacgtggcgtttgcattccctatgataaggagcatacttgcagcgttcagtatgacc

SEQ ID NO: 1538 - DNA, 9656 bp, Unknown
  16S sequences of unknown bacteria
tcgccgcgacgccgcccttgttaatcaggtcgacgatcagcttcatttcgtggatgcactcaaagtaagcgttctccggctcatagcccgcctcgaccaggacctcaaagccgcagcgcatcagatcgaccacgccgccgcacaggactgtctgttcgccgaacaggtccgtctcggtctcgtcgtgcatcgtcgtctccataacgcccgcacgcgcaccgccgatgccggcaatatacgccagcgcgatatcatagcacttgccggtggcattctgctctaccgcgaccaggcacggaacgcccttgcctgcaacatactggctgcggacggtatggccggggcccttgggcgcagccatgaacacatcgacgtctgccgggggaacgatctgcttgtagcggatattgaagccatgggcaaaggcaatggccttgcctgcggtcagatacggtgcgatatcctgcttgtacattgccgcctggttctcatcgttgatgaggatcatgataatatcggcagcctgggccgcctcggcgacggtcataacatggaagccgtccttctccgcgaccggccaggacttgccgcccttacgcaggccaacgatgacgtcacagccggagtcccgcaggttcagtgcatgggcatgcccctgggagccgtagccgatgatggcgatctttttcccatccaacttactgatgtcgcagtctttttcatagtacatttttgccataatcgaactctcctttttcttttgtggattcgtaaattgtatctgtaccccgttccagtgcgaccataccggtccgtaccagctccaggatgccgagctctttcacgaggccgacaatggcctcgaccttgctctcctcgccgatcatcgcaatggtcagcgtcgagggcgaaacgtcaatgatcgacgcgcggaaaatgcttgccacctgcatgacccggttacaggtctcagtatccggggtggagaccttcatgaggatcatctcccggcgcagggaattatccggccgcagcagcttaaccgaatggacaggcagcagcttacgcagctgattgcacagcagctccgcgtggcgctggtccgccagcacctcaatcgtaatacgcgataccttggggtcgctggtagtccccaccgccaacgactcaatgttatagcccttccgggagaacagtcgggagacctgggacaggacgcccgcttcattatccaccagaacggacaaagaacgtctttcctccatagccgcctccttagtctaccaggaagttggtgatcctgccgccgccgggcaccatcgggcgcaccatctcgtccatctcaatggcgcagtcgatgagataaccgtggccgcagtgcagggcttccgtcagcgcccgctccagctctgcgacattctgcacccgcctgccagacaagccatatgcctcagccagcttgacaaaatccgggccgcggtccagcgtcgtctgggaatagtggccgttgtagatcaaggtctgccactggcgaaccatgcccagcgtcttattattataaatgatggtgatgatcggcagcttataatactgctccgtcgccagctcattgcagttcatccggaagcttccgtcgccggtgatgtggacaacggtcttttccgggttgccgacctttgcgccgatggcggcgcccagaccgaagcccatggtgccgaaaccgccggaggtcagcagctgaccggggtagtcatagtggaaatgctgcgcgacccacatctgatgctgcccgacgtccgtcgctacgacagtatccatcggacacaggcgggcaatggcatcggagatctgcttcggcgtcagcgtatcgctggcctcgtcgtactccgtctctgttttaaaggagaagacatagcgcttccaatcgccgtgatgctgctgggtcagccgctcgttcaaaagctgcaggacccgcttggcgtcgccgatgatatgatggtctgtctggacattcttgttaatctctgcccggtcaatgtcgatctggacgatccttgcctggctggcaaagctcttcgggtccagcgcgacccggtcggagaaccgacagccgacggcaatcagcagatcgcagctgtcgcaggcgatattcgaggcctgcgtcccgtgcatcccgatcatacccgttgtcagcggattgcggccccggaagccaccggcacccatcagggtaatggcgaccggcgcgtccatcttctcggcaaactcggtaaactcccggtctgcccggccacggacaacgccaccgccgcagatcagcagcggcttttccgcctggcggatcatatccaccaggatctgcacatcgccaaggtccggctccggcagcttcaattcatgggaggcccggcggatcagcgcgcccaggcggccctggctcgcgtgctcctcccggggcagcggcgtgaactccgccgtctctgcagtggcattttttacaatgtcgatcaaaaccggacccgggcggccgccccgggcgacggcgaacgcctcccggacgatatccgccatctctgccgccgaatgcaccataaaattgcatttggtgatcggcatcgtgatcccggtgatatcgacctcctggaaggaatccttcccaatgaggttttccgtcacgttacaagtgataaagacggtaggggagctgtccatatacgcggtggcgatccccgtcgtcaggttcgtgcagccgggaccagatgttgcgaagcacacgccgaccttgccggtggaccgggcgtatccgtccgctgcgtgggatgcgccctgctcatgggctgtcagaatatgcttgatcttcccctcatagttgtataactcgtcgtagacattcaaaatcgtaccaccggggtaaccaaaaaccgtatccacatcctgctccagcaggcattccaaaagaatttttgcaccagtcatctgcatacggcatttctcctttctatgcgttgcgcaggcgaggggcaaagcgcccgggctaccgagatatgtagcaaaaagccctgaagccacacggcttcagggacgaatcaatcgcggtaccaccctgattatcgcatccctaaggacggacgatcactcaaatcggagctccagcaagctcctagcctgtaacggggcaaccgtaacaccctactcggtctccctttggggcgctctgctcaggaagcagactgcacatggtcttcggcaccggctcacagcgaccgccgactctctgaagcattccaaccaaggcataattccttcaacgcatttctcaattattttctgcatcacatgctaccacaccctccccgtattgtcaagtcaaatttttcgcttttggaatattttttaccagcaatggcccgatggccgggcaggggttgtattttacatccgaatttgatacaataagccccgaatcttgacagaaatgaggcaatggcatggcgtgtatcacccttcggcatgtgaataaatcctatacctcctacagcacggagatcgtactcacagggcaggcgagagagagccgcacccggcaggtcctgcaggatctgacggtggaatttccggtggggcagctgacggtcatcgtcggccgcagcggctgcggcaagagcaccctgctcaagctcctggccgggacggagacgccggacgacggcgaattgatcttgcccaccggctggcacagcgccatgctgagcccggacccgtatgtcatcacctggaccaatgtgcagcgcaacgtcgccatggcctgcggcgtcggcaaaacgccgaaggagcgctatgaaaaggcccgggacttcgtccgcttggtcggcctggaggaatatgcggacctgaccccgatggagctctccaccggcatgaagcagcgcctgggcctggcccgggtcctggcaagccaggcagagctgctgctgatggacgagccctttgcctccctagactttctcacccggggcgagctgcagcggcagctgctggcgattcaggaaaagatgccccggacgatcgtcctggtcacgcatcagctggaggaagcgcttttgctggggcagcggatcatcgtcatgcacccggacagcagcatccgggaatatgacctgaccgggatggcctacccccgggacctagagtccccccagctgcggctactaaagcaggagatcacagacgagtgcaaaaagccctcggcccggtgacctagcctttcttaaatacaaacgaccggctgactgcattgcagtcagccggtcctctttgctctattctattattctgcagcctttgctttgcgggaaagcatcgtgttcaccaggatgccgaggatcagcgcgcaggcaacggtccgaatggtgactgcgccgaagctgaccgtcatcccgccgacaccggtgatgaaaatgaccgaagctgtgaagagattctggttcgtattgaggtccaccccctgcagcattttaaagccggagacggaaataaacccatacagcgccacacagacgccgcccattacgcaggcgggaatcgtctgcagaaaggccatcagcgggctgacgaatgaaataatgatacacagaatcgccgcaccccagatgctgacggtcgacgcgttgcgggtgatggccacgcaggcgatggactcgccataggtcgtgttcgggcagccaccgaagaaggcgccaactgccgagccgatgccgtctcccagcagggtccgggtcaggccgggcttttccagcaggtccacgccaataatggcagagaggttcttatgatcagccaggtgctccgcaaagacaacgaacgcgaccgggacatacgctgtgaccagggtcaggatgtaggttccgtcgatctccttccagccagcggccgccttcagaaaggtgaaatcgggcacggcgaagatgccgcagttctggaacgcgctgtagtcaatcaccagcagggaatccatccccgaggcattgccgatcagatagaagaccgttgccgccagatacccagccaggatgccgatgataaaggggatcagctgcagcatcttcttgccataggtcgagacaagcatcgtgacccccagagcgatcaggccgcagaccaggccgatcagcggggagccggtcgcaccgccgctgttgagatcgcccaccgcgttgcctgccagggacagaccaatgatcgcgaccgtcgggccaatgacgaccggcggcatcagcttattgatccacgccacgccccagagcttgacgatgatggcaagcaggacatagacgacgcccgccatagccgcgccgagaatcagcccagcgtagcccgcctgcatggagaccgcaccggcaaaggccgaaagcatcggcccgataaaggcaaacgacgagcccaggaacactgggctgctgctcttggtaaagagcagatagacgacagagccaacgcccgcgccgaacagcgccgcggaagccgtcatctccgcgccgcaggcattgttgataacagcaggcacggcgatcgtcgccgccatgattgccaacagctgctgaatggcaaacaggacgacctgtccaaaccggggcttatctttaatattgtagatcaggtccatttttctctccttattttctatttctcttctctttctgcgcctgcgcggatggcaggcatgacaaaagcagccgccgcaacgatgcggcagctgcttaaatcattgaattacagcgctttctttgcaacttcaaccagagccgcaaaagccggtgcatcgttgatggccatctcggagagggtcttccggttcatctccacgccagcctttttcaggccgttcatgaaacgggagtaattgataccgtagggtgcaacagcggcggagattctcgtgatccacaggcggcggaaatctctcttcttcagcttacggcccgtataggcatatacgccggacttcttaacggcctgcttggccattttaaagtgggtgctcttggaaccccaataggacttcgccagcttcagggttttatttcttcttttgcgcgtcatcattgcgccttttactcttgccattccaatatcctcctattccggcttatttgtagggaatcatctttttgatggcttcctggttggtgacgtctgcataagtcgtgcttctcagacggcggccgcgcttggtgtctttcttcgtgaggatatggctcttgaaagcgtgcgctctcttgactttcccggacttggtcaggttaaatctttttttcgcaccgctgtgcgtcttcagtttcggcatgttgtttctccttccgtattataaaaactctagggtctttactgcttcttcggcgacaggaacatcgacatatgacgcccgtccagcttgggattcttttccacgttggcaagctctgcgcaatcctggccgaatttcaccagcaactgctccccgatattggtatgagccatttcacgcccgcggaaacggactgtgaccttgacccggttaccgtccttcaggaacttcatcgcatttttgaccttgacattgaaatcattggtgtcgatcccgggagacatgcgaatctccttgatttcgaccacgtgctggtttttcttggcttccttttccttcttcatctgctcgaagcggaatttgccatagtccatgatcttgcagaccggcgggaccgcattgggagagatttttaccagatcataatcttgctcttccgcctgcttaagcgcatcggcagcagacataatcccaagcatcgtgccatcggggccgatgactctgacctctttgtcccgaatttcttcgttgagctgatggtctaatttagcgatggtaagcacctccaaaacaaaatacaaaaaatgcggatgccacactgcacccgcacacaaaaagccgggcgccgtggcccagactgctttgttgacctcttcgtgtgacactggaggtgaggtgctgctgctccttcttccttttagcctgattactataccacggagccgggcggttgtcaacaggtatttcccgttttttcatgcaggcggcataaaaatcggcagcggcggcgcctccagcgtgaaaagaaccaacgcacagccatacagccctgcaagcatcagcaactcccccagccgccgttccagccgccgggcactgctccagcggaaggccgcccaaaacccggcgcagaccgtcccggcgtaaagcccgatgtccaaggccaggccgtgcagcccaaagcctgccgcagcaagataatagaccgcgcacagcgccaccggcattgccagcagggcagccaggaaggcgctccagacccgccgctcgccccaacggcggcccagcgccagcgccgccgggatgaccggccagaacagcagcttcaaatgttcccagacgctctcattgaccggggcaaacagccccacaagaaaatgcgggcaccaatcatacagaaaatgccaggcgcagcccaggcagaccgtcgccgcagcagcggcggcaaaccattttttcataaacaaccctccctgccatacatttatgacgagggagggaaattatgctagcccgccagaatatccgcccggacgacgccgggctgctcgctgatctttcgcagcagctcctccaccgggcagtgcaggcccatcgtctcggaggagatcgtcacgctggcgcagtcgttggtcggaatcgtctggttgatggtaagtatatttgcgccgcattgggcaaaaatggtaagtatcgacgacagcaggcccggcatatcccgcaggatcatctggaacgtaatgatcctgcctgccatcatattttgaaaggggaagatggagtcccggtatttataaaacgcgctgcgggagatatccatcatcttcgccgcgtcgtgcaccgtggagacctcgccggtctggagcatccgcttggcctcggccaccttgagaaagatctccggcagcgcagtggcctctaccagatagtatttgggctgctgcgccatactgtcccctccagtgtcgtcgtaacaaaatcatgtgtttttccacgcgatacatcatatcacagtccccggcaaaaagcaacaagaaaaaccggcagaaaggagtcatgcgatggtagagcggcgttttctcaagacgctcgggacaatcctggcggcaatcgccctggtctgggtcctggcagcctttggactgggggtcctgctgccatttttgctgggctatctggcggcacggctggcggaaccgctggtctgccgcctgtccgcccatgggcgtctgccccgctgggcctgcagcgggctgtgtgtcagcggcgttctgctcgtcctcggcctgctgctgtatgggctgggccgggtgctgttttccgaagccgccgccttctcccggcaggcgccacagctgctgcggtcgctggccgggccgacgcagcagctgcgcgcctggcttgagcagttggcagaccgtgcgccggacgggctcgggccagcgctgcagagctgggtcacgcggctgttcaccggcggcagtattctggcagaaaagggctcggaggccattttgaccgccgcctccggcttgatcggtgcgctgccggacctgctgctattcgctgtcacggcggtcctagccagctttatgatctccgcccagctcccggcgctgcggcaggccgttttgcggctgctgccgaaaaaatggcacgcccagtacagtgcctgcctgcagcggctgaaaagcgccctgggcggctggttccgggctcagctcaagcttatgggcgtgaccttcggcattttgaccgccgggtttctcctgctgggcatcgacttcccactgctgtttgccgggctgacctgtctgattgacgcgctgcccatcttcgggacgggaacggtgctgatcccgtgggccatcgtctgctttctgcgccgggaggcataccgggctgtgggcctgctggtgctttacgccgtggcgtcgctgacccgtacaagcctggaaccccggctcgtcggcaagcagctggggctaaaccccctgctgacactgcttgctatgtacgccgggttccgcctgtgcggcgtgctggggatgatcctctttcccattgccgccattgtcctgcggcagcttctggaattggtggagcgtaatccgctcccgccaaagcgcccggggtaggcaggtcttgttttttccccgcgcaccagctacaataggggcagaacggcggcgcaaacaccggacagggaggggcataccatggaattgcattgcatcgcagcgcgcagcggcaaattatcgtcatttttgcagcgggagctgcgctgctcctcctcgtttatccataagacaaaatggctccaatgcttttatgtcaatggcgtcccccagcggacaaattatatcgtcagccccggtgatgagatccgcgtgcccatcgtcgagcccacgccggactatccggcggaggcagggccgctggatatcctctatgaggacgaagccgtcatcgcgttggacaagcccgccgggctcctgatgcaccccagtttccaccgcaacaccgggacgct

SEQ ID NO: 1539 - DNA, 32759 bp, Unknown
  16S sequences of unknown bacteria
tcgtcggcagcgtcagatgtgtataagagacagccgcagccgttcgtcggtgtaggtcagcggcatccggatgccggtaatacgtatcatataccccgtcccttttctttcacgcagtcccaaagccccgcggccattgccctggccgccgcgaaggccgacgcccaggcccattgcaggttgaacccgccgcagtcgccgtcgatatccagcacctcgcccgccgcgtacagccccttgacccggcgggattccagggtggcgggatcgaaatccttggtcagaataccgcccgccgtcacctgggcggcggccagcccctgggtgccggtgaccgcaatgcgccaccctttgacgagggaggcgagccggcggacgtccttgtcggtcagcgacgccgccggattcgtcagcggcccgcagccggcggcccgcagcaccgtctggcccagccgcttttgcagcagcccggtgaaataatcctccagccgccgccccggcagttcccgccgctgcgcaagccggtcggccagcgcttcccacgacagagtggggagcagatccagctcggcttccagccggcccggccggccctcctgctcccatgccgccgcgtgacgggaaatctgcatcaccgccgggccggacaagccgtattcggtgaagaggatttcgccggcctccgccgccagccgccggccgtccagccgcaaggccgccgtcccgtccacccgcacgcccttgagcgccttgacaaaggcggtgtcggttcgtatttgtacaatggaagggaaaaccggggcctttccatgtcccagcgccgtcaacaggccgtagccgtcagcggagccgccgagggagggggaagccgcgccgccgcagcagaccagcacccggcgggcccgtacctgcccgtccggcagggtgagaaggaagtccccgccctccggccgaatatcccgcaccgccgcgccgcagcgctcctccacgcccagcgccgccgcctccagccgcaggcagtccagcaccgccgccgcctgggcgggcagtggatagacttttccgtcctcccgcgccgcgcattccaccccgatggaggcgaaaaacgccatagcgtcggcgggggtacaggcggccagcgccggccggacaaaggccgggtccgccccatggtaccggctctcctgcgcccccaggttggagaggttgcaggtgccgttgccggtggccagcagctttttccccacccggggccctttttcaacgagcaggatggccgcggttttccgccgccgtcccgcctcccgggcaaggcacaccgccgccgtcagtccggccgcgccgccgccgaccactatggcatcgtacaggggttccacgctcaccgcgctcccgcctttcctttatggttcctccagtataccaagacctgccggatttgacaatcgggtttttctttacaagaattggaaatggtgtataatatgcagtaacaacctataaggaggcagccgtatgcccaaatcccccaatcagaagatgaaaccccttcttctgcagcgcatcctgctggagcgcaccgatgaggatcacggtttgacggtgccggagcttatcgccctgctggaggaggagggcgtcgccgccgaacgcaaaagcgtgtattccgatttgcagacgctggccgacttcggcctggacatcgtcaagcgcaaggaaagcgggaaggtggtgtattatgtgggggcccgcaccttcgaactccccgagctcaagctgctggtggacgcggtgcagtcctcccgcttcatcacccataaaaagtccaaccagcttattcagaaggtagagggcttcgcaagccggtaccaggcgcagcagctgcagcggcaggtgtttgtcaccaaccgggtcaagaccatgaacgaaagcatctacatcaacgtggacaaaatctacgaggccatcgccgccaaccggcgcatcacctatcggtatctcgattgggccttccgggacggggcagcgggcggctatgaaaagcagttccgccggcaggggaaaacctaccgggtcagtccctggtccctctgctgggcagacgagcggtattatatgattggcttcgattccgaggcggggcttatcaagcattaccgggtggataaaatgctgggcatcgccctgacggacgaaccccgggacggccaagagcactttgagcatttcgatatggccgtgtatacccgccaggttttcggtatgttcggcggcaatgagcagaccgtgaccctccggtttgagaaccggctgctgggcgtggtgctcgaccgcttcggagaggatgtacccatccgccgggaggacgcggataccttccaggtgcgggtgagggtggccgtcagccctcagttcctgtcctgggtattcagcttcggcggcggcgcccgcatcgtttcacccgccgcggtggcggataccatgcgggagcagctggccagtgtgatgaagcaatacacggaaaccgagggccggtgacaagctgacgtacataacgacttttccctgctgctttccttgcaagtgtttcctcttcaactgccttaatgtgtgtatactttcttttggacacaggaacaccccctgatgtagtctgttttcctacatcagggggtgtttgccagtttaggagccgctgcccggtttgctgccggtcagcccttcctgctccatcatagctttcatgaccgatatgtcggcggacacgtccatgcgttcctcttgcatcaggctgtccagcaggttgacgaacgctttgttgacagtgtccagcgcgtcctcgatttccttcttggtttcctgctgctgctcggtgggcatgggctggtcgttgaatttcttgtatgcctccagcagcttgagggtggtaggcagatagtagctgaggaaccgccggatttccggcagcttgtgaggatgctcgcccacataatggaatatcgcggccgctgttttttccatctcgctgattttctgcgaaatggcttcttccggaatgccgtcgttgcagtcgcggatttgctggaggatccggttggcctcttcctccagggccttggcctcggcggagcgttcctgcttgggagcctgctttttcaactcctcctgcttctgcttggcggccagataggcctgataggtttcttcgtccattatgaaatattttccctcgtcgtccacatgggcgccaggcagcatcccatactgaatcatccggcgcagatccttggcgacaaatttgggcgtgccgccggtgatgtaagccagctcttcgatgggccggaaggcttcgcccgccatggcctccttgtaccgccggcagcggcgcacccgcccgcgcaggcggctgccgcagcccagcaggacgatacacagcaccagcaggggcaggaacacgcccagccccaggccggtgaacagctgggcccagcccagcgccagggagaggatccccatcaccagcacggcggtgaatacgatgcccaggcccagtgcgccgaacacggtgaacagcacgcccgccgcgctgcccggcagcttatccttgcgcttaataaccggctgcgcccgcatgggagggggcggcgtggccggccggggccggggcggctgcggggggacgggcctctggggcggcaccggccgctgctgcgcctgcgacggcgcaggtgggtagggatccgtgtaggtataggtgtacgtgtagcttccgttaccactcgtctcggtgtaccccgcggacggcggcaccggccccgtcggcggcacgccggtcttgaaagcggacttgagatccttcgacaaatcctgggtggcggccttgatggtggttttcaaatcgttgaattcctgcatattcaccacggacatgaccgaatccttgatttgccggcccaaatccttgaattcattaaaatcgttttggctcattgtcatttccctcattcaatcagatgatgtggcctttggctatagtataacgcaatcggcagggattcacaacagccagcgaggattcttaaccttctgttaatggatcatttagaacttccgccgaattgtccctccggccggccatccggcggtgctgccggcagccggacggtgaagatggtgcgttcggcgctgctcgcggcggtgatggtgccgtggtgcagctccacgatctgcttggcgatggccagccccagccccgcgccgccggtgcggctctgccgggcggaatccagccggaaaaacttttcaaacagccggctgagttgggcgtcagagatgggatcccccgcgttgctcaccatgatgcgcaccgcgtccccttctctggccgccgtcagccggatgtcggtggagggatagctgtagttgaccgcgttgcgcagcaggttgtccatcacccgggccagcttgtcggcgtcggcgtacaggatgagattctcctccagctcggtggaaagggtcagatccttttccgccagcatgggatagaactcgtcggcgatttggtacagcataaccgtcaggtgaatcttgttggtttccagggtgatgctctgcaggttgaaccgggtgatttcaaaaaattcgttgatcagctgctcgagccggtaggccttctctagcgcgatgccggtgtattttgcccgctggctcgcgggcatgtcgggggcctcctgcagcaggctgacatacccgatgacggaggtcagcggggtcttgaggtcgtgggccagatacaccaccaggtcgttcttgcgctgctctgcctcccgggccagccgttcactgttcagggcgctgtatttgatggagttgagcttgaactgcacgtcctccaactccttgggcagcaggatgggcgcgtcctccttgttgaacaccatgtccaccgattccgcgatgggggtgacgtacccgatggtgcgggaaatggtgcggtagatgaccacccccatcaccacgacgtatccaaaggtcagccagaacaccttggtgtccatcagggaatagtacatctgcgtgcccagcagcggcagcagcagattggacaggaacgtccgcagggcggtgaaggataggtacagcagccccagatacaagagggacaccaggacggcggtcagcagaaaacggagcatgatgctttttttcagcgcccgttccagggttttacttttcaattttgtaccccaccccccagaccgtcttaataaaccgtgggtttttgggcggctcgtgcattttttcccgcagccgccggatgtggaccatcaccgtgttgttggaattgaagtatttctcgccccaggccttttcaaacagctcctcgctggacagcacccgcccccggttttcgcacagcagccacagcaggttgaattcgatgggggtcagtaccaggggctgatcgtacagggtgcaggtgtgggtttccttgttgatgaccagcccgttgaaatcgatgaccgtggtttcctccgccccctcgttgtaccgggtggcccggcgcagctgggccttgacccgcgccaccacctccaacgggctgaagggcttggtgatgtagtcgtcggccccgatggacaggccggtgatcttatccagctcctccaccttggcggtcagcatgatcaccggaaaccggtagccctcccggatgcgccggcagatggagaagccgtccatgtcgggcagcatcacgtccagcagcgccaaatcgatttttttcgcctccagggccttgagcgcgtccagccccgtgtagcaggtgtacaccgtgaatccctcgttggtcaggtacagctccatcaaatcggcgatttccttctcgtcgtccaccaccaatatgttcatggctctcgcctccgctttttcggattcccgccccacggcgggacggcttcttttattcttttactatacatcatgggcgcccggcctgtccagcgccgtaagagaatgttaagaagtccagtttcggtcaacatacgccctggcagttttacgctttagcaagtaaaaatggggcttgacttgtttgaaaaaggcgcttataatgaagaacaaagccgccccaaaggggggcccggcaagcgggcttgccggactccggcgcggctaaccaacaggtaaaggacggatttggatgacgaccggcgcattggccatggttcgctgcctggagctggagggcgtgaagaccgccttcggctatcccggcgcggctatctgccccttttacgacgccctggcgggcagcccgattcaccatgtgctggtacgcaccgagcagaacgcggcccacgccgccagcggctacgcccgcatttccggggaggtgggggtgtgcatcgctacctccggccccggcgcgaccaatctgctcaccggcatcgcctcggcctatatggactctatccccttggtggtgatcaccggccaggtgcgcagcgacctgctgggccgcgacgtgttccaggaggcggatattaccggcgccgccgagccgttcaccaagcacagctacatcgtgtcccgggcatcggatattccccgtattttcaaggaggcgtttcatatcgcctccaccggtcggcccggcccggtgctcatcgacgtgcccatcgatatgcagcagaagtccattcccgacttcgattacagccgcccggtggacatcatcggctataagccccgggtgcagggccattccctccagattaaaaaagcggtggatgccctgcgaacctgcaagcgtccggtgatctgcgtgggcggcggggtgttctccgccggcgcgcagaaggagctgtgcgcttttatcgaaaagctgaatcttcccgccatctccaccatgatgggcatcggcgcgctgcccaccgcccatcctctcaacctggggatgctgggctcccacggctgcgcccccgccaataaggccatccgggacgcggatttggtcattatggccggcgcccgggtgggggacagggccgtggccgctcccggtcaggtggccacccgcgccaaggtcatccacatcgacgtggatcccgccgagatcggcaagaatatgcccgcccatatcccgattgtgggcgatttgaagcacgtgctggaggagctgaccaagcacgtcgactgccaggctccccaggagtgggtgcaagcggtcaccgaacgcaagaaacgctacgccgccaaggccatcgagccggtggagggctttgtggaacccaagaccttcatgcatgcgctggcccgccggatggaggccgacggcatcctctgcgccgacgtgggacaaaaccagatttggtcggccaaccactttgagatccggcagggccggttcctcacctccggcggcatgggcaccatggggtattccgtcccctgcgccgtgggggccaaaagcgccgcccccggccgtcaggtctgcgcggtatgcggcgacggctccttccagatgagtatgatggagctgggcaccatctgccaggagggcctgggcgtcaagattattatcatgcgcaacacccgcctgggcatggtgcgggagctgcaggataatctgtataagggcgtgcattccgccgtctatctggacggcagccccgactttgccaaaatcgcggaggcctacggcatccggtcccgcacggtttcctccaacgaggaggccgccggcgccctggaggagatgtgggccgacgataagccctatctcctggtctgccaggtcagcccggagtacccctccctgtaagcgggccgttcattctccggtctatggaaaggagtcagccgtttctatgaaatacaccatgtccgtgctggtggagaaccagccgggcgtcctgtccagggtgtccggcctgttttcccgccgcggcttcaatatcgactccctggcggtgggcgtcaccgaggatcccaccatttcccgcatgaccattgtggtggacggggatgaatacgtggtcgagcagctggagaagcagctcaacaaggtcattccggtcatcaaggtcaaaactctggagaccggcgcgtacattccccgcaccctttccctcatcaaggtagcggtgggcgcctcccaacgggcggaaatcatgcgggttaccgagctgatgggcgctaaaatcgtggacgccacccgcaccaccatgacggtggaattctccgataccgccgagcgcaccgaaaccctggaaaccctgctgcgtccctacggcgtcaaggaaatcgtgcgcaccggcatcatcgccatcgaaaaaggcccggatcccacccggacggtgaaaaaataagtcccccgtgtatatgacgaccctttgcgagaccgccatatataacataaaattttgccgccaagcggcacaggaggagtacattatggcaaaaatctactaccagaacgactgcaacctcagcgtgctcaaggacaagaccgtggccatcatcggctatggctcccagggccatgctcatgccctgaacctgcatgagagcggcgtcaacgtcatcgtcggcctgtacaacggctccaagagctgggccaaggccgaggccgccggcctgaaggtcgccaccgccgccgaagccgccaaggccgccgacgtcatcatgatcctcatcaacgacgagaagcaggccgatatgtacaagaaggatatcgagcccaacctgaccgctggcaaggccctggcctttgcccatggcttcagcatccacttcggccagattcagccccccaaggatgtggacgtgttcatgattgcccccaaaggccccggccacactgtgcgcagcgagtatgtggagggcaagggcgtgccctgcctggtggccattcatcaggatgcttccggccgcgccctggacgtggctctcgcctatgcggcgggcatcggcggcgcccgtgccggtgtgctggaaaccacctttaagaccgagaccgaaaccgacctgttcggcgagcaggccgtgctctgcggcggcgtgaccgccctgatgcaggcgggcttcgagacgctggtcgaggccggctacgatccccgcaacgcgtatttcgagtgcatccacgagatgaagctcatcgtcgacctcatctataagggcggcttctccatgatgcggtactccatctccgacaccgccgaattcggcgattacgagaccggcaagcgcctggtcaccgaggagaccaaaaaagagatgaagaagatcctggaggaaatccaggacggtaccttcgcctccaagtggatcaatgagaacaaagtgggccgtccccacttcaacgcctgccgccgcatgcatgccgagcatgagctcgagagcgtcggcaaggagctgcgcaagctctacagctggaacgaagaagaataatccgcgaacgaaaaagcgcccggccatgttgccgggcgctttttcgtcctccgccggtgtcactcccggcccttttcctcccgggcgcgccggatgccctccagccgctcgccgaacccggcttcctccccgaaggggcccgggtggtaataccgccgtcccgccaggctgtccggcaggcactgcatggccgtgacgttgtaggccgccgtggggtcgaactggtatccctgcccgtaccccagctccttcatcaggccggtgggcgcgttgcggatttgcatgggcaccggctccgccaggctttccctcgcgtcccgcgccgccgcggcataggcactgtccaccgcccgggacttgggggccagggccagataggtgacggcgtgggccagatgcacattgcattccggcatcccgagaaaatggcaggcctgataggccgccaccgtgatttccagcgcccggctgtccgccatgccgatgtcctcgcttgcgaaccggatcaggcggcgggcgatgtacaggggatcctccccggcttccagcatccgggccgtccagtacagcgccgcatccggatcgctgttgcgcagggatttatggatggccgagatgatgttgtagtgctcctccgcccgcttgtcgtacagcagcgcctttttccccaggcactgctccaccaccgcccgcgtgacggtaatatccccctgccggtcgacctcgccgttgagcaccaccatctccagggtgttcagcgccacccgggcgtccccattagcaaacgcggccacgatgtccaccagttcgtccgccatggccaccgcctgccccccgaagcccgccgggctggtcagcgcccgcctcagcagcgccgccacatcctcctgggacagggcgttcagcacgaacaccttgcaccgggagagcagggccgcgttgacctcaaaggagggattttcggtggtggcgccaatgaggatgatgctcccctgttccacgtaggggagaaaggcatcctgctgggccttgttgaaccggtggatttcatccacgaacacgatggtgcgcgcgccggacaaccgccggcgctccgcctcgcccatgacctccttgatctccttgatgccgctggacaccgcgctgaaattgatgaactccgagcgggtctggctggcgatgacccgggccagggtggtcttgcccacccccggcggcccccagaatatcatggaggggagccggtcggaggcgatcatccgccggaggattttcccctctcccagcagatgctgctgtccggcgatgtcctccaggctttcaggccgcatccggctggccagcggctcgagctcgttcgtcgtgaacagggactcctgaaacatgcccatcccctcctataagcggcgggccagggccgccaaatcgtccgcgcacgcgtacagaaaatcctgataggggcagtacccgtcctccgcggcgaaaaactcccgggtgcgccggcagcccccgccgcaaagggggaaggccctgcagtctccgcacaggggatggagcggcgtgggcgcggacagaaacgcctgcgccggcccgctcgcctccatggcggcgaagctgtcggtaaggacgctgccgcagcgatattcgtccagcacatagaaatcgcagggatacacgctcccgtccgcctccaccaccatctgcatggcgcagcggcccagcagcccgcactgccccggcggatcccctcgcagcattcccaccagattgtcgaacagccgcacgctgaccggctgtccccgttcccagtccgccttccacaaagcaaaggtctgtttgagaaacgccgcataatcccggggcgtcaaatcgaagggctgccgatcccctccttccagcggccgcagacaggggatgaactgcagataccggtagcccgcccgggtcagggcggcgtaaacctgccgggggtgccgggccatctgccgggtcactaccgccagaatgttgtacgccgcgccgtgcgcgtctagtcgccggattccgcgggtgaccgccgcgtacgtcccccggccgtccttgtccagccgcagaaaatcgtgcacctcccggctgccatccagggatacccccaccaggaaatcgtgctcgctgagaaacgccgcccactcgtcggtgagcagggtgccgttggtctgcagggcgtaccgcacccgcacccctgccggctgtttctcccggacataggcggtgaaggcccggaaaaagtcgagccccgccaccgccggctccccgccctggaacccgaaggtgatttccgccgggccagcccccacgtgctcgaaggcccggtcgatgaccgcctgggcggtgcgttccttcatcaccccgtggctgtaggcctcccggtggctggccacatcgtggtagaagcagtagcggcatcgcatattgcacagggaggaggcgggctttattaacatggaaaactggcgcataggctgtctcctttcgtttcgctcctttcagtatacggtcgtccgcctcgaaatgcaagacctgcgcgaaaatttgttcgccaacccactggcgcggcatactcgtttttctttatctccccttcatcaaatcctaagatttggcccattgacgttgccgcgccaattgggtatgcttttttacataccgatcggttgtgtataaatgaaaactgagcctggacaccgccgaccgccccctgccatccccacggaaggagcctgctatgaaaccgaaaaaactgttccatcggaacttcagcctgatgatcatcggccagatcatttccctgttcggtaacgccatcctgcgcttcgccctgtccatgtatgtgctggatctcaccggctccgccgccgccttcggcaccattctggccgtctccatgattcccaccgtcctgctttcgccggtgggcggcatcatcgccgaccggataaaccggcggaacatcatggtcgctctggacttcaccaccgccggcctgatcgccgtttttaccctgttgttcaccgtcagcgacagcctgtggatcatcggcctgctgatggtgctgctgagcgttatccagtcgttttaccagccctccgtccaggccagcatcccagccctcacggcggacgagaacctgatgaaggccaacagcgtggtcattcaggtcaatgccctggcgaatctggtgggccccgtcctgggcggctttttgtacggcttcttcggcctgatgcccatcctcatcgccagcggcctgtgcttcttcacctcggcggtgatggaaatcttcctgcacatcccctttatccgccagcagaaaaacggcggcctgctgcgtaccgccggcggggacatccaggccgcctttcactttatttcgaaagagaacccacaggtgtatcctttgatgttcgtcatcaccggtctcaacctcttcctggccggcatggtgacggtgggcctgccctatatggtgaaaatttttctcggcctgacctcccagcaccagggctttgcggaaggggccatgggcgtgggggccatcgccggcggcctgctggccggtgtgttcgccaaaaaggttcctttcaaccggtcataccgcttcctgctgaccgcggtgctgctggtgcttcccgccgccgcctcggtggtgtccaacgcccatcccatggtatcctacggcgtgctgctcgcgtcggtgctgggctgtatggccggcgccaccctgttcaatatctccgcccagacctttatccagcagcagacccccgaccatcttatcggcaaggtgatgtccttcgtgtcggtcatcgccgtgtgtaccctgcccatcggccaggccatgtacggctttttgttcgaggcgtttaaagagcgcatcttcctcgtggtgctgttcgccgccgtcatggggctggtcatcgccctggccgtgcggcatatcctgcgccgggtgccgtcgccgcaggcgatggactgagcgcctcccggcttgcgcgccggtgggttttatgctaccatacgggtaacacttgcgaaaggggagagcgccttggtgctggaagcgctgcccatgtccttcgccgtctgccagacggccgatttctcccaggtggatttcgacgacgcctattgctttgccgccagaacgcaggacgagtggtcgctcgtctgccgggaaagccggctgcccgccaactgccttcggtgcgagcggggctggcgcggccttaggatccggggcaccctcgatttttccctggtgggcgtcctttcctctcttgccggcttgctggccgcccgcggggtgagcctgttcgccgtctccacctataacaccgattacctgtttgtccgccgggctcagtatccggccgccctgtccgccctgcgggagggtgggtacccggtggaggaacccgcccgctatgaggaagaggaggcgccgatatgtccgcaaccatgatggcgctggtgcgccggggaaaccaggcccgcttggaggaacgccccgtccccgccctgctggatgggcgggacgccttggtgcgggtcacgttgtccaccatctgcaccagcgatctgcatattctgcacggcgcggtgcccagggcgcgggacggcgtcgtcctgggccatgagttcgtcggggaggtcgtcgccgtcggggagcgggtgaacggcctgcgccccggccagcgggtggccgccaactgcatcaccttctgcggggactgctggttttgccgccaggggtatatcaacaactgcgaacgcggcggctgggaattgggctgccgcatcgacggctgccaggcggaatatgtccgtgtccccttcgccgacagcggcctgacccccattcccgacggcgtgtccgatgaaaaggcgctgctgcttggggatatcctggccagcggctattttggggcggaactgtgcgccattcggccgggggataccgtggcggtcattggcgcggggccggtcggtctgtgcgccatgctctgcgcccgcctgttcggcgccgccgaggtcatcgccctggataccgatgagacccgcctgcgcgtcgcccgggagcggggtctctgccggctggccctcaacccccggcatctgggggagaccgaagccctggtgcgcgggcagacggctggccggggagccgacgccgttattgaagccgccgggggagagaccagcttcgagctggcctggcggctggcccggcccaacgcggtggtggccctggtcgccatgtacgagcgggagcaggttctgcccctgcccgccatgtacgggaaaaacctgattttcaagaccggcggcgtggacgccgtccatggggagcgcctgatgaagctcattgaggccggcgcgctggatacctccttcctgctgacccaccgcgcccccctcaacgatatcctggagggctaccgggtttttgggcaaaaggcggacggttgcctgaaatgggccgtcacgccgtatgaacggtagcgtgtctaatcaggctctgtatcataaaaatgggctgttgcaaaatgtaaaattttgcaacagcccatttttcaacggctccctttggccgcgttagctcccatttttcagcttcagcatccggagccggccgggcagcgtgttttccaggcatagcacacgcagagagccgtcctcctgccggatcagcccgtccagcccgtcgtataccccggtcagcagcttggaggacgaggtatacaaacgggatagcttcccctgcgcattgatccgatacaggtacacctggctttcaggccgggttttcatggaaagcggatcgatgaatttgcccatgtcatgcacctgcaccagcgcttccccgccgtccagcgggagcagatagcgggcgaatcccatatcatccagcccgacgatcatgtcgcctccgaccagctttccatcggcgctcattttccagaacgccacgccggtgctttttttgctctggtactgggtcggcggcttgagccccgtctgctgcagattgccggcgctcgtccggtgggaaaattgccccacaagcaggaattgtccgtcgtcgagcgggagcatccccccgaactctatggccgggaattccacctggaacgccaggctgccgtcggcgttgctatggaaatacacacccgatttcttggatgcgccgccgcctccgccggcgcccgtcaggctgccgtcctcctcgatccatacgtcccggatataccccaccggcacgttcaccggctcgtattcccgctgtgtcagcagcttcccgtccgcgtcccagtggaagcggtaatgtgtgatcccctctccgcccgggccgtatgcctccaccatgccgaccagatggccgtccgccgtctcccgcaggctgttcgccccgtagccggagatgttgtccgccccgacggaagcgcccgagcgggcccacaaaacctgcccgtgagcgtcaaattttaccaccagggtggagccgccctcggccccggtgatcccgtagaggtcgaagtcgccgcccgcccggctgccggtgttgccgcaggcgacaaacccgccgtccctcgtggcgatgaccttgtagaacgattcggagacgtccccgccgaacagacggataaattgcagctggcccgcctcgtcatatcgcgccgcgaaagcggagcgcccgacgttgcccgccgtccgcttgtcggcgtattcgtcggtgcacccgaccagcacatagccgccgtccgccatttggacataggcggacggttccgcgcggatggaatccgtcgtgaaccccagctccaaagacagctcggtgactgtcataggggccgtcgaagcggcggtcgtggtctcccggctttggacggtggtttggacaacggttgtttgagtcgtcgtggcggctgtcgtttcctccgccgacggcgcggacgcggcataggatatgccgccggattccaacggtatccccgtttcccgcagcccgctgcggtgaatcagcacccccgcgccggcgaggagcaccagggccgccgctgtggccgccccatattgcgcgatcgtccgcggctggattttccggggcaggaactgcgcggaatccggctgccggtagggctcgttcccattcttttcgtgatccggaaagcgcagctccgcgtcttcccgcagcttctttttccaccattcctgtttcatgtgtcagcactcccttcgtaatacgcgacaagcttcccgcgcgccttgtggtaccgccaaaggacggtgccgtaaggggtgtccgtgtggacggcgatctccttgaggctgtagccgccgaacacgtgtaagacaatggttttatactcgttgacgttcagcgccgccatggccttggcgatgacaatgtcctcaagtacgcaggtttcaaattccgccccgtcgtctatgctccggattttatgctcctccgcccgggcggttcgcagcagatagcgggacacgttgcgggtgatggaaaaaatccaggcccggccgctgcttcccggcgtgtaccgcgccgcctgcctgcgaagggtgagaaacacctcgtgcgccgcgtcctccgccatggccgtgtcgttcgtgatggacgcggcgagcagaaagaccggccggtacatctcctgatacagcttttccagcgcctgcccggcctgctcgccctctccttgcagatcgaccagccactcgtcgatataaccgcccatgcaatccctccccctatatatgaatagcacggcccctccggatcattggcggggcggaaaattttgaacaaaaagctgcctaggctccttttgaatcacccaaagagcggactcctctgttttgcagattttcccactttccatcacaatttggtggattttgtttgtcatctcggacaaggtgtattatactgatatatggaatggaaagcaactggaggagaagacgcatgattacaggcgccatcaaaaataaagtggataaaatctggacggacatctgggcgggcggtatcaccaaccccttgacggtcattgaacagctgacctacctgatgttcatccgttcgttagatgaaaaggaactggaaaccgaagagcttgaaaacatgaccggcgagaagatgaacaagattttccccccgtccgctgtgggacagtccatgcgctggagcaaattcaaggataacgatccccgcgacatttacgctgtgatgtcccagcgggtattcccggcgattaaaaacatgaaacgcggtcatctgccggatttcaccgaacagggcgagctgatcgagattccggacgatttcggcagcggcgagccgaacaacaccgcctttgcccggtatatgagtgacgctatgttcctgatccccacgccccaggtgctgcaaaagatcatcaccgggctggacgatttgtatgagcatgacattgccgaacgggacatgcagggcgatctgtatgaatatatgctgggcaagctggcgactgcgggccaaaacggccagttccgcacccccaagcatattcgggaaatgatggtggagctgctgcggcccacgccagacgacaccatctgtgatccggcctgcggcacagcgggatttctggtatccgcttcggaatatattcgtaagcattacgaggacaccatgacctcggaacagtgggaccattttaccggggccgcctttaccggctttgataccgaccgcaccatgctgcgcatttccgccatgaacctgatgctgcactccatcagccacccggaaatcgattacaaggacagcgtttccaagcagaatccgatccgcgacaagtttaccatctgtctggccaacccgcccttcaagggaacggtggacgcggaaagcatccacgacaacctgaaagccgtgaccaacaccaaaaagaccgagctgctgtttctggcgctgttcctgcggatgctgaaaaagggcggccagtgcgcctgcatcgtgccggacggcgtgctgttcggctcttcaaaagcgcatcaggccatccgcagggagctggtggagaaccaccagctgcgggcggtgatctccatgccctccggcgtgttcaagccctatgcgggcgtttccacagcggtgttggtattcaccaaaaccggcgcgggcggcaccgaaaacgtgtggttttacgatatgaaagccgacggcttttcgctggacgacaagcgcagcgaaatcgcggagaacaacattcccgacattatcgagcggtttcaccatctggagcaggaaaccgcccgccagcgcaccgaacagagcttttttgtgcccaagcaggagattgccgacaacgactatgacctgtccatcaacaaatacaaagaggtggaatatgtaccggtggagtatccctcaaccgccgagatcatggcaaacctgcacgagctggaaatagaaatcacagcagggctggaggaattggaggggatgctgtgatggcgaggttgggggatgtttgtgaaaaggtgacgtcaaatatattacaaaaggatttagaaggacataacggtagctatccgatttatggcgcaagcggctttattgctaatgtggatttttatcagcaagaaaagccttatattgcagttgtaaaagatggggcagggattggacgcattatgaagttgcccgcaaaatcgtctgttattggaacaatgcaatatattattccgaatgatgctgtggatattagctatttggcttatgctatggaacatatgaatctgtccaagtattttactggagcaaccattccacatatctacttcaaagattatcagagagaagaatttcttctcccgccccttgacgaacagcgcaaaatcgcggcggtgctggataaggtcagcgacctgattgccaaacgccgccagcagctggacaggctggataaactggtgaaatcccgatttattgaactgtttggagatatgcttcttaatgatatggggtggcaagaaactgacctatgttctcttgcggatgtagtgtctggaataacaaagggacgaaaagttcgtgaaacagaactgattgaagtgccctatatggctgtttctaatgtgaaggatggctatattgatttgacaactataaaaaccattatggcaacgagacaggagattgagcaatataggttgctgccctatgatgttcttatgacagagggcggcgatccagataaactaggacgtggtgcagtaatcgatactcctctggagaattcaatccaccaaaatcatgtttttagagtgagattacagacagataatatcttgccggttttcttttctcaatacttgcagagtcaaaaagccaaaagatatttccttggatgtgcaaagcagactactgggatagcaagtataaatatgaaacagttgcgttcgttgccagtgttggtgccttcaattgacctgcaggagcagtttgcagccttcgtagaacagaccgacaaatcaaaattggcagttcagcaagggctgcaagaactagagattttgaaaaaatccctgatgcaggagtattttgaataaggtaaacctcatttttccagaatgggtggtgtctttatgatgaacttctcatttctctcgtccaagccggaatacgccctcttttcctccgcctgcatcgaagcggagaaaatctacgccaccgctcccgccatgtgcgccgtgggctgccgcaaggcgctggaattggcggtcaagtgggtctattccgcggacaagaccatgaaaatgccctacaaggacaatctccagtccctcatccatgagcccacctttcgctttgccgtggatgccaacacctggggcaagcttccctttatcatcaagttgggcaatctggcggtacatacggagcgcagcgtgcagcccagcgacgccctggcctccctgcggggtctgttcgagtttatccagtggatcgattactgctacggcgccgattatgaagaacgcacctttgacgaaagcctgattcccacccaaaggatggttgtggacaccaaaaaaatcaaggaacaggaaagcctgctggatgaaaaaaaggcggaaatcgaggcgcttcgtaaacaaatcgagcagctggccgcccggtataccgccgaaaaggaacagcataagcaggagcgcaccttccagccggaagatctctccgagtttcagacgcgaaaagtttatatcgatgtggatctgaagctcatgggctggcagtttaccggcccggccgccgacgtaagggaggaatacccggtggagggcatggccggtgtggttggccagatggggtattgtgactatgtcctctttggtaaagacggcctgcccctggcggtggtggaagccaaacgcaccagcaaagaccccaacattggacgaaagcaagcggttttatacgcggattgcctggaacggaaatttggccgccgccccatgatattcaccaccaacggctttgaaacatatttctgggacgatcagactggcccccagcgaaaagtcagcggcattttcagcaaagacgatctgcaaaggctgatgaaccgccgcacggagcggctggatttgatgagcattcccatcgacgacaaaatcaccgaccggtattatcaaaaagaagccatccgggcggtctgcggccagatcgatcagggcttccgcaagcatctgctggttatggccaccggcaccggcaaaacgagaaccgcctccagtctgacggacgtgctcagccgtggaaaatgggtgacaaacatcctgtttctggccgaccgcacggcgctggtgaagcaggcaaaggacgattttaagaactatttgccggatatgtctctgtgtaatctgtgttccaacaaggatgatcggaatgcccgcatcgtgttttccacctacccgactatcctgaacgccattgacgacaccaaatccggggatgggcggcagctgtttaccccggcgcattttgatttaatcattatcgacgagagccaccggagcattttcaaaaagtaccgggcgatctttgagtatttcgacgccctgatggtggggctgacggccacgccgaaaacggacgttgaccgcaatacctacgacttttttgaaatggagcacggcgtccccacgtatgcctacgattatgagacggcggttgaccaggatcatgtgctggtgccctattataactatgaggtcaagaccaaattcctcgaagaaggcattgtctatgaggaactggcggacgaggataaggaacggtatgaggatgatttcatcgaagacgatgttttaccggaagtcatcccatcggaaaagctcaacaagtttgtgttcaatgaaaccacagtggacattgtgctgcaggatttgatggagcggggcattcaagtggcgggcggagaccgcttggggaaaaccatcatctttgcccagaacaagcgtcatgcagagtttattctggagcggttcaacaagctgtacccgcagtatcacggcacgtttgcccagcgggttgtctgtgacgatgcctatgcccagacgattatcgacgactttaagcagccggaaaaagagccgcatatcgcagtatcggtggatatgatggataccggcatcgacgtaccgcacgcggtcaatctggtgttcttcaaaaaagtacgctcgaaagcaaaattttggcagatgattggacggggcacaagactgtgtagtggccttgcctgtatcgatcaaatcgatggagagtatacggacaagcgccggttcctgatttttgattactgcggcaattttgaatatttccgggagcacaaggaagggtacgaaagccaggaaaccaaaacattatccgaaagtattttcggcaagcaaatacggcttgctatgactttgcagggaagtgcttttgcgcaggagcgctatcaggcctggcgaagcgaaatcgtcgacgtttgccgtaagcaggttttggagctgaacccggagctgatcgccgtaaaactgaagctgcagtatgtggaaaagtataaaaagcgggaatcctttctttctctcggggagggggacaagggagaactgctgacacacatggcccctcttgtccggctgaatgatcccgatgagtttgcaaaacggtttgataattttatgtatggcctgatgctggcccatgtggaacatatgccggcgttcccatatgcaaaaaagcagctgtgcgaaatggccgcgctgttagagcacaaggtaagcattccgcagatcagggaaaaactgccggtgctgcgggagatccaaacagacgctttttggaatgccaacgaccttctgctgtttgagcgggtgcgaaaagacctgcgggaactcattaagttcttggatgaagacggctccgagcaaaaacgcatcgtgaccaaactgaaggatccgattattgaccggcaggaaggcctccagttgggggctgcctatgattttgaggactatcgcgccaaggtaaaccgctatgtgaatgagaacggcaatacgctggccatttacaagctgacgcataatattccgctttccatgggcgattatcaggaattggaacaggtgctgacgagcgagctcggaagcaaagaggattatgcgcgtgaattcggagatacgccctttggtttgctgatccgcaaaattgccaagttggatcatgaagcggcgatgcaggcgttttctgcctttatcaatgaccagtcgctcaaccaaaaacagatagcttttgtatataagattatcaaccacatggaattgaacgggtatatggacaatatcgcagagcttgcgaatccgccgtttgataaaccgatcgggtttgtcaagctgtttgatgcgaagaccagaggtgccatcatggagaccatcaaccaagttcgggacaatgccattcaaatcgccgtatcctaataggaattggaaagcagaggggcaggcggaaacgtccgctcctctgctttttcttagtggaaatgaacgtccttgaaccgcttggaccctggcgtctcgctgcgcgagccgctgtgaaaagcctacggcttttcggaaagacatcgccataagtccattatcgcccataaaaaatcacggcccgccctaaagggcgaaccgtgctttttggtggacgttaacggacttgaaccgctgacccttcgcacgtcaagcgaatgctctaccagctgagctaaacgtcctcgttttttggaacgaagacgattatataggaaattcgccggcttgtcaaggggaatttctaaatttcccgccgccgtcccttttcgctctccgcgcctccctttttcagcagggcgcagacgaaacgcccctttcttcgacagattccagcgaaaacgccaaactttgcaggattgataaaattaacttgcaaaattctttcgcatatactaaaataaaggatagttttgaaatgacgatgcaatctgagaggagcatgttctcatgaaagcgctgaatgaattgaccaaggcccagctgagcgcccgggcggcggagctgcaggaacagtatgacgcctataaggcccggggcctgaagctggatatgtcccgcggcaagcccggccccgagcagctggatctcaccctggacatgctcgaatgcgtcaacgagcgggaagggtataaaaccgccggcggggtggatacccgcaactatggcctgctcgacgggattcccgaggtcaaatccctgttcggcgacattctggggatggaacccgccaacatcatcgtgggcggcaattccagcctcaatctcatgttcgattatatcgccggcgcctatgccaagggcgtctgcggccatcagccctggattctccagggcgcggtgaaattcctctgcccggctcccggttatgaccggcactttgccgtgacggagtattttggcttggagctcatccccgtagagatgaccgaaaccggccccgacatggacgcggtggaacgcctggtacaggatccgctggtcaagggcatctggtgtgtgcccatgtactccaatcccgacggcatcacctattccgacgacacggtgcgccgcctggccgccctgcgcccggcagcggaggatttccgcatcatgtgggacaacgcctattgcctgcaccatctgagcgacgagggcgacacccttttaaacatatataaggaggccgaagcccgcggcaacgaggacattgtcatgatgttcgcctccacctccaaaatcagcttccccggctccggcgtggccgccatggcgggcagcccccgcaacattgcggatgtcaaatcccgcatgacgattcagaccatcggccacgacaagctgaatatgctccgccacgtccggtatttcaagaacattgacggcgtgaaagcccacatgaaaaagcacgccgccattctgcggcccaaattcgaggtcgtgctgaccaccctggagaaggagctgggcggcaaggacattgcccgctggcacaatccccgcggcggctactttgtcagcgtcaacctgatggacggctgcgccaaggagacggtgcgtctgctcaaggaggccggcgtcgtcatgaccggcgcgggtgccacctatccctacggcaaggatcccaaggactccaacatccgcatcgcgcccacctacccgcccctggacgagctgaaggtggccatggagctgttctgcatctgcgccgagctggcggcggctaaaaagctgctggcggaataagcacccgatatctgcggcggcccgaaaggccgtcgcttttttcttccccgaaaggcggaaccgccgggaaactggagactgtgtagaaaaaacgcccgtggcttcgtggcaatttagaaaaatgtcatccccgcgggacattcgcattgacttttttgcccgatcctaatataattaatgacattggtgcggcggcggatgccggcgcaatagtaagcattggaggacaagccgatgaagcgcacatccaaatccgtattcttcatcgtggcactgttgattttagcattgacttacacgacgttttttggcgtgtacagccactatggcgacaggcgcgataccatcattcgcagtgccagcgatatccgctggggcatcgatatccggggcggcatcgacgccaccttcgggcccagcgatgatgtcaaggaagtgaccgacgagaacatgaacggcgtcaaggacgtcatcgcccagcgtctggtcgcgcagaatatcaccgactacgagctgtattccgataccgccaaccggcaggttatcgtccgtttcccctggaaagaggacgagcaggacttcgaccctaaggcggccatcgaggaattgggcaaaaccgccgtgctggaatttcgcaagggcgacgaaaccaagaccgaaaaagacgccgacggtaacgaaatccaggtgcccactggggctctggtgctcagcggcaaggacgtggagtccgccaaggccggtttcagcgccgaggacggcaccaccccggtcgtgtccctcaagcttaaggacagcggcaccaaggccttcgccgaagccacctccgagttggccggcaagggcaagatttccatctggctggataacgagcagctttccgcccccaatgtcaacgaggccatcacctcgggcgaggcgcagatttccggcggcttctcggattattccgaggcggttaagctggccaacctcatcaactccggcgccctgcccttcgccgtggaggtcaagagctacggcaccatcgagcccaccatgggtatgaaggccctggatgtcatggtctgggctggcctcatcgcctttatcctgatttccatttacctgctgatttactatcgcctgcccggctttgtcgccatcctctccctgctgggtcaggtggccggctccctggcctgcgtttccggctacttcggcttcctcaacagcttcaccctgaccctgcccggcatcgcgggcgtcatattgtccatcggcatgggtgtggacgccaacatcatcacggccgagcggattaaagaagaggtgcgcgccggccgcaccatcgacggcgccattcaaatcggctccaagaactccttctgggccatttttgacggcaatatcaccgtcatcatcgtggccgtcgtcctgatgggcgtctttggcccgcccgatggcttctggggcaccatcctcaagcccgtgctgatgtggttcccggcggctaccaccggatccatctactccttcggctataccctctttgtgggaattatcttcaacttcgtcatgggcgtgaccgcgtcccggctgatgctgaaatccatttcccgcttcaaattcttgcgcaaaccctggctgttgggaggtaagcgggcatgaaaaaggaactgaacattgtcgggaaccgtaaaattttcttctccgtctccatcgcgctgatcctcatcggcattttgtgcaacatcttcctcggcgtgcagctggatatctccttcaaaggcggcaccctgctgaaatacagctttaccggcgatatcgacgagcccaagctggacgccttcatcaccgacaccctgaaaaaggacgtggacaccaccctgtccaccgacggtgacgtcaacctcatcaacgtctccctggtggaggagctgagcctggacgagaccaccgccctgaccacagccctgaccaaggagtatccgaagagcgagctcaagctcattaactccaactccctggatcccaccatgggcaccatgttcttcgtcaagtgcctggtggccatcgcgctggcctgcgtattcctgctgatttacgtggccctccgcttccggaaaatcggcggcctgtccgccgccgtcatggcgattatcgccctgctcaacgacattctcatcgcctacttcgcctttatcatcttccgtatcccgctcaacgacaacttcgtggccgtggtgctcaccattctgggctattccctcaacggcaccatcgttatctttgaccgtatccgggaaaaccgccagctgatggacagcaaaacccccatcgatcagctggtcaataccagcatcaaccagtccctgttccgctcttttaacaccagcctgtgcaccttcgcggctatcgccatcgtggcgattatggccctggccaccggcatggacgccatcatcagcttcgccatccccatgatgttcggcatcctctccggcttctacacctccaccttcctctgctgccccctgtgggtcacttggatccagcataagcagaagaaggccctgctggccaaggaagcggccaaggcgcagcccaaaaagaaataagaccaaagctcataaagggcggggacagctgtgtccccgccctttttcacagccccccttgacaacgaccgccgcttatgctaccatattcctcaagattataacgaggaggcggacaatttgcgttttttgatgcactttcatcagaagatgccggttgtccgtacctatatcgcataagatccctccgcgcgtaagcgggcggttccctgcgcctatatcggttggccgaacacttctgatgctgcatcagaagtgtttttttgttgcccggaaccgccccgcgcggcggcactgggctgggaagccggccatatcgcgccggagaatcaggaggctatatgctggaaattcaacacctgtccctaacattgaaaaaggagaaccgccccctcttgcgggatttcagcttcgtgctgggccctcgggacaaagccgccctcattggggaggagggcaacggcaaaagcaccctgctccaggccctctgccgccgggagcaggtggaggcctactgcgacgtggagggccgcgtcttcaccgggaacagccgcctgggctacctcgcccaggaaatgccggaagaggagcgccgcctgcccctgcgcgccttcttcgacggggtggacctctatgaaaacggcctgctgtgggagctggagctgtcccccgactggctggaaagcgaccgccccgcgggcagtctgtcgggcggcgaaaaggtcaaggcccgcctggcccgtctgctggccggagcccccgacatcctgctgctggacgagcccaccaatgacctggacatccccgccctggaatggctggagggctttatccgccaatcctctcgccccattctcttcatttctcacgacgaaaccctgctggaaaacaccgccaccgtcattcttcacctcgagcaggtgcggcggaaaaccgtcccccgccataccgtcgccgccctgggctatgccgactatgtccgcgctcgccgcctcggcctggataagcaggagcaggtggcccgcaagcagcgggctgagtacgaggcccaaatgaaacgctggcggcagatttacgaccgggtggatcacgagcagtccgccatttcccgtcaggatcccggcggcggccgcctgctcaagaagaaaatgaaaggcctcctgtcgcaggaaaagcgcatcgaacggcaggccggaacctttgaggaaatccccgatgtggaggacgccatcgactgccgcttttccgccgccatcaccctgccccagggcaaaaccgtcctggattttcagctggactgcctgcgggcaggcgaccgccccctggcccgggatgtgcgcctgcacgtcgccggcccccgccgagtggccattctcggggaaaacggccggggcaaaaccaccctcctgcgcctgatttgggaagagctgcgcctgaggcgggacatccgcgccggctatatgccccagaactacggcgacgtcctggacgatcggcaaacccctgtggattatctcgccccttccggggacaaggagcggcgcaccaaagcctgcaccctcctgggcagcctgaaattcacccccgatgagatgcgccgtcccattgccgcgctcagcggcggccaaaaggccaagctcctcctcgctggcctgctgctggacggctgcgacgtcctggtgctcgacgaacccacccgcaatctcagccccctgtcctgtcccgtcatccgggaggccctgtccgcctacggcggcgcgattctcagcgtcacccacgaccgcaaatttatgcgcgaggtctgcaccgactggtatgagctgaccgaaaccggcctgcgccccctggaacgcctgtgaggtctttcccccttttctcttgacgcgccgccgcggtgctgaccgccctcaccgtgacggcgatcgggatcgccatggttttcggctccctctgggccttgcggaactccggcggcctgattcagaatttgactgtcacaaaaaaggccgccaacttcacaaaaaaggcgaaccttttcctaaaatcccgcaagcccgccgcccctcgccgtgctatgctgatctcatatgctgacgaaaggagacgaagtccatgccatccattcggacagtggccctgtcgggcatcggcggctatggcgaggtctacggaaaagcccttctggaggaaggggagagccatggcctgaccctgacgggctgcatcgatccctatcccgcctcctgctcctatctcggggagctgcgcgcccgccatattccggtctacgcgtcgctggacgccttttatcgggagcaggcggcggatctcctctgcatttccgcccccatccacctccatgcggagcaaacctgccaggccctggcccacggcagccatgtgctctgcgaaaagcccctgtgcgccaccctggcggaggccggaagcatggaggaggcccgccgcgccgccggtcgggaggtggccatcgggtttcagttcgccttcaacccggccatccttgctttgcgggaggccatttggcgggggacgtacggcgcgccccggctgttcaaggccatgtccctgccgcctcgggacagcgcctattaccggcggggctgggcgggccgtgtccaggtgggcggccatatcgtctgcgacagcgtggccaataacgcctgtgcccactatctgcatctcctgtttttcctggcgagcccacccggccatcccgcccagcccctcgcgcaccagaccgagctctaccgggccaacgccatcgaaaccttcgataccatcaccgcccgcatccagacagacagcggcgtgcccctctatttcgccgcctcccacgccgtcgatcggacccgcctgcccggcttcgtgctggaactggagaacgcccggatcacctgccggctggtcgagcgcaccctgctcgtcgaaactccgggccgcaccttcgaggaacgcctcgcccccgatccgctggagcgggacaaaatctgggccgtggccgagtcccttcgccggggcgagccgcctgcctgcggcctgccggacgccctcgcccatacccggtatatccacgacattcagcgttcctgcgccgtgacccccttcgctcccgccctcctcacccaaattcccagccgtacgcccggcgaaaccattacctgcgcccgcggcctgttcgcggccatggaaaccgcctacgatgccgcccgcctgctcagcgaaaccgggtatctgtccgccgcccgccgctgagccgtcgaaaaccgccagccgaggcccccgttgaaaacgggggcctcggctggtataatggagaaaatgggccgattggcccggcaacaaccggaaaggtcgtgtccgtatgagcgttcgccaagccatccgttccgccttcagcctggaggagggcagcgcctcgccggaggaaatccggcagtccattctcagcggcgcccacgtcaagggcaccaacctgtgtatcctggtgctggccatcctcatcgcttccatcgggctgaacatgaactctaccgccgtcatcatcggcgctatgctgatttcccccctgatgggcgggattatggcggtgggctacggcttcgccctcggcgacctccgcctgtcccgccgtgccttcatcggccttttgtttcaggtgatcgtctgcatcgtggcctccaccctctatttttccctttcgcccatctccaccgcccattccgaactgctggcccgcaccatgcccaccgtctgggacgtgctcatcgccgtgtgcggcggcctggcgggcatcatcggcgtcacccggaaggagaaaaccaacgtcatccccggcgtggccatcgccaccgccctcatgccgcccctgtgcaccgccggctacggcctggccacccggtcgctctcctttttcctgggggccatgtacctgttcttcatcaacggcttcttcatctgcgtgagcacctttgtggtggtgcgcctcatgcgccttccccggcaggaatttgagaacgcccgggcccgccgcaaaatgcgcattaccttgaccgtcgtggccattattaccgtgctgcccagcatttatctcgcctaccgtatcgtgggggacagcctcactgaaagcagcgtgcagaaatatattgcctccgagttcagctttgacgacacccaggtggtgcgctcctccgccgataccaaggcgaaggagatccgtgtggccctcctgggcaaacggctgagcgaggagcgcatccaggagctgcgcagcgccctgcccggctatggcctggagggcatgaccctgaaggtcacgcagaccgagctggagcaggggatgacccaggaggatatccaggccatcatcgagaaggagttggatcaaaacagccaggagaacgccgccctgtcccaaaagcaggagctggagaacctgaaggccgagctggtgggcgccaaggccaagctgctcgattaccaggcgtttgatttcgatatgcaggccatcaccagggagctgcaagccctgtatccccaggtgcaatcctgctccatgggccggcaccggatttggagcgaaaccacccagcaggtggagaatcgggtgatggctaccctggatctgcctgcccctctgagcgccgaggagaaaacgcgggtggagacctggctggccgcccgggccggggtgcaggcggtgacggtgtacgagaacatcgcccccgccggggagtaggacgttcgttacttttcatgaaattcgcgtggaaaatttggatatgccattttgga

SEQ ID NO: 1540 - DNA, 24620 bp, Unknown
  16S sequences of unknown bacteria
agttcgtccatgtatctgcacaggttttccgcgttgttgcgaagatatacgggattctgcatgcccagtttgcgcatcactttcttcgccaggatatcgtccagcgcgcttaattcttctcccccgcacgccacgtacgcgggaacgtatctctctatctgatagcggatccggtttccgaacgtcacgcggaaatgctccgtcatgaaatcgtccagttgccgcaagcggcggcggttccgctccgtcagcccgtattcttcctgcgcctctttcacaagttccttaaatcgctttgccgtgatcttcacgccttcgggccgttccgcggaaaacgcctgcgcctttttatccagatccaacaccatcgccctgtcgtatactttatccgagatcgcgaacgtcgaatcgtcgttgttcgccgtaccgatgaaccacatgttttcaggcagccgcacgtgaccgtctttcagttgtttcgggtcgttcttccactcgtcgctcaccaccgtcaacagccgttcttccgcgttcggcagttccaacagcgacaaaaactccgcaaaatagtattccacgcgcgcgatattcatttcgtccaacaccgtgatatagatctgctcgctgtaattcgcctcgtatatctttttcagcaagtccgtttcgttgaatcgcttggtgaattcgttgtaatagcctatcaggtccgtcctttctttccacatgggctgtacggggatgaccgtcgaggtgttccccagaaactcgccgaacgcgaacgcaagcgacgttttgcccgtgcccgacattccctgcaatatcaggatatgcgataccgccatgccagcgataaagcggcggatatcctctatctcgtaatacaatctcagtttcccagcggcatagtcgcggaacgtttcgcagaactctttcaagccgatgcgcccgttgaactccccgcccgcatagcgcgtcttttcctcgtcgatgcggcacaacccgtcaaaacgcctgcggttggtttttttcacttccgttttggtttgttctaccgtttcggcaacgatttgcaggggttctggctcctccttgcggttcagatacaagacagcgagcaagccccccagcaagatcggcaccaggatcagcaatgcgacaacggcgatcgcgcccccctccgacgtttcgggcgcggcggaagaactgaaataaagccccatggaaattcccatcagcacgacgaccgcggcgatggcgatcaatacggcaaaatatttctttttgagtttcggtagtttcagatttttcatattcattcgccgtctttcttttccgccgaagaatgcaaaagttccgcgcggatctgctttttggtctttttccattcttccttaaaaaaggttttgaaaactttatactgccgttcgagttcggcgaactgttcgcgggaagtaaaactatccgactcggaaaagcgcccgcattcctttttcaacgcgttgagccgcgcctccgaaagcgtcttttcccgttccagaagttccgcctgcgcgtgcaggcgcgcgcgctcttctctctctttttccagcgcgtccttcgaattgccgatctgttccagtaaagcggcggcgcgttcttccgtccgctgtttttccgcctttgccgcctcttcgtaggtttccgcagtctgccgcaaaattttgtcggcagactctttctgttcccggagcgcgctttcatgcgcaataagcaggcgggttttttccgcttcgcgctcctcttcggcggtacaaaggcggtcttcccactcttttgtcagcgcgcggatctccgtctgatgggagataagcagttcttcgttgcgcttcttccgcgtttccgcgagcgcggaaacttcttcgatattttgatgcagaagcccgattttatcgtgcagggtttcgatctccgcgcgggcggcgatcaactgcaatttgtcgttttcgagcgcgcggagccgcttttccatgagcagcatgtattctttttcgcccttgcccgattcttctatccgccgtttcaggctttcaagttgcctgcgctcacgctcttgatcctcgcgctttttcgcctcttcctgctcgtcgtaatttttttgcaggtattcttccagtttcaaaccgtgttcgtacgtcaaaaacgaactgagttcggcaatttcggcaaattcgtccgcaagccctcgttcgaacgggtgcagggatacttcgtccttttttacggtgaaaccgtccttttcataggaagtaataaaataatacagccgcatcgcgcccttgaagtttttgttcattttcaagacgttcgtttcggtgatcggcggtttgagcataggcgctttcgccacgaattccatcaaaggcagcgaaagatacagcaaaacggtcttcaacagcccgtcgatacggtcgacctgctcttttgcggaatgattcgcggcaaggtacgcgtcgtttcttttctcctcgtccagaaaaatttcgaaccgcagtttacggtcgtccgcttccaccgatttttgcatggacagactgccgctgtacgtgctcgtaagcgccacgatcttttcgtagcggtaggcgataaaatcgcgcagatagcacagcagcatatataaaaacctgttttcgtagacggcgtaatcggtcagccgttccacggtaaaaagtcggtcgggaatgatatcctccccctcgccccgatctttcgtgaacagattgctgtggcgggcgagatgttccaccgattctctggaaacgctcttgaccttttcgatatcctgcacttcgccgttggaacggatgaactgccgctcttccgcgatggctttgccgataaagacgagcccctcttcgatggcgtctatccagtcgttttccacttcgcattccgtgcgtacgacttgcagcctgtctgcgtcggcgttggcgcgggaaaccgatctgcgggccctcttgcagtcccgctcctctttcgtattctttctgtaatcggtaaacgcccgaaacaatcgatccagttgccccatctcgccgtcctctctctttacgcgctcctgcccaaacggcgcacgatctctttacattgcgataagttttcttccccgaaaagttcgtccatgtatctgcacaggttttccgcgttgttgcgaagatatacgggattctgcatgcccagtttgcgcatcactttcttcgccaggatatcgtccagcgcgcttaattcttctcccccgcacgccacgtacgcgggaacgtatctctctatctgatagcggatccggtttccgaacgtcacgcggaaatgctccgtcatgaaatcgtccagttgccgcaagcggcggcggttccgctccgtcagcccgtattcttcctgcgcctctttcacaagttccttaaatcgctttgccgtgatcttcacgccttcgggccgttccgcggaaaacgcctgcgcctttttatccagatccaacaccatcgccctgtcgtatactttatccgagatcgcgaacgtcgaatcgtcgttgttcgccgtaccgatgaaccacatgttttcaggcagccgcacgtgaccgtctttcagttgtttcgggtcgttcttccactcgtcgctcaccaccgtcaacagccgttcttccgcgttcggcagttccaacagcgacaaaaactccgcaaaatagtattccacgcgcgcgatattcatttcgtccaacaccgtgatatagatctgctcgctgtaattcgcctcgtatatctttttcagcaagtccgtttcgttgaatcgcttggtgaattcgttgtaatagcctatcaggtccgtcctttctttccacatgggctgtacggggatgaccgtcgaggtgttccccagaaactcgccgaacgcgaacgcaagcgacgttttgcccgtgcccgacattccctgcaatatcaggatatgcgataccgccatgccagcgataaagcggcggatatcctctatctcgtaatacaatctcagtttcccagcggcatagtcgcggaacgtttcgcagaactctttcaagccgatgcgcccgttgaactccccgcccgcatagcgcgccttttcctcgtcgattcggcacaacccgtcgaaccgcctgcggttggtccttttcggttctgttttggtttgttggggaagttcgccgtcggcctgcacgatcttcggggctttggattccccgaccatgagaaacgcgatcaaaagtccgatcagggccagcaacacgatcagatagacgacgatcgcgtaccaggaggaaaaaaactgcgcaaaactcagaaaatttaccatatccgctccctcaaacctgtaaattttccaacgtttttttacattcggacacgtcctccgcgccgaaaatatgttccagcccgcgaacgaaatcttcgggcgcgcggcttttcagggacgtcatcagaacagccgcggcggcgcagtcgagcgcctcttcctcgccgctcccgcaggcaagacaggcggaagaaaacttttccaaccgcatccacgtcttgttatcaaacttggcgccgacgaatttttccagttgatcgatttttttccaacccttgtcctcgtcgaggcagaaatcgttcctgcccgctttggagagcgcggcaaactgataatagttgagcgcgcccgcgggcacttccgcctccgtttcggtgcattcttcccaatcgagatcgacgacgcaggcgttatcgggaatatccgcgccgcgttctccgcaaagcgcgaatacaaaccatacgttggaagaatgaatcaacccgactgcgcttttcgccgcgcgcgcgggattttctatgtaaaactgaaagggcgcgacgacggacacgatctgtccgacggcgccgctgtatgcggccacgtgcacgacgtgcctgcgcgatgcggcgtcctgaaacgcccgcgccgcgttggaacgcactgcgccgccctcttccgtttcgccgcattcgtgcagatatatgccgctgccgaaataatcggagagtatcttgaaaaatttgggcggcagtgctttgccgctttgcaaaacgacgaggcgggacgccgaaaacgccgccaacagtttgcgcgcgcctttcgttccgatcgtgatgccacgttcagaaaaaaacgccgccatctgtccgcataccgcgggaaacgtgaccgacgcgtcgcaaaatttgagcgcctccgcgctttcgtccgttttggcatcctccgaagatcccgccttttcctcgctttgcggcgcatcttcgaacaatttttcataggaaagttcggacgcaacttcgccctgcgcggcgaggcaccccgccgacgcgggcacatacgcccctttcgcccgtttccgctttatgagcgagacgatcgccacgacaccgcccgccaaaaagatcggcggcgcgacaaatataagcagaaaaggaagcacggtattgaaaaacacctcgctgtcgctgcctacacgacagactcccaacagggtgacgagcagcgcaagggaaaacccgcttcccatgagaatgagtcccctattgagcaattttttccagcggcgcggtttgaccacgggaccgagcgtataatttcccgcaaagatattggtcagcgacgggatatattcggtaatatggcgcccgtcgggcacgagccgcccgcctttcacgtacacggtagtttccagccgcacgtcgagcgacgacgcggcgatacagacgcggtacatgccgtcctctacggcaaatccgccgtcgttatagacggcgagagaatcgcgcgcgacgggaaaggagagccgaacgctttcgcccgcgcgcagaaatactttttgaaaggctttgagttccttgcgggggcgcaagacagcggattcgtccttgccgatatacatctgcacgacttcggcggcgtcgtatttgcccttattgcggagcgtaaacgtcgcgttgccgttttgtatcgtaaggtcggaatagccgaaacgcgaataaccgagcccgaacccgaagggaaaatcgggatgttcgcccgccgcgtcgtagcggcggtagccgagaaaggtccccgctttgcatctgcccgcttttttatcctctgcaaacgcagcaaagcgcgcgtcggtatcgttataccgcgtcgaggccagtttgcccgaaggcgaaactttccccgaaagaatattcaaaagcgcctcgacgccgcgttcgctcttcgtatccgccatcaaaagggccgatactctctcattgaaagacaactccaaaagatcttcgggcgacacgacggcaacgatgttgggattgactttaaaaagcgcgtccgcgagcgcaaggcggttggcgggaaatttcgcgcgcgcgtacggttccgcggtttctccttccgatgcgtgacgcagaaatacgagcacggcatcggccttttccgcaagtttgcaggcgtacgggatctcctcgtcgctgcgcgactgccccgtctgatagccctccgcgaacccgacgcattcaaaaccgccgtacgcttgcaggctctcgtaaaactcgcccgcggaattgccgtcgggatgtccgacgatcgcgacgcggcatccctttttcaaaggcaaaacgccctcgtttttcaaaaggacggcgctctcttccgccgcacggagagcgagatcctgctccgcctctgcgcttgcctccgtctttaacgccctgcattgcatcatcagatcgatcgccctgtccacggaagaatccaactcgacaggactgagttcctttttgccgtcgatatcgcgttccaacgccgatctcaacgtatcccgatcgccgtcggccaggatatttcccgcgttcagacattccgcgtcgcgcccgagatcggcgcgttcggcaagcacaaaaccgatcgattcctcccgatgcaaaaattcgtcgatcgcggcgacgttcgcatcggcgtaagtcccgctcacctttgtataagaaaacgatacggcgtttttcgaattttccatgacgcgccagggcgcgagaaaatattcatacagcgcgcgggcgtcgaattctttgtcgagcgccgcgatatccgtttcgcgcagggatacgcacgacagacagggcgtcacgcccgcggaacggacgccgcggcaaaccgaatcggcgatctttcccgccagatacggatcttcggagattccctcgcagaacggatcgcactgcacgccgagccgcggcgtataaagcaggtcggcaagatctttgcgcgcaagagaagcgtatcctttcgccgcctcttcccaaagagcgggatcccagcaattggcgagcgccgcaaacgagggataaggcgatccgtgatcggcgttcgtcttttgcatttccgcaacgcggacggacggaatgcccgcctctttcgcccaagccgacgaaaacgcctgcacggacgccgcaagcgacaacttttgttcgacggtcagatgatctatgatagtttgatatttcagcataagttctcccacattaaatcgtatgcgtcaatccgtttcgtccaacgtcttatatactttctccgcgtaaaaggcgacgaatccgaaattttgcgatgttttgacgatcggcagatcgctcaggttatacaccgtctttaaacgcgaacaatccagaaacgcctgcgatttgatgtccgtcagcgtttcgggcaaaatgatcataggcagcgaataacagccgctgaaagcggcaaaaccgatactcttcaaccgatcgggcagggtgacgctcgtcagagaggaacatgaatggaacgcgccctcttccaaatcagtcaggtacgagccctcttcgaaaaccacggtgcgcagcatagggcattgaaaaaaagcgtattttccgagtttgcgcacggcaggcggaataatcacgcggttcatcgtgtcgtcttcccggaacagatgatcgggcacgctgtacaccgaactgataactatgcccattcgcgtaacggcgtcgggaagttcctgcacatattgccctttcggatatcctaccaaaaaccactcgccgtcgaagtcggcgaacgtataaccgcccgattcgagccttttcgcaaaactttcccccgcgccgtatattttcatggcatactccgaaactctccccacgatcgcgggaacggaaaggtcgaggcggctctcgttaagcacctcgtacagccgataacagccgctgaacgcgtcctgcccgatacttttcagcggcggcggaagggtgatccgaccgagagatatacagttggcgaacgcatttgcgccgatggaaaccaaattcgtcggaaattcgaacgatgagagcctcctgcaattcatgaacgcgccttgcccgactgatacgacggtatagggaagattcacggacacgaggctgtcgcaattggcaaaaacgtagtcgttcagcatttcgatcggcccgctgaccgttacaacttttaaattgtagggcgtgccaccgaaaatgtcgctcagcataccgttttccgaatttttggtattgcccaaaaaaggaagggtgagttcgtcgatggaatggcagttttcgaacgcgttcatgccgatatattcaacgcccgaaggtatacgaacggaagtcagcgcatcgcagcaggaaaaagcatagtcccctatttcccgcagatcatcgcccaggagaatatttttgagatcataattattgtaaaaggcaaaaggcgctatgatttccgtttcggaacagtcaaaatattcgatacgggttgccccgaaagcgtattgcccgatctctcggacaggtggaattttgatctccgtcaatcccctgcaattatcaaatgcatgatcgccgacgattggatccccgatctctccgatctcgaccgaattcaaataaagatcggcgcaaaaattttgggggatcgcatcgatgctcccgatcttcagtttgcttacgtagcactgagtcccccacgggttgccgaacagagaagaaagcgtcacgctgcgcccgatcgtttcggggaaatttttgagttccaacgtctggatattttgcgtgccttcgaagatcgtttcattgtaggaatactcgatcgtctgatcgatcgtgaccgtatgtaagttatagcaggaatcgaacgccctgcgaccgatcgagagcggtttttgtgcgttttggatgaaaacctcctgcatgtaggagcaaccgaaaaaggcggagtccccgattttcgaaaggttttttgcccgaatatactgcaaattatcgcagttctgaaaggcgcgatcttctataacagtgacctgttccagatcgacggatcttaaataacggcaattcgcaaaagccatgtaaccgatgcgaaggctgccttgcagcgttacgctttgcaattcgtaataattttcgaaggcgcgttgggcgatttccgtaacgggatgcccctcgatggaatcgtaaacggtaatgcttttgcggctgccgtgatatcccgtcacgatcagttcgctgtcctcgtcgtcgggatcggatacaaaagtatatttgacgccttccttcaaaaaagtataagcgtggattttgaaatcgtgcaggcggacgcaggtaaatatcacgagcgccgcgagcaaaaggcagaaaaacacaccgatccagacgggataagcgggccttccgacgcgcgcgtcgaattctttggtatgcttcgtgcggacggggggagcggcgcgctccgcctgcagcgacgaaacgtattctgcggcgacgccgccctcgacggcggaatagagataccttccgtaccgcgcgcttttcagatcggctttaaaatcgacgcagtcctccgatacttcgattttgggaagcagaaaatcggcgttcgccgccgcgcacaagccgtcgaacgaatgcgcttcctttccgatctccgcgcccgcagcgtcacggaacgtgatcgtcatccgcataccgtcgagcgtttcgccgcgtcggttgcaccatttcaaaagcagatatttttttccgttttcataaaagaaaacaaactctttcaaggggagttccgcgtcgctttgcgtataagcgtaggcgccctttgcaatgacgtcaggattgcgcacagccgttccccctcttcttttctcggtttttcagttttacggcgacgagcgtaaagataatattgcagacgacgatgatcgaacagaacaattcgaattcatcggtatagaaatcggacacgagaaaactctccgcaaacagcccgccgaaagaatatgccaggcaagcccgtaaagccaaaaagcccagtgcttccgtgaggacgcacaaggctgtaaaggcaagcagcaggctcttactgattttacgcactgcatgatgatcgaacaggatcccgtccgcttcgttgatgagcaatgaaacgtaacaggtctttgagggaagatccacttcccgcgtatatccggcgcgttcgacgaactctttgacgcggatacccttgaacgcacggcttttttgatcgaagagcacgacgtcgtaatcgagatatccgacgccctcatcgatcttgcagatcaaactctttttcccgtccttttccgacaagatatacttgcggatataagggcggagcgtacatgccggctcgtatacgatgctttgaccgttttcaccgcgcgcgatctttaacccgcggtcggcgggcgttccgatacgatatcggtatttaataaaaaatttcggtaaaaccacggtatacagcgctacgagtaaggcgcagacgagtatgaatagaaaaaaccaccctaccattttcgaacctcaagtataatcggcaatttttatcgtttgccaaaacggggtaacgcaatctgatctattccattgtatcacaatttcatcatatttgtcaatatggtatcaaattaaatacttaccaatattccttaccgcagggctttgcccgtttcgtaagcctgtacggacgcggcggagcctttcgcctgcccgatgccggtcacgcccgtcgcacgcacgacgcccgcaaggcgcacgcccgcgaaacagtctatccagccctgcacgcccgacaccgcgccgtccatcgcgctcccgtcgtcctcggcggcactcgcgagaaggtagacttcgcggaatttgttgtttcgaggaaacagcggattcaggcggtcgagaaaagtcttgagttggccgctcatcccgtaataatacacgggcgtggcgaatacgagcacgtcggcgttttgcacgctctcgtacagcgcgttcatgccgtcctgcaatacgcagccctcgtgattctggcaatacagacaaccgatgcaaaattgtaactgcatttcacggatattcactttgcacacttcgtgaccagcgtcccgcgcgccgcgcgcaaattcttccgcaagaatgtccgaattgccgcgctcgcgcggcgtcgacgatacgataaatacttttttagccattttttgttttctcctcttcgatattttttatgatcttcgcgggaacgcccgcaaccaccgcgcccgcgggaacgtctttcgtcaccaccgcgcccgccgcgacgacgctgttttcgccgagagtcacgcccgcaagtatggtcgcgtgcgcgccgatccatacgttgtttccgatgatgatgggcgcgtgaaacatatttttgcgctttgcgggggcaaggtcgtggttgagcgtcgccagcacgacctgatgccctatcaacacgccgtcccccacgaatatgccgccctggtcctgaaaacaacaacccgcgttgatgaacacgtcgttgccgatgcggatatttctgccgcagtcggtgtagaagggcgggaacagcacgaacccttcgcagatctctcttcccgtcagttcgcgaaagagcgcgcggatctcttcctgcgtcctgtaagcgccgttcatctgcgacgtgatcttccgcgcgcggtcggcaagcctgtgcatgcagtcctgcgcttccgacggagattcaatgtatccgcgcgtttccatgcttttcaaaaattcttcgcaatccatattcagtctcccgcaaggcgcagcgtcacggtaaaatctccgctctgcgccgcaaaaatcccgatcccgtccccttcgatcttgccgagatagacgaggtcggaagaatagcccgacgaatcgcggtaaaaaatcgctatgttgccccagggcttatagatcgtcacatccccgatttcgggatcgcagccttccgcatccgataacgtaaagggcggcgaaggataggcgatcttttccgcgcccgcaaaatcggaaaacgcgagcgtcgtttcgccctttgccagcctgtcggcaaactctttcgcggcggcgttatccgcaagcgccgcatagattttctctcccgaaacttccatttcgacgcgcgccgcattgccggaatgcagcccgtccagccaatccttgacgagcgtcgaaccgctttccccttcgggcgcgcacgccgccgccgaaaacgcaaacaaaagcgcgaacagcattgacaaaatcactttcattcttttcgtctcctctgcctctattgtatttcaatgccgataaaatgtcaaatacttatattttatgcgaaaccataattgacaagcatagattttcgtgctataatccgtattatggaactgagggaattaaagtattttctggcggtggcgcgagaggaaaacatcacgaaagcggcggaactcgtcaacacgacgcagccgaatctttcccgccagatgcagaaactggaagaagagatcggtaagccgcttttcgtgcgcggcagccgcagagtgacgctgacggagacgggcatcctccttcgcaagcgcgccgaggagatcgtccatctttgcgaaaagacggaatgcgaactcacctgcaaggcgggggagatcagcggcgaagtttccatcggctgcggcgaatcgtatgcggtgcggctgatcgcaaaggcggcgaaacgcaccaaagaactatgcccccgaatcgatttcaatatattcagcggggacggcggaattgtttccgagcgtctggaaagcgggcttttggatttcggcgtgctcatcgactacgccgatctgtcgcgatacgactatctgcgtctgccgctcaaagatacctggggcgttctgatgaaaaaggactgcgccctcgcccgaaaaaacgccgtgacggcggacgatctgcgcagcgttcccctcttgttttcgcagcaagtcttaaataaccgccagcacgtcgccatgaactggttttcccaacgcgagatcacgcccaacgtggcggcgagatataatcttatctacaacgcgtccctgctcgtcgaagaggggctcggatatgccctcggactggataagatcatcaacacgagcggcgacagcaatcttacgttccgcccactctatccgcgcgtggaatcgcatctggacgtcgtctggaaaaagtaccgcactttttcaggcgctgcggaaatatttttggaacaactcaaaaaatttttataacgcctgcggttttgttgacattttctttggattccgatatactgtttgacgaggaatgaagttctcctcgggcttttgccgaaaccgcttttttaagctgatgacttctgcgaaatcatgacaattcgcaggggcatcggctttttttgttgcccccccccgcgaaaaaggaaaaacatatgtcttttttaacgagtctgggtatcattttactgagcggcctgttattgggctccgtctgcgccaagatcagactgccgccccttttgggcatgctggtcgtggggatcgtgctcggcccctatgtgctcgatctgatctccccgcagatcttgaacatttccgccgatcttcggcagttggcgctcatcattattctgacgcgcgcgggcctgtccttcgatttcggggaactgaaaaaaaacggacgcagcgcgatcctgttgtgtttcgtgcccgcctgcgtagagatcgccgcgtatatcgctttcggaacgctgcttctgggactgaactggatcgaggcagccgttttaggctgcgtgatggcggcagtttcccccgccgtggtcgtgccgagaatgctgaaactcgaacgggaaggctacggcaccgataaaggcattccgcagatgatcacggcgggcgcctccgcggacgacgtattcgtcattctgctgttcacggcgtttctgggaatggcgggcagcgggagtttcgatttcaatgtgctctggaagacgcccgtatccattctgacgggcgtcgcgctcggcgccgcgttcggatggctgttcgcgaagttttttcagaagatccatgcgcgggataccgttaagatcatcgttctcttgagtttttcatttctgttcgtcgctttggagagcgccgcgggcgcatacgtgccttattcggggctgctctccgtcatcgcgatgggagccgcgctcttccgcgcgcaccccgtctgtgccgatcggctttcggcgcgctattcgaaactttgggtcatcgcggaaattttgctgttcgtattggtcggcgcgacggtggatatcggattcgccgtcaaagcggggggcatgatcgccgcggtcatcgccgccgcattgctctttcgtatgctcggcgtctttatctgcgttctgaaaaccggattgaacaaaaaagagcggctgttctgtatgatcgcttataccccgaaagcgacggtacaggcggcgatcggcaccattccgctcgccgcggggctcgcctgcggccggatcgtactgaccgcagcggtgctcgccattcttctcaccgcccctctcggagcctttctcaccgatctgacgtataaaaaactgcttataaaatcctgacgggcaaaaagcgctctcccttttcgggagagcgcttttcatcagatttcgtaattgtcgttgtcgtatgtcttttcggaggagtaaaggttgaattcgtgttccagatcgaagttttcggcgctgtcgaaagcggcgagtttggagaccgaaacttcgtaagcggtcatcgttttgacttcgtattcgctgagttttttctgatattcgcggctttgaatgcgccctgaaagcgcgatcttatcgccgacctgtaaatttttgacaaagcgcgcgttccgcccccaggcgatgcacggaatatagtcggatttgttgtaagcgcggttgacggcgacgagaaggtctgcgatctcgcggttgaacggcgtcgtgcggtacacgggcggtttgcagatatagccgctcaatacgatgctgttgggatttttcgagggcggcatatccaccagttcgcgcacgaacacggtgagcatcaggcgcgattttccgttttcgatcttattatacgagcggaactgccccaaagcgcagagcgttgcgccgatcttcaattccccgtcggtgatcagccgttcggacacggtgacgggcagcacgtccgcctgccccgaaaggcgcatcacgcgcacgttcagatcgtagaaaccttcgccgtacacctcgtgcgaaaaggtcgcctcgctcaccacttcacccataatgaataccttattgttcttctcggtattgtagttcataaaatcctccaaaacagtttttcaaaaatttcttatgcggcggcgttcggaatttgccgtcccgtagaatccatggtgtatccttcgcggtaaatgagttccccgatgggaacgaacgtaaatcctttatttttgagggtatccagcacgatgggaagcgcctcggcggtatgtttgccgttattgtggcacaaaatgatgctcccctcccgcgtgcggctgacgatgcgcatggcgatgtcgcttgccgaaagatctttccagtccagactgtccacgtcccactgaatggtgtacagccccatatccgtggccgtttcgatgagcagatcgtcgtaatcgccgtaaggcgggcgaaacagttccacttttttccctgtgatcttttcgatcgcctcgctcgacgtggtcagttcttttctgatctcgctctcgccgagtttcgacatataggggtgcgtcgccgaatgcgtgccgatctcgtttccgttatcgctgatctttttcacgtattcgggatatttttccgtccagaattccaccataaagaaagtggctcgcacgttttcgcgctttaatacgtccagaagggtgtcggtataatcgacgccccaggcgcagtcgaaagaaatggagatctttttctcctccgtgcctacgctgtatatgggcagtttgcgcacggtattattaaagtacaccgcataggcgcccgtataatgcagcgccaggcacagagccagcgcgatcgcgaccgcgcagacgctgaatatcgtactctttgctttaaaaatgatcgccttcattcacacacctgttattatataatttcgcgcgccgcaaaatttagcgctttttgacgattgccgtctgttttgctcgcaacttccgcctgtattctgccaccgttttgtatcatatctatatgtgccgaaaatgccgaatattccataaaaaagacccgcaggttttgcctgcgggtcttttttcgttacaaattttacatttctttcgtaaatttttttccgcaatacggacacgctttaaaggaaagtaatcggtgaaatccgagcggtacgccgcaaaacggacagcgataaaaaaaatatagcatcagcgtcggaatcgaatatacggctaatccgactagccccgcggcccacacgggacaagccgtataataagccaaaacgattcccgcggagatccctatcattatcagcccgatctcaataaaatgacatatcagtaaccgtttcaacgtatctctccgggagtataaggatttaatagtttaattgtggcaaccttttgtccctcaatcccatagatagaaaatgaagacataacattgtatgtaaacgcctctcctttaacatagtctttcagcgcagtatatcccgacgcatagtcctcagctctgaattcccccctaaattcattgaaaattccatctgatacgggaagatcattttcaaactttaaagtttttgttattgttcctacataattatttcccatattataatgcccgatcaataaataagcgcctgtgttcaaagccaaataaatataactgcacatttcagtaacattccaagaataaactgtacgcatatccgaaattacagacgttgtttgaatcgatttcgattttcgaagcaatatccgatataaattctaaattgcatttttgatttttaggagttacatttatgaccctgaacgtataatcgataccattcattcgaacatcttctgaaaaaatattgaaataataattatcatattcttcaacatatctcggcatagaagaacctgttatttcgcaaatttcctgtattgatatttcgtcaacaccttgttgctttaaagctgcattcatttcttcttcaagttttttgtttccgcaacagattgcattcagtctttcggagtacagttcggatatggtttgctcttgtttcaaaaccgaattttgcgttgcttaggcaaaagcattttgaaaagaaaatacagtgaccaacatcaatagtatagatataaaaattgttgcttttttcatatgatttctcctctatatttttaatacaatcatatcaaacgaatgtatataaacatcgaaacatttgtattatttttgtaaaaagccccgcaggttttgcctgcggggcttttttattatttatcggacagatatttcatagaccagaaggcggtcgccttacaaccttttttgagtttgatccccttgcccttggtcgtgcggtcctcgatggaaacgtcctcttcggtatccgcctcgatgaggctgccgtcgtccattttcacggcgatcttgtacggcatggtcacgtaatcagcgtacacgaccgaacggttagaaccgagatcgacgattttgacgcccttgcggtagcgcgccatcggatcgatctgcgaaacgatgaccctcttgatcgtgttgccgtcggtacccaccaaaatctcgccgccgtcgtcgatctggcccgcaaagacgaccttgtcgccctcgttcagcgcgatgccgcgcacgcccgcggaaatgcgcccctgcgagggaatatcgttcttgtacgcgttcaggcacatgcccttcgccgtgacgaagaacagcgtcgtagtcggctcgggatcgtcggtttcgataccgatgatctcgtcgccctcgttgactttgacggcctggaaagtatatttaagaatgttatattccttccagtcgctctttttcacgtaaccgccgcgcgaatagaacagaaggctgcccttgggcagtttctcccccacctcgtaaaaggcaacgggccgctcgccttcgagcgcgtcgggacaaagttcgtcgtacgcgaaccctttatctttgattttgccgacttccacgtcgctcatgtcgatcttgtggcagttgcccatattggtaaaggaatagaccgtcttatccgacgccgtgtgcaaaagcgcggtgaaaatatcgttttcgtttgaacgttcggaaagatttttgtcggtcatgttgaagttcttttccgcgacgcacttgatcgtgttcgccgcggtcgcgcacagcacgcagtttacgacgggttttacgtcgtcgaacttttccactttgatttccgaaacgtcgaaaacgagggacgttttgcgctcgctcttatactgttttttcagttctttcaactcgtcctgcaccacctgcatctgcaattttttgctgtctacgatggcttgcagacgggcgatcagttctttgagttccttgagttcctgttcgagtttgaaaatttccagtttggtcaggcgcgcgagccgcagatcgaggatcgcctgcgcctgccgctcggaaagggaaaagcgcgcgcgcagtttctggcgcgcgtcgggcacgctctccgcctttttgatgatctcgatgacctcgtcgatattgcgcaccgcgatgatgagcccttcgaggatatggcagcggtccttcgcctgcgccagatcgaatttcgtgcggcgcagcaccacctcgcgctggtaggcgacgtaatatttgatgatatccagaagccccagttgctggggtttcccgtccgcgatggcgaccatgttgatgccgaacgtgcattcgagatcggtgtacttatagagcgcggcgaggatcttgtccacgtccgcgtcctttttcacccgcacgacggcgcgcatgccgttgcggtcggattcgtcggtaatttcgctgatgccgcccaaaatctcttttttctcttcgcgaaggtctgcgatcttcgtcagaaggcgcgacttattgacctgatagggaagttccgttatgacgatgagttttttatcgttttcgccctcctccacggtgactttggcacgcatggtgatcttgccgcgccccgtttcgtacgcctgtaaaagttcgttggcgatgatatagccgcccgtggggaaatcgggcgccttgatatatttcatcatctggaaaagagagatcttcggattgtctatataggcgacgacaccgtcgatgacctcgcccagattgtgcggcgggatattggtggcaagtcccaccgcgatgcccgacgcgccgttcaccagaaggttggggaatctccccggcagagtgtcgggttctttcagactgtcgtcgaagttcaaagaaaaccgcacagtttccttttcgatatcgcgaagtagttcgagcgcgagcggttccagcctcgcctccgtataacgcatggcggcggcgggatcgccgtccaccgagccgaaatttccgtgcccgttgacgagcgtcatgcgcatattgaaatcctgcgccatacgcaccatcgcgtcgtacacggaagaatcgccgtgcggatggtatttacccatgcagtcgccgacgatacgcgcgctctttttatgcggcttatcgggcaaaagccccatgtcgtacatggtgtagagtatccttctctgcacgggcttcaagccgtcctccacgcgcggcagcgccctgtccagaatgacgaactccgcatacgggagcatggacatgggcaaaacttcttccaggggggtgacgaaaacgtcccccttgatcttctcgggaatgggctcttcctgctttttatctttacgtttcgccaaaattccttcctcccgcgttaaatgttcactttatccataaaggtatctactttgttgaagtttgcgttctgcgccagaaattccttgcgcgcctccaccctgtcgcccatgagcgcggtcaccatctgctccgcctcggcggcgtcctcgatggtcacctgaatgagattgcgcgccgcggggtccatggtcgtctcccacaactgttcggcgctcatttcgcccagccccttgtaacgttgaagttgataccccttgccgaccttttcgatcttttcctgcaactgcgcgtcgtcgtaggcgtattccaccacgtcctttttatacaccttatagaggggaggcatgccgatatacacgtgcccgttgtacacgagttcgcgcatatagcggaaaaagaaagtcaagagaatacagcggatgtgcatgccgtcctggtcggcatcggacaaaatgatgactttatgataattgaggttgtccaggttgaaatccgagccgatccccgcgcccagcgcgctgatgatggtgcggatctcctcgttggcgagcacctggtcgatgcgctttttttccacgttcaagggcttgccgcgcagcggcagaatggactggtattgcctgacgcgcgcctgttttgccgtgccgcctgccgaatcgccctctacgatgaacagttcgttgagttcgggttttttgcccgtgcacgcggcaagttttccgaccagcgtgagattgtctatgctgtttttggcgcgggcgacctctttcgcttgacgcgccgccagcctgacgcgcgccgccgactgcgcctttttgacgatctcctcgaacaccgtcttattggcgggatctttatacaaaagcgacagtccctcgatggtcgccgtttccacgggcgcgcgcgcctcggggttgcccagtttggtcttggtctgtccctcgaactgcacgtttttcattttgacggacaaaatggcggtcagcccttcgcggaaatcctcgcccatcagattggcgtccttatcctttaaaaaccccgcgctccgcgccacgtcgtttaggcatttcgtaagccccgaacggaatcccgtttcgtgaaagccgccctcgggcgtgggaatgttgttgacgaaggaaaacaaactttcggtgaaatcgcccgtatgctgcatgacgaattcgatcagaatgccgtccttttccgtcttgtagccgatgggcttgtcatagagcgtggacttgccgtcgttcaggtacatggcgaaatcgtgcagacctccctcgtacttataattgacgacgatgggatttttgccctccgccacgcgctcgtccaccagattgatttccagccccttgttgagaaacgccagttctttgaggcgtttggaaaccgtttcgaaattgaaactgatattttcgaacaccgctttatcgggcttgaaacgcaccagcgtgcccgttttctgcgtcttttcgcccgtatcgcgcaaatgttcgttgggcacgcccgatgcgtatttgcctgtcttttcgtcgagatacgaatggaaggacattttgtatacggtcttgcggaacaccgtcacttccagccattcggagagcgcgttggtgaccgatgcgcccacgccgtgcagtccgcccgaaaacgagtagttgtgttcgtcgaacttgccgccagcgtgcagttgggtaaagacgacctccacgcccgaaacgcccgttttggggtggatatcggtcggaatgccgcggccgttatcctctaccgaggcgctgccgtccttatagagtttgacttcgatacggctcgcaaagccgttggaagcctcgtcgatcgcgttatccacgatctcccaaaggatatggtgcaggtccttgacgcccgtcgaaccgatatacatacccggccgcaggcgcacggcgtccagcccctctaaaatcttgatgtcttcggcattatagttctttcctgccattggttcctccgcattgggttttgtatagggtctatgccgagcataaacttccgctattctaacgccattataccatatttagtggtttttttcaattaaatcgacgatattccacaaaaaaagcggcggacgcaccgtccgccgctgtaaatatcacaatcatattttgcgaagaaagtccgagatcacggaaagcgcttcgtcgcggttgctcttttcgttcaaaaattcgtgacgggaacccttgatgaggtgcagcgtcacgttcttcatgccgcagtcccgataaaacttatacagtttgcgcgtgcctttccccatgccgccgaccgcgtcgtcctcccccgaaatgagcaaaagcggcatctcggggttcaacccgcccgcccagtttttgctgtacagtttcttcatgtttttcataaaactgcggaaaaagttgttgctgcacacataattgcagtagggatcggcgtgatattttgcgttgttctcctcgtccacgctcaaaaattcgccgcccttcatctttttgtcgtagccgccgaagatcatttgattgacaaagcgcgcaggcgcgtccccgcccttgcactttgcgccgagcgacgcgaagaggtagcccgtttcggcgagcgcccagccgtttttgctgctgccgccgaggatcgcgccgtcgagaaaacgcgcgtatttctgaataaagcgctggcttaaaaatgagccgtaggaaaaaccgaacagaatatatttgaggtcgggatattcctctttataatgtttggcgacgcacgccagatctttcacggtgtcgtcaaacatatccccttcccaatagccgagcgtttcgggatcggtttcgccgtgccccctgtgatcgctcgccaccacgatatagccgagcgaattgagataggcggcaaacgcctcgtaccgccccgaatactcgttcataccgtgggcgatctgcaccacgccgcgcggctcctctacgtttttccattcccgtacatagatctctttattgtcaaaactcgtcagaatcatcgaacgctcctttttttctttattgtaccctaaatgcgcgcatttgtaaagagtttaacaaagaatctcgccaaaatttcatcgaaggacggcgccgcgaaacatagtttccgacctattcaaatatactaagagtatgaaaaaattattgatgacgggcggcgggagcgcggggcacgtgatgcccaacatggcgctgctgcccgcgctgaaagagcgtttcgacgtaagttacatgggcacggacggcattgaaaaggatatcgtgcggcggtcgaacattcctttttacgagatagaatgtcccaaactcgtacggggcagtgttttgaaaaacctgtctttgcccctgcgccttttcaaaagcgtgaaactcgcgcgccgcgggcttttggtcattcagcccgacgttgtgttttccaagggcggatacgtttccttgcccgtggcgatcgccgcgaaaaaattgaagatccccgtcctttcgcacgagagcgacttaaaacccgggctcgcgaataaactcatttcgcgctattcgagcgtcgtgctcacgtcctttcccgaaacggcggatcaaatcttaaaaggaaaatacgcgggctcgcccgtacgcggggaattgttcggcgcggacagaaaagccgcgctcgccgcgtacggatttgacggaacacgccccgtcctgcttattttcggcggcgggagcggcagcgccgcgctcaacgccgcggtgcgggaaaacctctttaccctttcgcagaaatacgatatcctgcacgtatgcggcaagggaaatctcgtgcaaagcaacgtaaagaattacgtgcaaaaggaattcgagaacgatatgggcgcggcgtacgccgccgcagacctcgtcatttcccgcgcgggttccaacactttgttcgagatcctcgcgcttaaaaagcgcgcgctggtcgtgccccttgccaacaaacgctcccgcggagaccagatcgaaaacgcggcgtatttcgagagccgcgggcttcttcacgtgctgcccgagcgcggactcgccgaaaaagacgcgctgacggacgcgatatccgcggcattcgcggacggatcgcttacagaaaacttgcggggagcgtcctttaccgcgggcaacgaagccatacgccgcgagatcgaaaaatgttgtaagatc

SEQ ID NO: 1541 - DNA, 26687 bp, Unknown
  16S sequences of unknown bacteria
acctcattcagccggagtctgcaaaccgattttgcgcataactcttgacagtaccatttgtggtgaagtgaagcgactggccgaaaggaggacagtcggaaattaaacagggacatgacagacaatgagcggtcatgtcccattttttaagtgctattggtatataactgctaaacttgttagtctactttttgaaaaccaaaattgcttttgcagtagtagtaactgacatagttactaactcatattcttgttgtaacatttcatttgctttttcttctattttctctgccatattgtctgcttttggcgagtattcaattacaactgttttatacattttctatacctcctctgccaattcccggtttatcgccttgtcgaaaccgctaaaactatagcacacaaagcaggatgtttcaagctgtcttgtccttaatgttattatactaagtacgcacttactcaccaccctacgggtggtgcagaccgttgacaaacccaagtcaacggtctgagggggcttaagcccctctctttcaaaatgtgttctttttgggtgaaaaaccccttgacaaatcgcttactgtgagcaaatacaagggctgtgcgcggcagcgcacggaacgccgatatttgcgaccgtcagggaagcgcgaatgattgagcaaccgggatgcaagaaacggggttctttccaaaaccagggttttttcaacggtatgaagcgccttcatggatggcttgccgtatagcagacctccaccatcgcggtcacggacagatgcgggtgcacgggggtttccgcgctgacactcgtggccatgacggtcgattcgtcgccctgcacttcggtcacgctcaccagccggcccagctcgaggccggacgcttccgccagcaagattgcctgggccatggcgtcagcggttgcggcgcctaacgcctcaaagtaggcatctcttgcttcggagctctcataggccagttcgtagctgttctgcgcgccggtgcggatggcggcgtcgatcacctcgcccacgcgcgtgggatcgtccagccgcaccgccaggtcgatggacacggtgtagccggaggccgtttcctgttgtcccagcttggaatactggtagttgtaaaccgtttccacgccatagtaggcggtctgtgcgtcatgttcggagatgcccatctgcgcaagcgcatccctgaggctttgcatcacctgctccgccttgtcctgcgcggcggtcaccgtatccccggagccctgcacgcacagcgtgagcaccacaatatccgccggcagcgagacactctccgtgcccgtggcacggatggtggtttcctgcgcgaccgtgagatctgccgccggagtggaaacaggggtttgcgccggagtggaagccggcgtttccgcctgagcgaaagacagggtcagcatcagtgcgaccagcagcaacatgggcagccgtttcatgggtcattcctccttggaaccatccttcggggcgcgcggggaccgtctgcgcacaaccagccataccacggccgcgattgcagccacgggcacggccaccggcaggatcatcgtgacaaacaccagcatattgcgcaggaagccgcccagccatctcaacgaggccctcagcgcggcgccgaggcgctcgcccaggccgatatcctccgccgttgcgctctgggcggggctttcctccagcaaggtcacattgacggcgctcatgtccacgcggcggtcgatgtcgcgctgtgacgtttcgtaacgctcgatctcgtactgtgtatcggcaacggcggtttccagctcgatcagatccgagacctcctgcgcctgcgccatcagctggttcaggcgctcccgcttggcatacagcgtctccaggcgcgtctgattatccgtgtattgcacggtcatgtccgtaacgctttcggagcggtcggtcacccggcccacgccctccatgccgtcgaggaacgcgtccaggttttcggacggcacgcgcatgctcagactcgctgtacgcgtatcgccgctctccacgtcgccgtattcatagaggttttccacatagccgcccaggctgtccagcagcgcctgaacattttccaagccggtctcaaaggcggtggtacgcagcgtcaggctggccgtgcgcaccagcttctgcccggcggccgcctccgtgccgccgtccaccgctccggctacgtttgtggaagcgctgctctcctggactgcatacaggtcatatgtggccgtatcggcagaccgcgccatcatcgcgttgggcgcaccggccgaggtggtggaggcgctgccggcagattccgtttcggtcatcgcgttcttttccgagggcgcggcgcttaaatccaggtccagcgtgcccgcccagaggctgcccaccaccagcaccagcgctgcaaacgccggcacgatggcgcgccagaagggccgtcttgtgctgttttccacgagtttcatcctgctctcctcccgttttacggcggcgcgccagccggtttcaaatccggcgggcacgtcctccgactggtacaggcggccgagcgcctgctccaaggcgccgttgggttccttctcccgaagcatgcgcatgcctcctttccttgggaataaacgagcgtgatgtgaaaaggttccctgattattcggacgctgccagcttcttttcaagcgccgccctggcgcggctcagccggctcttgaccgtgccctcgcgcaggcccgtaacccgcgcgatttcggcatatcccatctgctgtccgtagaacaggccgatgagcagctgctgctcctcgggcagcgaagctacggccccgcgcatccgttcggcgtccgcgtcacgaagatatgcttcatccggcgtgggagacggatcggcggggtccgcgcgctccgggtcgtccagcgtcaggctttcgcggcgcacgcgcgcgcttttcaagatgtccagacaggtgttgtgcgcgatgcggaacagccaggaggccaccgcgtcgccccggaaggcgtcaaaggcgcggaaggcgcgcagcatgctttcctgcgccgcatcctcggcctcgtgcggattgcccagcatatgcaggcagtgccggtacaccatgccggaatagggtgcgcaaaggcgctcgaaggcttccgccgtcgggcgatgggattgtttcatgcgcgcatctcctttccgcgcctggtgatgatctcattatacgacggtttccaacgcttcgcaatagggagtcaggcacggtcgcgccacaggccctccacggcaaagcatacggtgtccccatgcagcccgcgcagcgtgctcgcctcccccgcctggcaaacctccataacgagcttttcctccggaatgacctccgcgttgtagtgcaccagcagatcgcccagcatttgccggcggtgcttttccacgggaaactgattcatgaaccagtccacatagcgggtgttgttcacgtgctggttcatatccagatcggtgtagacgggcaggtattcatggcgcgagaccgggccgtccagcgcgcgcagattgccggggaagggcaggggcgccgggatgtcatattcgggcatggcctcgcccagccgcgagaccggagcgattttccgctcgtccaggtccatgagcacaaacagcgcggaggcgcatccgagcgtccttccttcggtttcaaaggtataatagcgcggaaaaaacatgtgcttggtctttccgggccaggtgcgcaccgtaacgtgctggtccagcacgggatactcctccatatgcaggcgggcacggctgagcacccacgccacccccagcccgcgcagacgctcaaaggtcaaatccagcacatggcaatgtccgtcccccgcctcctgcatggcgcggaagatcgctcccggctgccagtgcccggtaaaatccaccgagcacatgtccaaaaccgtttcatatacatagggttcgtttggcatgcaactaccttctttccgtcaaaaacagagctcaatgcgaagtataccacagtcgggcggcttttcccagcacagatttccagcgccgtcctccagccgcccgcattgacaagccccgctgccgatggtaagatatccacgtctccgacaaaggcccctcaagcaatgtaaacaaggaggaatttccatatgaccgttaccaagcagatgtccatcggcgaagtgctcagcatcgaccgcagcacggcgcatatcttcatggagtttggcatgcactgcctgggctgcccgcacgccaccgccgaatccatcgccgacgcatgcgccgcccacgggtccgaccccgacgcgctggtgcaaaagctcaacgagtatcttcagaaggcctgaattccgtcccgccacgccgcccggaaggagtgaacgaaagaatgcaggtggccaccgcgcaggaggcccttttcatggcatgtgaaatggaatcctccgccatacagctgtatacccgcgccctctccctgatggagcagctgggccgtcaggatgaaccgctctatgaccatctgacgctgatgctcgccgatgagcaggagcatctggcacagttccgcgcgctgggcggcagggacgaccttgcacaggagcggcgcgtcgcgctgtccgccgcggcggacaacattctctttgaaggcgggctgatgggcgcggcgcgggccggcctgctgcgcgatgtggagagcatgctccgctttgcgatgctggcggaggagacatccgccagcaaataccgcgagtttgcctcccttgccgcctcgcccggcgcacgggagacgctggagcgcatcgcctccgaggaggaccgccatctcagcgagcttcgaacccagggctgatctttggccggcggccgccccggatcgggtcctgccctccggatgacatccgattccggcgccgggcacgacggattcgcaaatcccgcccgaaaagtttccttacgccgtttcctgcccgcgggccccatgggcgcgagtgggaaacggcgtatctctggcgtcgattgacctgccgttccgggtgaaatctgattttcaggcggtttgatggtttcttgcaaggaaaggggctgattgcatgcgcaaaaaatccggcaatcaaacgctgacgctggccttgagcggcatgatggccgcattggtctttgtggctacctatttttttaagctgcccgtttccatcactcaggggtacatccacctgggtgacggttttatcctgctgggcgcgtcgctgctgggatgggccagcgtgcccgccgcagccatcggcagcgccctggcggatctgctgggcggctatacgctctatatcctgcccacctttgtaatcaaggggctggtcgccgccgtggccgtatgcgccctgcgcgcaaggcatccctactggctgaccgtggcgctgctggtgctggctgaactggtcatggtagccgggtacttcgtgaccgaatggctgctgctgggctacgggctggccgccgccgcgggcgccgtggttcccaatctggtgcagggcttcagcggcgtagtgctgggcgcgatgctcattccgctgctgcggcgcgtaacgcccccggccatgcgcctgtagtccacgtggtacagtttttccggatggtccgagaatgtcatgttctctggccgcccggattttttttgcagagctgtttcaggcgtccttttcctgtttatacaggaaatgctccaaatgcttctcccgtacgccttccccggcttgatccggacagatgcgggaaggcggtatattccgttctttttttgaagattttccatatcatcttgcttttatgagcctcatccgatataataaatgtaggacataagcgatttgatcgcggcgtgccgcgagaaaataaattcaatacagcaaaggagtctgattcccatgaaaaaggttcttgctctggttctggctctgaccatggtcctgggcatgggcagcgtcgcgctggccgaaggtaatgcgcaggtcttctggtacacgatgagcgacacctacctcgccagcgtgcgcaccgcgctgaacgccaagctggacgaggccggcatcacctatgtggaccaggacggcaacgccacccagaccactcagaccgaccagatcaccaccgctatcgccaccggcaccgacctgctggccgtgaacatcgttgagaccggcgcggacggcatcgcccagaacgtggtagaccaggccaaggctgcgggcatcccgctgctgttcttcaaccgttccgtttccgaggacgtggtcaagagctatgacaagtgctgcttcgtgggcaccaactacgagcaggctggcatcatgcagggcgacatgatcggcgactacctgctggccaactacgacgcctacgacctcaacggcgacggcgtgatcagctacgtgatgttcaagggtcaggaggacaaccaggaagccatcgcgcgcaccaagtatggccaggagaacgccgatgccaagctggttgccgccggcaagcccgccctcaagttctacgacgagagcaatgcccagaagtacctcgtggaccaggccggcacctggagccgtcaggttgcgcaggactacatgaccaccatcctggcccagtacaacatggacgcgggcaacatggttgagctggttatcgccaacaacgacgagatggccctgggcgccatgcaggcgctgcagcaggccggctacaacaacggcgaaggcaccaccaccatccccgttttcggcgtggatgccaccgctgacgccgtggccgccatcgatgcgggcaccatggccggcaccatcaagcaggatgccgagggcatggctgaggctatcgccaccatcgccgccaacatgatcgccggaaaggacatgtacgagggcctcaacgagaacttcaccgttgagaacgactggaaggtcgttatcccctatgctgtgtacaccggcaactgagaacaccataggccgaaccattgacggaggggcgaaagcccctccgcttcggtatcaccaatccccgcgcgcttcggggcggcgcgtgtgcgtgtcgtcagcggtgcgcgtggggaaactcagcaaggaaggagagggcggagatggaacaacaggccactcgcaccactgacggcgcccccaagcgcgagcttttgcagatggagcatatcagcaagagctttcctggcgttaaggcgctggacgatgtgtccctcacggtcaaggcgggcacggtgcatgcgctgatgggcgaaaacggcgccggaaaatccaccctgatgaagtgcctcttcggaatctataataaagacgacggcaaaatctttctggacggcaaggaggtcaacttccgctcctcgcgcgaggcgctggacaacggcgtcgcgatggtgcaccaggagctgaaccaggccctgcgccgcaacgtaatggacaacatctggctgggccgctatcccaaaatcaagggaaccccggtcatttcggaaaagcagatgtacgatgacaccatgaaggtctttgaggagctgggcatcaacgtcaaccccaagaccatcatgagtacgatgcccgtatcccagcggcagatggtggaaatcgccaaggcggtttccttcaatgccaaggtcatcgtgtttgacgaacccacttcttctttgaccgagcaggaggtggagcatcttttccgaatcatcaacatgctgcgcgaccgcggctgcggtatcatctacatctcccacaagatggaggagattctgcgcatctccgacgaggtcaccatcatgcgcgacggccagtggatcgccacccgtcccgcaaaggatctcaccatgaacgagattatccgcctcatggtgggccgcgagctgaccaaccgcttccctgcgaaggattatcaggtaggcagcgacgtggtgctcaaggtggagggcctcacggccatgtactccggcctcaaggacgtgtctttcgaactcaggaaaggcgagattctgggcgtagccggtctggatggctccggacgcaccgagcttttggaaaacatctttggcagcgccacgcgcaaaagcggcaagctgtggatgaacggaaagcccattcacaaccacagccccaaggaatccatccgaaacggcttcgccatggtgaccgaggaacggcgcgccaccggtattttcgcaatcatgtccgtgcgcgacaacacggtgatctccagcctgaaaaaatacctgaaaaatcacctgtatctcagcaacaaaaccatgcaggagcgcaccaactggtccatcaatgccatgcacatcaaaacgccgacccagcagacgcagattcgctcgctgagcggcggcaatcagcagaaggtaatctttggccgctggatgcttaccgagcccgaaatcttcctgctggatgagcccacgcgcggcatcgacgtgggcgccaagtatgagatttaccagctcatcatggatatggcccgcgcgggcaaatccgtcatcatggtttcctccgaaatgccggaattgctgggcgtgtgcgaccgcatactggtgatgtccggcgggcggcttgccggcgaggtacaggccgacgccacctctcaggaagagattatgacgctggctgcgaaatacgtctaagggaggccgaatagcatgtctgaaatcaagcccgacgtaaacaaaaaggtaaaccaactgcgcgaaatggatgcgcgcgaccgctggcgcctcattggcaactggctgctggaccatgcgatgatcatcatcatcctgctgatggtgatttacatccagattcagcgtcccgccttcctggccacggcgtctatcgtcaacatcatccagctcacggcgacgcgtctgcccattgcactgggcattgcgggcgccatcatcctcaccggcaccgacctttcggctggccgcgtggtgggcctgggcgcattcgtttcggccatcctgctgcaaaagtcggatctggccaaccgcttcctggcgggtatgggcccctggccggtcgtgatcgtgctggtggtggttatggcggtcggcggcatcgtgggcctggtcaacggcttctgcgtggccaagttcaagctgcatcccttcattgttacgctgtccacgcagctgatcacctatggcctctacctgacgctgagcaacgcggcgcagatctccaatttggatgcgagctatacctctgacctggttatcaagcccatgttccgcctgggcaacaccccggtgatgagctatgtggcctttgccatcatcgtaacggccatcatgtggttcatctggaacaagaccaccttcggcaagaacatgttcgccgtcggttccaacgaggaagcggcccgcgtgtccggcgtcaacgtaacgatggtcatcatcggcgtgtttgcgctggcgggcgtcacctacggctacaccggcttcattgaagcggcccgcatgggcgcctccaccggcaccatcggcctgaactacgagctggacgccatcgcggcctgcgttatcggcggtgtatcgttcgtaggcggcatcggtaaaatcagcggcgtggtgctgggcgtggtgctgatgcagctcatcatgagcggcatgaccttcctcggcatcagcggcaacaccacctacatcatcaagggcctggtcatcctgattgcctgcgccatcgacatgcgcaagtatctgaccaagaagtaaatcttccctttgggaaaccaaaacgcccggcagccggatcggactgccgggcgtttctgtatggaaaaagaatgaaaaaaatcttttgctccgtgaaccgattgcctccgggctttgtcataatagacagagagagcaatgatgctgtccggcccgattgccgaggaggttttgccatatgaaaaagcacctgtgcatcctggtcgcggtcctgctgatgatgacactgacggccttgtgttcggattcgcaggccgcggccggctacgtctcgatcaaagagctgcgggaaacgctgccgcagcgctggatgggagaatacgttgtcgaaaacggagcttacaagcaactggaaaaaggcgatacggtatctgtagacgtgcccatcgtagtaccggaggtagacgcggtgcctgtggtgcgcatcacgtgggaaccgccaatagaggggctggatgaatcattttacataagcaaaaatgagtggtactcaaagacgataggtcggaactttccaatggacgaaatgggattcccggtgatggaagagaagactacgtttgatcccgaacttccatgggaggacgccccagccattgccattgaggaattcaggaaatactttcccatgatgcgagataaggagttgacctgttactttcattattcttatggagagtcggaaaataacggttttcaatgtctttatttctatacaacgtaccatggcataccacatttgttgagtaatcgttcttttctgcatgtcatcgaaagcgagattggacctaatgacctgatagaccctccaggcaacgtggccatgcgcatcaaacgtccgggtcagttttgggtgaatatagacacgtccaaagaaatcggggtggagatcgaggatatcccactgcttcctttcgaggaaattttgaaggcgtttgaacggcaggttgaagccggccatgcgtactctctcaacgaggtccgcttcggctacatgacctttatcgacccggagaaaaagggagaggaattcgtgctgttgccggtttgggcggccaaggggagaacgcgcggagatcttaccattcccttcgacttaaagaccgatcaggtggtaaaggatcgcagtgcatacggatgcaattcaatcgtcatcaatgcgcagacaggagaagtctatgatctgacaggcgacagacgggagaatcggcgctatgtgccggatatccttacatgggacgaggtaaactagcatcaccaacgattttccgtccatcttacaggcatttcttctatggtcaactgtattggttgcgtctaaaaaaggaggtccatacctatgcgaaagccattgcgtatcgtcactttctgtatgtctttgcttgttgctgtttccgctgcaacgcatgccttgtgcgagcagacatatgtttctattcagcagttacgtgaaacaatgccaaaccgttgggtaggagaatatgttgtcgaacatggcgcgcctaaccagcttgaaaaaggcgatacggtggctgtagatgtgcccatcgtggtgccagaggtggatgcggtgcctgtggtacgcattacgtgggaaccgcctgccgagggattggatggatcgctggaggtggtcagggatgactggaacgcgaaaggaatcaacagaaatttcccaatggacgagttggcttttcctgtgctggaagaccatatgacgtttaccccggaacttccctgggaagaggcaccggccattgccatggcggaatttcaaaaatggatgccctttatgaaagacaaagaacttactccgtattaccagggctcttatggcgattcaaatggaaacggctttcagggcatttacttctatacgacctatcatggcataccgcatctcattgtcagcgggctttttcgccacgaagtgaaaagtgaaaagagcgaagtagagggacgcgcgattgctccatcctcgatggtagccatgcgaatcaaacgccccggtgaattttgtacgaatatctccacttccaaagaggtgggagtcgatatagatgacattccgctgctgccatttgatcgcatcatggaggtcctggaacaatgggtgacagacggatatgtttattcgctgaatgaagtctccttcggttacatgtgttttattgaccctgagaaaaagggggaggagtttgtgcttttgcctgtctgggctgcaaagggcaggacacgggaggacctttctctgccatttgacttgaaaactgatcaagcggttgtggatcgaggaggatacctttcgagcagaatcatcgtcatcaacgctcaaactggtcaaccctatgatttgctcaacgataaacgcccggacaggctccatgttccccacatcatcacatgggacgaggtaaattagcgtcgccaacgattttccgcctggccttgcaggtatttcttctatggtcaactatgttggctgcgtctaaaaagggggctcgaacctatgcgaaagccattgcgtatcgtcactttctgtatgtctttgcttgttgctgtttccgctgcatcgcatgccctgtgtgaaagcgactatgtaacaatcgcagaacttcgggaaagcctccccgaacggtgggtgggcgagtatgtcgtgcaaaacggagcttacaagcaactggaaaaaggcgatacggtatctgtagacgtgcccatcgtggtgccggaggtggatacggtgcctgtggtacgcattacgtgggttccacccgctgaggacctggataaaacgctggaatggtatgggaacacatggagctacaagacggtcaatcgcaatttccctcaggatgaattaacttttccggttctagatgctaatcatacctttgaccctgatctaccttggcaggatgctccgataatcgctgagaagtcactcaaaaaatggattccctttatgcaagataaagaactcacctgctatgctcaacattcttatggcagttctcaagataacggttggcagcgcttatgcttttatacaacctaccatggcataccgcacctgatagtggatagcttttctcatgagctcaaaagtgaacgcagctttttttcagatgaaaatgaaatttttgcagctgttccttcaactacaatcgtcattcgcatcaaacgtcccgaccagtttgtcgcaaatctttatacagccaaagaggttggattggacgtggaggacctccctctgttgccctttgatgagatcctgaaagcttttgaacgtcaggtgaaagccggctatgcatactcactcgacgaagtgcgcttcgggtatatggtttttatcgacccagacaataagggcgaggaatttgtgcttctgcccgtttgggcagcaaaaggcagaacaagggctgatctttctctgccctttgacctgaaaacggatcaagaggtattagatcgcataggatacaccagcagtacagtcattgctgtcaacgcccaaactggacaagtctatgatttctataacgacaagcgtccagaccggcgctatgttccccacatcatcacatgggacgaggtgaaataaaccataaagggaccggccgcgtggccggtccccctcttatctgcttaccaactttctcactccgccttggccccgataatggccttgatgcgccgcacacccgcggaggagctttcctccttcttgatcttgaagctgaccagatcgccggtgttttgggcatgagggccgccgcagatttccttgctgtacggtcccatggtgtagacctttaccttctcgccatacttggactcaaacaggccgatagcgccctgctccttggcctgggccacggtcatttcctcacaggtgacaggggtgtggctctcgatggcttcattcaccagccgttccacctcggccaattcctccttggtcatcttgcggccgaaggaaaagtcaaagcgcagacgctcggcggtgatgttggagcccttctgggcgacctccgggcccagcaccttgcgcagcgccgcgtgcagcaggtgggtggcggtatgcaggcgtgcgctctgctcgctgttgtcggccagaccgcccttgaagcgctgctccgcgcccgcctggctggtggcctggtgcctgcggaaacaatcatggaaaccatccatgtccaccgtcaggccacgctcgcgcgccagctcctccgtcatctccacggggaagccataggtatcatacaggtggaaggcgctcacgccatcaatctgtccatcctgcaccttttccaccagtttttcaaattcgcggttgccctgcttgagcgtgcgggcgaagcggctttcctccagggagagctgctccaggacaaaggcctcgttgcgcttgagttcgggatacacatccctgtactgctcgatgatgaccttcgccacctcgccggtgaagccctcgggcatgccgatgcccatgccatagcgcaccgcgcggcggatgagacggcgcagcacatagccctgatccacgttggaggggctcacgccgcggtcgtcgcccatgatgaaggtagccgtgcgcatatggtccgcaatgatgcggaaggcgcgggtggtcatttcatcactgccgtattccttgccgctcagttcgctgatctttttgagaatatcggcaaacagatcggtttcatacacgctctttttgccattgagcacgcagatggtgcgctccagacccatgccggtatccacgttcttctgctcaagcggctcaaacgtgccgtcagcctttttgttgtactgcatgaacacgtcgttccagatctccagataccggccgcaggagcaggcaggcgagcagttcgggccgcagggctccttgtcggtgatgatgaacatttcggtatccgggccgcaggggccggtgatgcccgccgggccccaccagttgttttccttgggcaggaagaagatatggtcgtccgccacgccgcagttgcgccacagctgcgcgctttcctcgtcgcgggggcagtccgcatcgcccgcaaacacggagaaggccagacggtccttgggcaggcccagatattccgggctggtaaggaattcccagctccagggaatcatctgctccttgaaataatcgcccagcgaccagttgcccagcatttcaaagaaggtgaggtggctgaagtcgcccacatcgtcgatgtcgccggtgcgcacgcacttttgcacgtccgtcaggcgtttgcccgcgggatgcttggctcccatcagatagggcaccagcggatgcatgcccgcggtcgtgaacagcaccgtggggtcgttttccggaattaccgacgcgctggaaatcacggcatgtccatggtccttgaaaaacttcaggaacatcgagcgcagttcggaggaatgataggtcttcatgggtagtctctccttcttgcaaaatgcgggtggtggcgcttgtatcgcaaggccgccaaagcggcacacaggctttcccaattatagaggaaacgtcaggcggtgtcaataagccgcatgggaaggcgaaggattttcgtccttcattcagcaggaattgacaaaacagggccggcgtgataaagtgcttgctggtttgctccggcttgccatgtattcccgtttcggacaaggaggacctttgtgatgttcagacgtctcttttccgtgctgctgggcgtcttagcgctcacggcagccgcggccgctctggccgaatccttttatcttccgggaacctatacggcgacggcccagggctgcggcggcggcgtgaccgtagaggtgatctttgacgagacgcagatcgcctccgtcacggtcgtcgagcattccgaaaccgccgggatctgcgagcctgccatcgagagtatcccggagctgattgtggaaggccagacccttgcggtggatgccgtcaccggcgcgaccgtgaccagcaccgccattctgaccgccgtggcggactgcgttacccaggcgggcggcgacgtggacgcgctgctgtctgcctcggacgggacaggttgccttggcgagacgcttcttccgtcggcggacacgccgtggtaaaccgccgaaagtttttttgctgcggggattgacgcggaccgcaaaaacccatacaatagcattgacaaccaaataccttataaagagcggtcgagggacgggcccgatgacacccgccaaccggcagagatgcatggtggcaaatcccgcagcgtgcatacgctggcagataaggtagaaaaacgcctctttcgcgcctgcaatgcccgcaggcgcgttttttacggcctgcccgccgcgtcctttgccccgctccctccggtccgctcgtatcaggaaggagaataccggcatgcgaaccctttttaccagcgaatccgtcaccgaggggcatcccgataaggtatgcgaccagatcagcgacgcggtgcttgacgcgctgctggcccgcgaccccatggcacgcgtggcgtgcgaaacctgcgcaaccacgggtcttgtgcaggtcatgggcgaaatcaccaccaccgcctatgtggcgatcgacgaaatcgcgcggcaggttctgcgcgacatcggctatgtggatgcaagccttggcttcagcgcggacagctgtgcggtgctcaccgccgtacacgcgcaaagcccggatatcgccatgggcgtagaccacgccctggaaacccgcgaggccggcgagagcagcaccggcgcaggcgatcagggcatgatgttcggctttgcctgcgacgaaacgccggagcggatgcccctgcccatttcgctggcacacagcctctctcgccggctggcgcaggtgcgcaaggagggcgtgctgccctggctgcgtccggacggcaagtgtcaggtcacggtcatctatgaggacggcgcgcccgtagccgtggatacggtggtactctccgctcagcacgacgaaagcgtggagcggacgcagcttgaaaagtcgcttctggacgcggtcatccgcgaggcggtgcccgcccggctttggaccccgcgcaccaaggtctatatcaaccccaccggccgcttcgtgctgggcggtccggcggcggatacgggcctgaccggccgcaagatcattgtggacacctacggcggatacgcgcggcacggcgggggcgcgttcagcggcaaggacccctccaaggtagaccgctccgcctgctatgccgcccggtacgtcgccaagcacctggtggccgaggggctggcccggcgcgccgaggtggcgctggcctacgccatcggcgtggccaaacccgtcagcgtacaggtgaacaccttcggcaccggtgtgcgcaccgacgagcagctcagccatgaggtgatggagcgcttcgacctcagcccggacggcatcatccgcatgctggacctgcggcgccccatctaccggcagaccgccgcctacggccacttcggccgtccggacctggatttgccctgggaagctctggactgaaaaacacaaggattttgggggaagcggcatggccgcctcccccatcgctctacttccgtccgcgccgttccccgtccttccacacatgcgccagaatatccttgagcaccaggcaggcgtccacgtcgctgtagccatattcccgcttcagccggtccagcagttcgcgaagaggcccggcataatcgttgattttcacgcgctgctgataggtggtcaggacagggtagcgctttccccacaccttggtccaatccacctttttctgcgtttcctcgctgatgctgtcaatcgtgcgctggatctcctccacctccgcgtcaaaggcgatcaggtcatccagcgtcaggcggtagagtcccgccagccgcttggcttgacggatgtcgggcagggtttcgtcggtttcccattttgatatggtttgccggctcacacccagcttttcggccacctcctcctgggacaggccgctcttttttcgtgcgttgtagagattggttcccagattcatgcgccatccctcccttgtggtgtaaggttgatatcagtatacgggacggagcggatacgcgccagcccctccggcttgcagttttgcccgctttcttaacacggcccggcgcacaccttcgcgccgggccgccgtatactgatgatgcgggcatcagaaacgatgccttggaggaggaacaacgatggcaaacatcgaaccaggcctgccttgcgcgatcatcggcgagggcgcagctgtgcgcctgggggccgaggccgggcaggatgccagcgaaacgcacgtctattttgaaccctgcgaggaaaacaaggcggtcaccgtagccgaaagccagcataacgaggacggcgcgggccgcattctggatgtgaacctggtgctgaggaacgtgtgccccggcaggcgcgtcgcggtaggcgtcacgcttcacgaggtggatggaacaggcggggaacacgcgcgcggctttcacgccatgaccgtaccggctcatcgcgacggcccgcgagacgttaccctgccccggatacgcttcgtcctgccggaggacctgcgcattgagggtgcggacggcccgcgcggctgccggcgtcactttgtggtgcgcaccagcagccgctatgtggacagcaccgtgaaggcgtgaccctctcagcagtccatacgctccctgacgcatgacagggggagccggtcatttgtccggctcccccttttcgcaccccgtgacagcgtggggcatatcctgtagcgtgcgcagccgcgcacgaaaggaaggaacgatatgatcccagtcaacaagctggtggaagtattctataccatgctgggctggccctatgcctcccccggcgccaacggacccgcgggcatcgattgctccggcgcgttcgtctacgcctacaagcagtttggcgagcgcatctatcacggctccaaccgcatcgtccgggtctattgccacgatgtgcggcgcgtgaccagcgccagccagctgcgcgtgggtatggccattttcaaggcgcgcgaggatatcagtcacatgaaggcggaatacaagcccggcgggcggtactatgaccccaacctgccctatgactactatcacatcggcctggtggtgagcgtgcggccgctgaagatcatcaatgccacgccgcccagcgtacgcattgataccgatctgtcgcgctggtactgcgcgggcgagctcaacgccgtggactacgacgccgaagaaccgccgcagcccgctcccccgcccgatgcggagctgcgtctggccgaggtatgggccgagcggggctccacggtaaacctgcgcgtcaggccctcccgtgacgccgtggtgcgcgtgcgcgtccccatcggcgaggtggtggaggtgctggacgaaaccaacgaaacctggtggtatgtgctttacctcaagacaaccggctatatgatgcgtgaattcctgcgcgaacaggatggctgaaccttaccccagatcccgcaggaacgcctcgaagttcagatggaaaatctgctcccgctccccgtccgtcagcggcagacgcagaaagcgcgccatctcctcctccgggtcccacatggggtagtcggtaccaaagaacgcgcggtccgtaccgtagcggcggatgatgcgcgcggcctcctccggctcaagggcgtacaggctggaggaggtatccacccacacattgggccgcccggccagcacacgccacgcctccttccacaccgaccagccgcccagatgcgcgcagatcaccttcaggtccggcgcctggtccagcacatgcgccatacgctcaggctggctataggcatagcggtaatcgcccgtatggaccagcgcgggcaggccccgctccgccatggcgcggaacatggccacagcgcgccggtcgtccagcaggaaggtctgaatatccgggtgcagcttcacgccgtgcagcccgcccgccttgatgcggtccagctcaccgggcacatcctcgtagtccggatgcagcgtgccaaagccgatcagccggtccgggtgctcggcggatacgcgcatcaggtagtcgttgatggaatgcacgcggctgggtgtaaccgccacgctgtgcaccagaaagcgggagatgcccgccgcctcgccatgggccatcagctggcccagcgtcccgtccagacacatgggaatgtcgtaaaagatcccggtggacttcgccgccttgagcgcgatggcatcagggtaaatgtgcgcgtgtgtgtcaatgatggtcatatggcagctcctttgttcagccgcgatcctcacggaaataggccacgcccaggctcatggggggctggtcctcacgctttttgcgcaggctggtgatcaccagcaccactatggtcaccacatagggcagggccttgaagatttcctgcatgctgcggtccaggccgggaatgtagagatagagaatgtacagcccgccgaagaggatgctgccccagatggcgttgagcggccgccagcgggcgaagatcaccagcgcaatggccagccacccgcggtcgccaaacccattgttgacccaggtgccgccggtatactccatcacgaaatacagcccgcccaggcccgcgagcatcccgcccaccaaagtggccagatacttgtaggcggtcacgtttacgcccgccgcatcggcggtggcggcgttttcacccacggcgcgcaggttgaggcccttgcgggtacggtagaggaaccagctcagcaccaccgtgagcacgatggaaaagtaggtcaaaaacccgtagctgaacagcacctcacccaccacgggcagcgtgctgagcaccggaatcttggcccggaaggcgctggccgtagcctgtgtggaaatctgccccacgccgcctgccagcctggacagcgaaccgccgaagaagttgccaaagcccatgccgaaggtggtcagcgcaagaccggtcacgttctggttggcccgaagggagatggtgagcacgctgtagatcagcgcccccaggccggagcacaccagcgcgcataccagcgcgatcagcatgcccacaaagggcacgggggcttccacgctgttttcatagaggaacgcgcccatcagcccggccacgccgcccatgtacatcatgccgggcacgcccaggttcaggttgccgcttttttcggtcacgatttcgccgttcgcgccgtacaggatggcaatgccctgcgcgatggccttttgcagaaacacaacgatcaggttcatgccttgacctcctcgcgcgcatgctggcgcagctcgatgcggtagttgatgaagaactcgcagcccagaatgaagaacagaatcacgccggtgaggatatcgctggcgttttcattgaggttgaactgcgtggcaatctgaatggcgcccttttccatgaacaccaggaaaaacgccaccagcagcatcgcaaagggattgagtttgcccagccatgccaccacgatggccgtaaatccgcggccgcctgcgaggcccgtggagatcgtatgccccacgcccgtggccagcaggtaccctgccaatccgccgataccgccggagatggccatggtgcggatgatgacgcggccaacgttgatgcccgcgtaatgcgctgtattttcgctctctcccaccacggcgatctcatagccctgcttggaaaactgcatgtacacatacagccccaccatcagcgccagaacgatcagaatgggcagcaggtagctgttggtgccgatggacggcagccatccctccttgccctggctgttgatcaggcccacatgattggagccgcgggggttttcccaaaacacgatggcgaaggacaccagctgcatggcgatatagttgagcatcagggtaaacagggtttcattggtgttccagtgcgccttgaaaaacgcggggatcacgccccagatcaggccggcggccacgcccgccacggggcagagtgcatacatcgcccaagagggcaggttctttccatagatcataatggcagcagaagccatggcgcccaccagcacctgtccctccgcgcccacattccagaatcgcatgcgaaaagcgggcagcaccgcaaaacccacgcacagcagaatcgccgcgtcgcggaaggtgacccacatgcggcggttggtgcccaccgcgccgtcccagattcccgcatagacgttgagcgggttcatgccggtcaggccaaagatgatggccgcgcacaccagcagggcgaataccagcgcgaccagccgcaccagcatggcccggcccagcgacacgccgtcgcgcttgacaatatgcatcaggggttcctttgcaccggtcatgcctgcgcctcctttgcgtcatgattggtcatcatcagaccgatctgctccttggtggcgtcgcgcgcgtccaccgtgccgctcacatgtccgtcggccagcaccaggatgcggtcgcacagggccagcagcacatccaggtcctcgcccacgcagatgacggcagaaccgttctttttctgctcattgagcagccggtagatggtatgcgacgaattgatatccagcccgcgcacgggataggccaccatcagcacctgcggcgaggatgcgatctcacgtccgacgagtaccttctgcacgttgcccccgctcatgcggcccacgggccattccacgccgggggtaaccacgtccagctcacgcatgatgcgctcggccagtgtgcgcggctgcttgcgctcggaaaagaagccgcggccgcgtttgtagctgcgcagcatcatattgcccgtcatgcccatggaagccaccaggcccatgcccaggcggtcctcgggaacaaaggccagccggatgccgatttcgcggatttcctcgggggtcatgcgggtcaattccttgacatggcccttgcggttggtatattcaatggagccgctcttgagcggctgcaatcccgcgatagcctccaaaagctccttctggccgctgcccgcgatgccggccacgcccagaatctcgccggtataggcctcgaaggcggcatgggagagcacctcgcggccctcgtcattgacgaccgttacatcgcgcaccttcagcttgaggcggggattcaccggctcggggcgctcgatgttcagatccacgcgcctgcccaccatcatttcggtcaggcttttctccgtggcctcggaggtctgaatggaaccgacgctatgacccttgcgcagcacggccacgcggtcgctcaggctgaggacctcgttgagcttatgggtgatgatgatgatggaatgcccctgatcacgcatgttgcgcagcacctggaacagccggtccgtctcctggggggtgagtacggcggtaggctcgtccagaatcaggatgttcgcgccgcgataaagcatcttgacgatttccaccgtctgcttctgcgacacgctcatttcatagattttctcatgcgggtccatttcaaagccgtatttctccgtcaggcggaggatgtcgcgctctacctcccgcatgtccagccgcagttttcccggaaggcccagaatgatgttttcggcggcggtgagcacatccaccagcttaaaatgctgatgaatcatgccgatgcccaaggcgaaggcgtccttgggcgagcggatgaccacctcgcggccctccacatagatatggcccgcgtccggaaagtaaatgccggccagcatattcatcagcgacgtcttgccgctgccgttctcgcccagcacacttaagatttcgccgcggcgcacggtcagatccacgttttcattggcaaccaccgagccgaaatgcttggtgatgccgcgcatctcgatcattgcattggattgcaaggcttctccctccgggctgtagaaatgaaagaacgccctgccgccctgacgggcggcagggcagagccgtaaacgcgtcgcttactcctcgacgaccgcgttgatgccgtcgatgatgatatcgaagtagggagcgctgcgcacctcggactcatggaagtagccgtcggaaaccatctcggtgccttccaggccataggcggtggtgtaggtggtcagttcctcgccgcccacggtgaaggtggagcagtcgaacacatgcagggtgccgtccttgagcgcggcttccacctcggccaccttctcggcggtgccgggggccacggcggcctcgttgagctcggtgatgtgcaccgcgccgtcagagtagccatggcaccagtccttgggaatctcggtgccgtcgatcacgcactggatggcgtaggtcacataggcgccccagttgcaggccgcggaggtcagcgcatgggtgggagcggtggggatcatggagatgttgtaacccacgatgggcacgccggcagcctcacaggcggtggcggggcccacggtgtcggaatgctgggaaatgagcacgcagccatcagcgatcagggcctcggcggtctccttttccagcgccatgtcggaccagctgttggtgtagcggacctccatggtcgcggaggggcacacgctgcgggcgcccaggaagaagctggtgtagccggagatcacctcagcgaaggggaaagcgcccacatagccgatcttggcggtttcggcggtgatggtgccgtcctcgatcatctggttgagcttcatgccggccaccacgccgctgacatagcgggcttcatagatggcggtgaaatagttgtgcacgttggtcagctcgctggcgctggcggcggtgccggtcgcgtggcagaactgaatgtcgggatattcggcagcggcctggaacacgtagctctcctggccaaagctggtggcgaagatgatgtcgcagccgttctcggccaggtccaccgcggcctcgtaagcggcttcggtttcgggaatgttgtacttgatcatcacctggtcgtcgctgatgcccagggcttcctgcgcggccttgaggccgttgatgtggttggcggaatagccttcgttttcgtcaccgatgcagatgtagcccaccttgatctcttccgcgggaaccgcggcgctcgcggcggtcacgcccagaaccaggcacagcgccagcagcatgcttacgagcttcttcattgtgttccatcctcctgtaatcgacataaaaacctaagggacctgcttatgatacaccaggttaggcgctttgtaaagaaaaaaggcgaacatttttttataaaaatttttatgcgttcggaaatcgaggagtgctctcaacagctgcttccctttagccgctcattcaaataaggccaaaaaaattttggcggcatgtattgcaatttcgtttttcttctgctataataactaggctggtttgagagagcatgttgctctttcagcgaagcatgtgggctcgtagctcagctggatagagtgtttgactacgaatcaaaaggtcgtgggttcgaatcccgccgggctcaccaaaccaatataatccgaacttgtttccggtaggagatgggttcggattattggtttttttcgatccgtatgaaagtacctactttcgcaacggggtaaggcgcaagcctgtctccaagccgaggggccttcggaagaagcaataattccatagacgcaaaaaaaggcggacgcagccgttttcacggtgcgcccgccctttctttcgtccttactctgccttgacctcctgcttttccagttccctttgcttcttccattcagcaaattccctctggccttcctcactttcatagaaagcaagaatatccgggaggatgcagcgggctattgcttcgatctggtgctggggaatatcggtgttgttcgtgagctttttccttccgcccaaatgtacctcctttcttgagaaaatggctatcgctggggagctttggcagactgctccctctgccgctcttgaaacgcctgtctgatctcctgaggaatactttccacaaatcgtcggagccgctcgttttcctttttcagctccaatacttccacccgcttttggatgctcttttcgtcgttgactttttgtttcaggcccatgttctcctgcgtcaagtagtcaatggtggcttgatacttcttcatctgtcccagatgcctttccagccgggcgaaatacgggcctatcatttccagcgtctcgtcccgcttctttccagcgttcagacccccaatctcgcttatcgccttttcaatggtccgctgctggcgggtgaggtccacagactgcttgaacagccacgtgggaatgtgtctgcgctttgtcaccagcgcgctctcgccccgtttgaggaccgggaaagcctttttcatgtgcgcgtgaaactcatcctgccattgggacaactgcgcccggttacccagaatctccttggccgacaggcggccgtccttcgtgatcggtgtaaagcacaggtgaaggtgcggagttttctcatccatatgtaccacagcagaaaagatgttatcccctcccactttcttctccatgaaggccaccgcttcggtgaaataggcttgtacctcctgcttgcttctgcctgtaaaaaactctggactggcggtgatgagggtatccacaaacatggtgctgtcctttcggaggcggcaccccgccgtcttgatgcgaatgtcgatttcctttcggtacttctgtgcgggctggatgatatggaaattgtccttgcttttgctgatgtcaatgtccgggttgctggcgtacctctcctttgtgcgctc

SEQ ID NO: 1542 - DNA, 5017 bp, Unknown
  16S sequences of unknown bacteria
gcgtatgaccaacggcggcgtctcggtttgcacattttccatcgctgttcagcgccgctttgccaaccagcagggcgaacgcccggcggactttttcaacatcgtctgctggcgcggtttggcggacaactgtggtaaatacctgcataagggcagcaaagtaggcgtacacggttctattcagaaccgcagttatgaggcccaggacggtaccaagcgctatgtgaccgagatcatcgccgatgaggtggaattcttggagcgcgccgggcaaaatgccgaccgcggccatcaagcgcccccgccgccggaacccgcctttggcaacagtggccttggtttcggcgatacggtagaggacgatgaactacccttttaatggaaaggactgaaatagaatggaagaaagaccggtaagacgtccccgtcagggtggacgccgccccaaacgcaaagtttgcgcgttttgtgcggataaaaacgccgtcatcgattataaagataccaatcggctgcgccgctatgtatcggagcgcggaaagattttgccgcgccgcatgacgggcacttgcgcaaagcatcagcgtgagctggccattgccatcaaacgcgcgcgcatcattgctttgctgccgtttgtcaacgactaagcaggaaaaaaacgatgggaatcccatcgttttttctttttaggaagattgcatcataccgccaaatctgttacactttgcaaaacaagcctaacaaatctggaaaggagggacacgcttgagacataaagcacatagagccccgcaccatgcaaagcacgtcgtgcggcgccattggtcgtttgaaaagttttggcgcggccctctgcccaaggtgatcttggtttgtgttgtggccgtttgtctgttaactgtcttttttcgtatgagcggcaacagcgatatcgatgtgcttccagagatccgcgaacggggtacggtgcgtatcggggtcttggaagatgaaatgcccttcagcaaggtagaggatagcgccaccgccactggctttgaggccgagcttgccgctttgatcggcgcacaaattttaggcggccccggcggcgttgtctatgtgcctgtgaccgtgaagaacgatttagcgctactgtccaacgaggacgtcgatctgttgatttctcgcgtggaggtcacagcttccaaccaggaatcctatcagcttagctccgtctattatcaagaccctgtgatgctgatgacaaaaaacggcgctacgctggatttatcctcctcggaaaccaagatcggcgtaatccccaatgccaccatcaagcccatgcttaccgattatctgaccaccatgggctatccggcacttatcacggacatttccagctatccggatgcgctccaagcgcttagggatggaaagatcaatgcattctgtgctgagcaaagcgtcctcaaccgctatttggcaaacgatctttcgctgcaaaatatacaaattggccatatcgattatgccattgctacgcgcaaccgtgaacgagacttggcaaatctgattgaaaaagcgctggcgcaaatgagagacgacggtacgctggcgcctctatatcaaaaatatagccttacaatgccagtggaacaaaccacagaatcaaattagaaagggttttcctgatgaatacaaggaatcttcaatgcccttggcacaatgtggatccggcacgggtaacgccatccagctttgttgccattgtcgagatccccaagggcggaaaaaataaatatgaattggataaggaaacgggcctgctgcggctggaccgcgtcctctacacctccacgcactaccccgccaactatggcatgatccccctcacctatgcggatgaccatgatccgctggatgtgttgatcctctgccaagagccgttggtgccgatgtgcatggtcacctgccgccccatcggcctgatgaccatggtggatgacaacgaacgcgacgaaaaaatcatcgctgtgcctgtcagcgatccggccatggaaggctattccgagctacaccatctgccgccgcatcataccgaggagatgcagcatttctttgaggtatacaaaaccctggaaggcaaaaaaaccgtggtagagggctttgaagggcgcaaagccgccgagcaggccattgcgcgctcgctggaagcctacaaaaaagaattcggcctagaaggctgaacccaagccgctgggtatgccccttatcattcaccctaaacaagcaccctattttacaacaaccctgggcatataaaggcggtgagcgaaccaaccaaaaaaggaacggatgcatccgttccttttctttacctcataaagggaatttcccaaatgcgctcgtaatcggggtatgggtcccgaaacatggtcggctgcgacatatacagcgccaaatgcgaaaggaaaaaggaattgctgcgtacccgcagcttgggattcccaaaccggcagccgtgtaagatggtgatgttgggggcaaaaggctttaggtctaacgccaggcccagctcgtctatgctccggccgatgtcgtttttcaatcgatacaacatctccgtatccccgcccagctgcgcatatacgttgtccccgccgctgcgcaccagcgcgcccacgcctacgatctgcaataccggagaaggcagcacggccaagtcagtttccaacttgtggatcagcgcctgcgcatcgtcttcggtaacctctccgcctacctgaaacagcatgcgaaaattttcctgggagatggcccgcccgccgattccgatgccaagcaagcggcgctgcagctctgtcagcgtctctatcatgctaggcggcaattccaaagcaaataacagccgcacaggcgctccccctttcctcgcagatttttgcgctttttgcatattattataccattatatatgacttttccaaaaacttcgagtgtaaattcttaactgtgcgattttgtgcacattggccgcttatggtacactacaaataaaaaggagggacaggcctatggcattatggaaaatctgcggacgagccggcagcggcaagaccacttggctatgcagacgcattggccaagccatgcagcaagggcagccctcctatctgatcgtaccggaccaatacacgctgcaaggtgagcgggaattgatgcgccatctgcatgcagaggggctctggcatgcagaagtactgagcatttcccggctctgcgaacgcgttcttgcacaaaagccttccctgctaaagccgatggaccggcggggcgaagccatggccgtcagcaggatgctgcttaccttgcaagatgagcttaccgtttatggccgctacgcccattctccccagtttgccgctaccttggccggggaaatcgcagaatacaagcgctttggcattgcgccagaggctcttatggaggctgggcaggcccgcccgcatttacaggaaatcgccaaggtttatgccgcttaccagggacatttggccggagaatatcaggataccgaagataaaaccgacctttgcatcgatctgattccacaaaccgtctttctaaagggcgctcttgtctgcatagacggttttgagatgctgacaaaacaggtctaccggcttgtggaagcgctgctccggcagtgcgccgacgtctgtatttcctttcgccttggcttggaaacagacgcagacgcgccaacctttgccaccgaacacaagcaccttgcccgtgtcagcgctttggcagagcgctgcggcattcgccagcataccgtttggctgccgcgcgaaaaaggccagcgcccaccgcgctttgcgcacagccctgccctagcctatttggaatcgcacctctttgcctatcggcccgctccctatgaagggccggcacaggaaatttcgctcatccatgccggcaatccctggcaggaagcggaggactgtgcacgccaaatctttgcccttgtcaaagatcacggcctaaggtacaacgagatcgccgtggtctcctccgaaatcgagctgtatggcccgctgttgcagcgcgccctatccctctatgacattccgatgttttgggatataaaacggcgggtcagcacacacccggccgcgcaatttgtattgcaagcgctgcgcgtagtacaaaatcgccgctttacgcgcgatgtggttcgtttcttaaaaagcgggtttacccgcctttcccaagagcaatgcgagcagatgcagcgttgggcgcgccgctttggtctgcgcgcctatccgcctacgcccccctcctccatggagccggaggagcaagaggcttacctttcactctaccatctgctctttgatccgctggaagcgctgcgaaaatcgcttctgaaggcccgctctgccaagcagcaggcagaagccttggttcagtatctggaggaggacgggtttatcgagcggctccaagccaccatcgacgaaacctacctggacgacccagataccgccgcgcaggccagcgagttttttacccttctgggcgatcttttggcgcaggtcatccgtgtcctgggcgatcaggtgctaagccccggagactttgccacgctgctttcctccggcctagccgctgaggaaattggtctgctgcccagccaaaacgacgccatcaatgcgggctcgatcctgcgcagtaagatggatgagatcaaagcgctgttcgtcttagggctgtcggccggcaaagtaccggccggcactgccgaaacgggattgttatcgcgcagcgaccacgccctgttggaggaaaacgggctctggatgggcaacaacgaggcagagcgcgccagcgaggaggagttggcggtatacagcgtattttgcaagccaagccattggctgtacctttcctatccacaagccgacttagccggcaaacagctcctgccctcgccctatatcgagcagatttctcagctgtttcc

SEQ ID NO: 1543 - DNA, 3076 bp, Unknown
  16S sequences of unknown bacteria
ctgtcagtgggagctttcaactcccactgacataagcatccccctcacccgccgcttagtgctccgcgcacttgaagcgggggaatgcttatctgcgttcaaaatatgccgctatccgtgcccgatccaggttctctccgatcacaatcagcacttcctgtccccttttgattggctgcacactctgccggcgacgcgtcatattaagctccttccaggcatcagctccatccttgaaaaatccctttacccgaaagaccgtcccgcatgcattattagaaaatatctcctgtactgcctgcaaaagagccttttcgtccattccaagattcataaaaaacagtgattcgaacccgccgtgttcactataatcctgtttcacatagctggcgtgctcatagcctgccgctgcgattttttcaaagtctgcatccgtaagctcctcccagttcttcctcacgacgtgctcaagctccagtctccgactgcattttgcatgctcaagcgcccggttcagatgcgcgaccgtattctgctgctcttcttcggatgcctcctgcgtacggctcatcacgatacagcctgccgaagcagcctcagaagccagcacataattcgcctccggtgaaaggatatcctccagacgcgcatccacgatcgcaagcacgcttccaatctcataccactgatccagtggctcctcctgcagggtatcaaaaaattcgtccatatcaaagacaccggacggttccacgagaatccggtcatagccgcacatgcccatggagatcagctttgtcttgaaacgtcttctgtgcgcatctgaatcctggcagcagccgccagataccatctccagctcgcaatgctttccctcgagctcctgcagcagcatcatatccacattgatcgcgccgtaatcattttcgagtatgccgatgttgcagccctgccgtatcagataatcagcatacttcttgataaaagtcgtcttgccggatccgaggaagccggtaatgagatctatttttaccatttatgtcctttcctttctgagattatcatttgtgaccttcacctgttcccatcccatggcctgtgaagctcaggcttacatccgcagcttcttccggaactccgccaaggtatctttcttctgaaaaatgaacagtgcagcgagcaccagaatactgatcccggcgcagacaaccgacggatagacgatgtgtatcaatccgagccagacgagcagtgccggaatacatccagccacggatgcctgtacaagataaaacagatactcctcctgctccagccgattgacctttgcgatcacgagcatcgagctgagcactgcaagcgccccgaacggaaatataaaatccagtgaccagccacgccatcccgtcaggtaatcccagataatactgagcacggtaacgagcagcagctgccacatctcatttttcagaatatttctccgctttgtataagccaccgatacgattgtccatgcacaggcacagcccgctgcggcaaaccagaaccaattcagcccacccgtcatcatataatcaatcattccgcagataacagcggctgcaatacataaaaacgtaaatacctgataggcttttctgcccgccagcttctctgcttccgtactcaccggaaatccttcccggatctcccggcttttgatctcatgccccttcagtatccgctgaaagttacgcgggatacggtcatctgtcagcttcgaagtgaagccgagcaccattttatctccataagagcaggaacacagctgcagtacattcgtactcgtaaaaaatccaaaatgccggatataatccccgtactgctccggcaggcggatcctgccgatattcgagtagaccgctgtgatacaccggctgccgagatttgccccgagcatcagaaatccctttttaatctccagaggcaccgcccgcagcaacggattcttttccagacgcacataatcattcatacgcactgcaatccgctccttgaccagctcccgttcaaactgctccccgacatgccgcacgacctcctcaaaggtcgtcgcatcggtaaacacatgtcccgcctcaatccatccgaaaaagtttcccatcgactgtgacggaaaataatttctgaggtttaccggcaccataagggtgatcggcttattctgccggtcctttggcacttcctcgtgaattgcacagagcatcactgccgtgagcagcactgtgattgaaacaccgtaggctttcgcctgcgcatgcacctcttttaccgacagctccagctctgtgatgtgcatatcctcatgcaccagcttctccccgcgcagcttgaccgcatccggctttttttccctgccacgcggaagcttcgctgaataatactgtgaaaagctgtcctcctcctgatctcctggtgtgaccacttcctcctgctccacttttggcagatgttctgccggatgccgcaggatcagataattctgtaccagctccacaagaaaatgcatcgccccggtaccatcggtcagcccatgaaacacctcaaaattgatcctgttctgataatagctgacctcaaacagcaacgacttcttatccggaatatagagcctgctgcatggcggctttttttccggatgtacgacaggacggatctctctccgctccagataaaaccagaaaagtccctttcgcagcactgcctgaaaaagcggataacgcttcatcgtctcgtccaaagctgcctgcagcgttgcctcctccaccggttccttcagttcacagtaaaaacggaacacgcgagtgtcgtcttttccggtcacaagagggaaagcgagcgccgcattgtccagctttctccattttgaatatcctgaatccatttcttcgcttccttaatattaaaatttctctgtttcgtttcttcttattatattacagcacatctcctttttcatgtacatggcacgccttgtcaagcggatattcgcaatccatccctgcagctctgctgacagggtctagcttcgctactt

SEQ ID NO: 1544 - DNA, 7946 bp, Unknown
  16S sequences of unknown bacteria
gccaccgggtcatccggccgggcagcccgggcgggcagcagcggcgctgccgcctgccactcgacaatcagcaccggcgcgttcgtcatcgggtcgcgcagcgtgttgccggtatcccgcaggacgggaagcttcagatgcgccgtacctgtctcgatccgggcctgttcgatctcgccgccaccgtgcaccgcgcagcgccgcagcaccaggctcgtgatcagataccccagtgccgccaccagcagcagcgcctgccagcaaaccgggtaatagaccgcgccgtgcagcagcaccagcccccagtcaaataccgctgccaccagcagcaccagccccgccagagccaagctcaccagcgcaaacagcaccccctgccgcaggctgctccgctgcgcgccgaaggccaccaggatcatcccggccgccacagcaagtcccaccggccaatactgcagaaaggcccagaaaaacgacccggcggcaaagccgccccccagcgccgctgccaaaagcagccgcccccgccggatggccgcaccggacagcctggcgctgcacaccagcagcaaatagtcgatcactgcattgacggcaaaagccaggtctacatagacgcgcaatggcatccctcccgctctcggttgccatcagtatataaaaaaagacgtaaaaaaaaggacaaaatctgtcgaacagattccatccaatttttttaaaaaagcagagattgtttcgttgtcctatcccagcaggacaaacccgccaaaatattaccgctcctttgggcgctctgccgcaagcggcgtcgaaggattctcccgctccacctggcggatatttttctccgccttgctccggggcagcatgacctcatgcccgcagcccagacagcgcaggcggaagtccatccccgtgcgcagcaccttccagcgtttttcgccgcatggatgcgcctttttcatcagcagaacatcgttgacgcgaatatccatctcacttctccttcttgacctcgtcccagtatcgtttgcaggcctgttctaccttgttcggcccatagtgataatattgcctgccttggagggcgtcgggcagatactgctgcgccacgtagtgattcgggtgctgatgggggtactggtacgtcagcccccgccccattttcttggcgccggtatagtggctgtcctgcagatgcgcagggatctcgccgcccttgccgtggcgcaggtcccccagggcggcgtcaatggcgcagatggccgaattggacttcggcgcggtcgccaagaagatcaccgcctcgctcagcgggatccgggcctccggcagccccagctgtagggcggcatcgcagcacgccttgacgatggcgatggcctggggataggcaaggccgatgtcctcgctggctgtcaccagcatccgccgaatgggtgagagcaggtctcccccctccaaaagccgcgccagataatgcaccgccgcgtccgggtccgagccgcggatcgacttctggaacgcggagaggatatcataatggctgtcgccgtcccgatcgtagcgcatggcagagcgctgggtcacagcggcagcatcctgcagcatcaccgtcaaggtatctgccgcggggtccgccgccgcgaataggacctccaccgcattgagcgccttgcgcaggtcgccgccgcaagccagggcgatatgctccaccgcctccggctcacacgtgacggcaaggccgctcttttccgccatatagtcgatggcccgccggactgcctgctgcgccgcctccggcccgatgggtttaaactcaaagaccgtcgaccggctcaagatcgcattgaagacataaaaatacgggttctccgtcgtcgaagcgatgagggtgatctttccgctctcgatatgctccaagagcgtctgctgctgctttttgttaaaggattggatctcgtccagatacagcagcaccccgtccggcgccagaaacgtatccaattgggcgacaatctccttgatatccgctgtggatgccgttgtcgcgttgagcttatagagcttgcgcttcgtgcgctcggcgatgatattggccaccgtcgtcttccccgtcccggaggggccgtagaagatcagattcggcacatggccggattcaatcagccgccgcagcagcttgcccggccccaggatctcctcctgcccgtatacctcgtcgagtgttttcggccgcagctcgtcggccaagggctgatacatccgtgccacctcctcggggcgattttgtacatttgccccgcacctatggcgtattataccacacgcgccccgtaaatggaacgggggaattgttttttcgccgtatctggcgtataatgaaaaaaacggtaaaaaggaggacgcgatatggacaagccgcgggtcttgatcagtctctgcctgctgggcgcgcagtgccggtatgacggccagtgcaagccgccgctggcggagctggcgcttttgcaggcgcggtttgatctgatccccatctgcccggagcagctgggcggcctggcaacgccgcgccccccggctgagcgccgcggcagccgcgtcgtaacggcaagcggcctggacgttacggatgcctatgtcctgggcgcccagcaggtcctgcagctggcccggcagttttcctgccgcgccgccattttgaaggcgaaaagcccggcctgcggcagcggccagatttatgacggcagcttctcccggcatctcgtccccggctggggcgtagccgcccagctgctgcgggaaagtggcctgcttgtctgcgatgagacgcagattggctggcttttggcgcaatttcccgatgcttaagaaatcttaaatacttcgctacttttctcttaaaccgtttttctgttacactaacagcagagaaacggttctcattttccggaggtgtgcaccatgtataatatcctgatctgtgatgacgacgccgatatccgcgccgcgctgcggctgtatctggcgccggagggctatggcatctttgaagcagccgacggcgcggaggcgctggcgcttctggcccgggagaccatccacctagtcctgatggacctgatgatgccgcagcttgacggcgtctccgccaccgcccagctgcggcagcgcagcaatgtccccgtcatcatgctcactgccaaaagtgaggatgccgacaaggtccttggcctgaacgtcggcgcggacgactatatcacaaagcccttcagccccctggaggtccaggcccgggtccgctcccacctgcggcgctataccgccctgggcggcatgacctctcagcccggcaagctgatcaacggcggcatctgcctggacaacgaatcccgggagctcaccgtggacggagagccggtcctgctgacgcccattgaatacagcatcctgctgtttttgatgcgcgcgccgggcaaggtgttttcctctgctgaaatttaccgggccgtctggaaagaagagcctctgggctcggacggcgctgtcgccgtccacatccggcatctgcgggaaaagatcgagatcaacccctctgagccccggtatctcaaggtgatctgggggcaaggctacaaaatggaggtacaaaaatgaccgcatatttaaccagcgcatgtcttggccaaacggccggaaaggagctgcagccatgaaacaactgcgtgaaaaaacctgggccaaatgcggtgcaacggcgaccttgctgctctcctgcctgctgctgctcgcaagctgcatcgggattctgtttctaagcgcttttcaaggctacgatgatgcgaccggcgaaattgcgcaagaaaacgcgctttccgatgcgctggagacagggaaaaatgacgcccacagctactataccgccgtcctgcaagacgaaaccgcagcaattgattactataaaaagcgcctggccaaggaaaactccaatttcttcttcaccctgacggacaccgacggcaatgtcaagctggaaaactaccaatatcacgacgccctgcagaccattgacgccgatctgcactttgaagtagaggcagaccataccgtaacctatcgccagcggctgtttgatcccactgtcgatgcgcagcagtccgacggcagctatggttactatgacaatggcagcctacgctatatctactggaaaaacggcgatctctatgacgccaccagtcattacagcggccactgggaatacgacggggagacaacgaccatcaccatctatcaagccactaaggccacgctgcacctgaccggcggcatcgctgccgacctgcacgcccaagataacacggccctattcctgaagctgctgcggatgctactgcccctacgttactggctctttgtttttgctgcactggggctgctgatcgccctgttttgccttggcttcctgctttacagcaccgggcataaggcaggcgtcccggagatctatcttgccccgtggcacaggatcccgctggatcttgtccttgtggctgccttcttccttgcggttggcctggtcgagctgctctactatcccccctggtatggcagcaacagcgttgtcagcattctcgccatcgtcggtattgcgatcgttgctttcttcgcggccctctatctgctgctgaccgtcgtcgtccggtgcaaggcaggcaaatggtggcgcaatacaatctgctaccgcctgctgcgcctggtctggcgcggtatccagcatctggcgcagctcctgccgctcatctggaagacggccctcggctgccttgtggttttgctcattgaattctgcttcttcgtcctcggcggcagtacatcctttgtgttctgggcactggagcggcttgccctggtggcctttgtcttcctcatcgcgctgcagctgcggaagctgcacaagcaggggcagtcgctggccgccggcgatctgcacgcccggatggaccccaccggcatgctgccggagctgcgccgccacgccgaggatctaaaccgcatcggtgatggcatgaacgccgccgtagaagcgcggatgcgctcggagcggctgaagacggagctcatcaccaatgtctcccatgacctgaaaaccccgctgacctccatctgcaactatgtcgatctcatgagtcagctggagacgctcgccccccaggaagcacgggaatatctgggcgttctgcagcgccaatccgcccgactgaaaaagctgacggaagacttgatcgaagcctcgaaggcctcctccggcgtcatccctgtccatctggcgccgacgaatcttgtcgagctgctgcggcaggccaccggcgaatacgaccaacggctggcccagggcaatctgaagctgtgcgccacgctgccggagcaatgcagcatcctggccgacggccgcctgctctggcgggtcctggataatctgctgagcaactgctgcaaatacgccatgcccggcacccgcgtctacctgaccgtgacggcgggagagtcgaaagctgccctgatcctgaaaaacgtctcccgggagatgctgaccgtcgatcctgcccagctgacggagcgctttgtccgggcggatgcgtcccggagcagcgagggcagcggcctgggccttgccatcgcccagagcctgacccagctgcagcatgggaccttcacccttggggtggatggtgacctcttcaaggtcacgctggccttccccctagccgcgcctgattccgatacagaaactgcctagcggtatagcaaaacacaaaaatcgcctgcccagcaaataaacgccgggcaggcgatctgttgttttcctcacattttattctcttcacagcagctgcgccagggcatcgaggtcggcctgggtcgtcgaccagctggtagtaaagcgtacaacggtgtgattggcatcatacgtctcccaaaagctgaacgcgacctgctcgcgcagctgctgcattttctcatttggcaggaccacaaactgctggtttgtcgacgtatccagaagcagctgataccccttctcccgcagcagcgtacaaagctgctgcgccatgacaatggcgtggcggctgatctgcagataaaggtcctccgtcagcagcgtgtcaaactggacgcccagcagccgcccctttgccagcaggccgccgtgctgcttcacccgagtcaaaaaatgcgccggggcattcccccgcgggaagacgaccgcctcgccacagagcgcgccgaccttcgtaccgccgatcgtaaacgcgtcgcacaggcgcgccaggtcctgccaggtcacgtcgttttccgggctggccaggccgtagcccaggcgcgcgccgtccagataaagcgtcaggccgtatttgcggcagaccgccgcaatggtctccagctccgctttggtatacagtgtcccgtattccgtcgggaaggtcaggtacaccacaccgggaaataccatatgctcgtggttcccgtcggcgtaaaacgtcgcgcaataggccgcgatgtccgctgccgccagcttgcctgcctgctccggcagggtcaagaccttgtggccggtgtattcgatcgcccccgcctcatggacgctcacatgccccgtctttgccgccagcacgccttgaaacggctggagcattgcattgagaacgatctgattgacctgggtcccgccggtcaaaaaatagacatccgccgccgggctgccgcacagcgcccggatcttttgcgccgcacgctcacaataggggtccgccccatagccgggcaggcactccagattcgtctccgccaagcggcggagcaccgccgggtgcgcccccgcgatataatcactttcaaacgataccattttccttccccctccacagccgtgcgccggattgcgcgctatctggcgctatttcactctatgccgcacgtctgctgcggttcacaggcccagcagccgctgggcattgccgcccaagatttcatccttctccgcccgggtcagcggcagcgcctcgatctgggcgacactggcggcctggtctgtccacgggctgtcggtgccgaataaaacccgctcgctgccaaaccgccgcaccatgttgcaaaataccgccgcgtccagcagctgcagctcctggggcgtataagcatcgggtgtcaggggtgtgatacagcccaggctgaaggccgtatccagatacacgccggtatcagacagcagctccatcacctcgtcccaatttttccagccgcccatatgggccaggacaagtgggacccgccccacctggcggcaggcccgggcgatcatcgctggactgcagcggacgacgccggggaagccgatatcatcccccgcatgggtgacgatgatgagccccagctctccggcccgctccaaaatgcgcagatagcgcacatcgtcaaaatccacgccctggtagacagggtggagcttgatgccccgcaggcctgctgcggcgatccggtccagctcctgccgccaatccggctggtccggatggatgcagccaaagtaaaggagcccgtcgtgccccgtcaggcgcagagagagatcgttcatggactgcaccttcgccggattcgtcgccaccggcagcacaacggcgcggtccagcccagctttttgcagagaggccgtcagcgccggtccggtgccatccaggaaagcagcagcatggctggacgcctgcatttttttgattgccggggccgcgatgcgggccgggaaggtatgggtatggaagtcgattcgcatggttttgctccaatcttttgggtcttttcgtgggtcattccttgtattcggtcgctgccgctgccttctccgggcggctcagcagtgccagggcaacgatcgtcaggactgtccc

SEQ ID NO: 1545 - DNA, 1958 bp, Unknown
  16S sequences of unknown bacteria
ttctggtcgaagagcgcggtcgacccgggcctctcggcgtagtagccgacgagccccatcctctctgcgagctcggagcgcctgaggtcgtcgacggtggctgacttgtcggccccttcgcgcgtggcgacgtactcgacgttgttggtgatgacggcggaacgcccacgcgacccggggaggtgcacgcgggcgttcacgacgaggctgctacgacttgccattggacagacgctcccttgcctccgagagcgtcatgccgcgctgcatgaggccggcctgcttgtcgtaagcggcgtagatgtccgaggcgctcacgccatccaggccctcgaacgtgcccttctcgatctcaaccgccgcgattgccgcgacgatcgaggcgcgggtcgcgcggtggacgactcgggcgatacggtcctcctgctcggcgttgcgctcaccgagcgtgcggtcgagctgctcgagcagcggctgcataacgccgcgcagataggttccgagctcggtggagtagagcgtcaggccgtcggaggcgagcccagcggcgatgagctcgcgggcggctgcgctgtcgctgagatccttggaaaccccgtaggcatggaggcggcgataggtcttgtcggggaggcgaaggctcatgactttcgacttgtctttgccggtggtcatcttagatcccttcgttcgggaggggtgcgccgacagcacggagggcgacgatgttctcgggcgtgcgctcgtaggtcttgggccagaaggtgatgggtaccatgacgagatcgtcgcgggggattccgtaggcgaagagataggccgcgatggcatcgctgtactctgcgtcgtcgacgttgaaggtgtcggtgaagaagatgccggtggggtcgtcgttgcagcccttgacgaaatagacgccgttcccgccttctttgaacgggttcaagaccttgcactccggcttcgcgtagtaggcgattccggcgcgaacgacgcgcgtgaaacccggacgctcgttgacccgcgctgctcgcgtgaagttcaggtcgggatcggattccagcagatgggagagcacggagccgacggcgtcgcccttgtgctccgggattgtcccgaggaggtcggcgaggcgcgatttcattttctcgatcagtttcatcgtgtgtttcctttctgccggtgccgcacgggtgccggcaactcgcttgaatgtcttggttagcgatggttctagctgcggagagactgcgtggtgccgaaggtgccgaggagcgaccaagagttttggaatccatggcaccttcggcaccgtctgccgagtcttgcaggggaagggcggtggacagggtgccgctgcgacatgctgcggcacccaatcggccctaatccgtttcccggaacacccaacagcgctgcttgccgtatggagggcagaggcgcttgttgcccggaatccatccggggcactgcgacgagaggatgcggctgaccatcttgcagttggccttggtcttctcaaggtggagggccttgtcgaggatctcgaacgtgcacatgggacggtcggtgttgccgggaagatatgcgaggaccttctgcacacaggggtcctcctcgacaaaacgtccgcgctgtgcggccgcctcggcctccatctcgggcgtgaggacggtcgagaaacgggggtcgcccgtcttcatccacgtgcgggcttccgcccatgcttgacggacggcaatggggaaatcctggtcaaagacggacgcctccgtgcgctcgatgccgcagagcaccgggaggaagcgcctcgcgccgctcgtccgctcgcggatgaagtcggcctcgttcgtggtgccgacgaagactacgcgccgggggaaagcctccgtccgtcgacagtaggctccccggaactcatctacctgacgtgtgatcccggccttcacgctctcgac

SEQ ID NO: 1546 - DNA, 13874 bp, Unknown
  16S sequences of unknown bacteria
atcgatatccttccatcgcgcaggctggattacctgaaagactatttcttcaagatcccgctggaagaacggcgcaaggtcgagatgtgctgcttcgatacgtatgacccttatcgcaccatctgtcagaaagcatttcctgacgcgatcatggtcgttgaccatttccatgtgatccaggaactgaatcgtcatttgacgcagatccgtatcgccgcaatgaaacgcgtacacagacaaagagagatcgcgaaaaaggaaatcactcatgatcaggaagcacataaagatttcagacgatacgaccgtcaatactacgtgctgaaaaagttcaactggctcttgttcaagaaagaagatgacccaaaatatttctctgaagcagcagaagcaaaatataacgtgaagttccaaaaggaaatggattacaaagatctgctggacgagatattaaaaagtgatgaagagctcaaggaggcctatcagctcaaaaatgaagtcacctatttttatgaacatgcaacggtgggaacagctttagaaaaactgaacacgctgattcaatggtttttaaatgcgagatctcagaattttcgaatatttgccaagacattgatgaaatggaaaaaagaaatcatcaattccttcatcgttttgaaacaagaatattacatagatgcagatacaggtgaagagaagctgcaggagaaaaagatgaccaacgcgatcatagaaaacaaaaatgcgatcatcaaatgtgtcaagaagaatgccaatggatataccaattgggagcgattccgaaatcggatcatgtatgtcctggatcccaaagccacttactctctttatccgatacaaaatgaaaacaaggttgccaagccttgttcatgaagcttcaaagcaatgtggggcgtcaaccaccccacattgcttgaaactcaaaattttatgaccccatgttattttggagcgccaaaaaatatccaccgacatggtcggtggtcagacggtgttcaggatcgcttgttgttaaagaaagaagcgtctgcccctttctcgctttgcttgatcgctcctgccatgacgcgcattttatcacagcgtcggcggtgccgctgatgttttcggtccaagaatgcccgacttcagcagttctgaaatgatcagggatgagcgttgccgatcatattgctgtcgatatcgcccgttatatcttcgatcggtatgatatctccgttttcatcataaaatgtcatcggctccatcgtttgatattcgccaggcaaatgataaaccttgatcagataaggttcattccccagcaagttttctgcttttaacagcatgctgtctgtttcagaagccctcatttctaatgtatactcatcggcttcaatcattgtattgtctatcacgacagtgacatagacgccagcatcatttgtctcacaacgttgaatatacggcttttgggtgatatatccgccgtcatatcgataggcatctccttctttccgaaattctaccagttcatattgatcatcatatgtcatcagccgcagttgtcggtcctctatttctaccatggccagctgttgagcatcttgaccaaattccttgatcacttcatccggatcgaccttgtctgaattggtgcagccagagacgaaaaagacgaaaatcaaggataccgcatagaagaatcttttgcacgaaacgatgtttttcatcaaatcacctccaaataagcaagtccatcacatcattcgatcttcagctcttagcgatcgacatacgatggtcaacctcgctgtcatgcctgaaatgctcgttgatgatcgaacatcggttcctgcctgccgccttttgcatcaggtccatacccagcctgaatgctcatcgatcgtgatcctgatcgactatccgatcatctccatatctcttcatctatacaatactcatttacgatcatacattgtcaataaaaatatagaaatatggcaaaactggatgatatcccgcactgatcagcctgccgtcgccggctatgcgtatccaccgatcgcagccatgcgccgccaacgcacatcacactgaatatctgaaacaagagcaaacgaaaaaaaggctgtcacctcagtcacagcctggcgcgtctatggatgcgcttttcatgcttgctcgatttccggcttttccggttcgatccgtttttcttccagcacttcgaacatcagtgcggcgtcgctcttggacacctgcttcggtgtctgcagcacccgtacacacagttcgcggtaaccgaagatcacgcggatctcatcgcccggattgacgtccgtgctcggtttggccacgcgtccattgacatagacgcggtgctgatcggccagttccttagatacggtgcgccgtttcaggatccgggccgtcttcagatatttatccagtctcatgtttcccctgctttctctcttagtgttcctgctggcggctcaacaatgccgcaaaggcttcagccgtgcggatctcctcactcaccagcggcttcgtcccttcgacgatgacaaacgccccgtaccagtcgccaaataccgtgaccggaaaaatggcgcccttctcgcgcatatcgctgcccgcatagatcttttcatcactaaaacgaacggtacggtgcacaccagcgtggcggatgaatgactcgctgacctttacctggtgtttatgcagccattccgcatgcaaaaagagaacggtatggccataagtctttttcagtatatcacacatcagttcgatttcttccatataacgggaaaagacattgtgtttctcaatgatgatccggtcatcctccgtaaagaactcaatggaatctccttcccgcagctggtattgacgccgcatttccttgggaatgaccagtctccccagatcatccagtcttctgacaattccggttgctttcataggctccctccatccgcgctgatgaagccgtgttcatcagtcctgcaggaatagtatgggcatttcccgaaaatctataccgatcagatatactggcggtctagatgatgcgtcgtctgtccatcagtattccgcgtgaaactgtgcgctttccatcagtgcttcgatggagatctccagctgtcttctgctcttcgggatgatcaggctgacttttccttctgcatagcccagacggatgagcctggagatctgattcatccgctcaaagagcttgacgccgtccacatgatcgctccactctttcgtaaagatgatgcgcagttcacgcggtgtctccttgaagtcctccacatatggctgagcggccaacagatccagctgcttcttctcaaataacagccgtacttcattaggaagcttgccaaacaagtctctgacttcatccatcagccggtgcagctcttccaccgtgcggatcttctcgatctgctgatagagagagagcttatcgccgtcctctggggcaaattgatcagggatataggcgtccacctgcacgttggtgctgcgcaccggtgcctcttctttttcttcttgcttgaggccgcgatgtcgggcgatggcatcatgcagcatctccatatacatatcgatgcccacgctgtcgatgaatcctgcttgctgcgggccgagcaggtccccggcgccgcggatggtcagatcacgcatggcgatcttatagccgctgcccagctgcgtgaactcacggatcgatttgagccgcttcatcgccgtctcattgagctgcttctgcggccgatacatcaggtacgcataagcgacacggctgcttctgccgaccctgccgcgaatctgatacagctgcgacagaccgaagcggtctgcgtcctcgatcaggatcgtgttggcattggggatatcgatgccggtctcgatgatcgtcgtgcagacgagcacctgatatttgttggcattgaattccatcatgacgtcttcgatatcttcacggtccatctgtccgtgtgccacgccgatgccgatgtccggaaatgccttgcgcagctccttggcgacctggtagatgtcctcgatccggttgtacagataaaacacttgcccattgcgggccagctcacgctggatgatctcccggatcatgttaaagttacgctcgatgacatacgtctgcaccggatgacggttgcttggcggcgagttgagctgagagagcgaacggatgcccaccagcgacatctgcagcgtgcgcgggatcggtgtcgcgctcagcgaaagcacatcgatgccggtcttcaattccttgatgcgctccttatgttccacgccgaaacgctgctcctcatcgatgaccagaaagcccagatctttccacttcatgtctttcgaaagcagccggtgcgtgccgatgatgatgtcgacctttccctctgccatatcctggatgatctgattttgttccttgcgcgggacaaagcggttgaccactttgatattgaccggatagtcacgaaaacgatcgataaaggtcttgtagtgctgcatagagaggatagtggtcggacaaaggaaggcgacctgcttgttgtccatgactgctttgaacgcagcgcgcaccgccacctcggtctttccgaatccgacatcgccgcacagcagcctgtccatcgggcgcggactttccatatcgtgcttgatctcttctacggcatgctgctgatcttcggtcagctcgtattcgaactgatcttcaaactcacgctgcatcggcgtatctggagagaacgcaaagccgatgtcttcgctgcgcagcgcatacagttccaccagcctgccggccagctcctcgaccttttcgctgaccttgcggcgcgtcttttcccactcgctgctgcccagcttattgaggcggacaccgacaccttccttcgagacgaagcgccggatcagatgaaactgtgaaagcgggacgagcagttcatcattgccgcgatagacgatgcgcagatagtcctgatgtctgccatcctccttgcgcgtgatgatgcccatataccggccgacgccatgctggtgatgcacgacataatcgccgacattgagctccatgtaatcctgcaggacggtcgcttccttgaacttgctgtgataacggacgaacttcttctcctgggggaacagttcccgccgggtgtagacgatgatatgctcaagcaggcactggaacccttccgcaaatggcagatcgcagacatagatgcccggtcgcgaccagtcagccgtatccttcacatacgcgatctcctcattgttcagcgcttcgatgacagtgcgggcatcgtttttctccacgcataagaccacggcattctctctggcttctgccgtgatcgcgtcgatcttctgctggaaaggcagctcactgctcaccagcgtggtgatctgtgagctgatcggatgcttgatgttcatgaacatgcctacggagatgaccggatggtgcatcaggcattcacgctcttcgcgaaacagcgtgaacttcggcagcatccgcccttcctcgcacatttcctggatatagatgatggtctcttcctggatgcgtttgactgcgtccttgacctcttcttcactggagaggatgatcggcgcatcgctgcaataatcagaaatgctgtgatggtccttcagccatgccagataaggataaagacgcgcttctcccaggtgtgcacgcagcgcacccatgtcctgttccagcgtttcccgcagcgtatcccgcgtcagctcatcgagcttcttctcctgtctgctcaatgtgctgcgaagctgtttttccacttcatccagctgcgcgtcggtcagcaggatgtcgctggccggaatgatgcgcacctggctgatctggcggatggtccgctgtgtagcgacatcgaacagacggatgctgtcgatgatgttgtcaaagaattcgatgcgcacaggatattcgctgttcatggaatacacatcgatgatgccgccgcgcgccgcatagcacagcggctgatcgacacggctcaccctggtgtatccggattcctgtaaacggcgcttcatcccttcataatcgacttcatcatcgatatgaatgtcaaagcaatgagcgcagaacgcttccggggaaggcagatagcggatgaaggcggccgcgttcatgatcagcaccaccggttccccctcggtcagcctggccatgacctcgatctgcgatgccttcagctccggagaagctgcgatggcttctacacgcagcgattcctccatgacaaaaagcagcgctttgtcctgcaagagcggttcaagccgctcctgcaggcgctgtgccgtatacgtattatttttcacgacgatcatggtctgcggatcctgatcgaatgccgccgccagcaataacgcttcctctgttgccgaaagattgcccagcccgctttctctgtgcagcaatgtctgcaccgcagggttggcggataaccgcttcagcagcgcattcattctttcacctgctttttgttgaactgattcatcgtttccgtaaattcatgtgtaacggagaagacagcggccttggcggcctcgttcaccgattccagataagcgtccatatcttccttgcggatcttgcccagcacccagttcacggtcggaatgcgtgggtctttgtcgatgcccacgcggatgcggtcaaacgtctgcgtgccgatatgcgcgatgatgctcttgatgccgttgtggccgccggcgcttcccttctgtctcagcctcagcctgcctacggccagatccatatcatcatagatcaccagcagatcctgcggctgcagatggtaaaaatccatggccgcgcgcaccgcctcaccgctgttgttcatatacgtctgcggcttcatcagcagcacgctctgtccgccgatgttcaccttatccaccagcgccttgaacttcttctgcgtgatgctcgccgatgccatgcgcgcgatctcatccatcacatcaaagcctgcgttatgccttgttcgttcatattcttttcccggattaccaagtccgacgatcagtttcatacacatccctcgcttttgccttcatttttgccttcattattataatgagaatcgcataaaatgcaaagcgaaaagaagcagcgctgaatcagattttcaccgatcatcccgatcgatgagaaaacagcgcgtttgccaagaccatcatgaccgatcttctgcttgttgaagatgatggacaaaacagcagatgccttcaccgcacgctcagctcatcctgaagttctcccccttgcacacagtacgtcaggaaagcagatcatgacatcttttcccctggtcatcttctttcaccagaacctgatcgataaaaatcacaaaacctgttgactttatgaaggatggctggtaaaccgcttaaatgtctgatatcatactgtacgatatcggatattggtggtgagaaaagtgactcagtcagatgatctgcacacactgcgccatttcccagggaatcccgttttccatcacctgggaaaacatgggcgcagagctcactcagctcagcgtgcagtattttctgacctggatcttctattatctgcagtctttcctgatggccagcgtagcggagaatctcacgctttccctgcgtaagcaagtcgcggaaaagctcaatcgtcttccgcttcgtttctttgaccagaacaaggccggagagaacctcagccgagtcaccagcgacttggacaaagtcaccgaggtcctgcagaccggtctgctgaaaatgatcgtcgccatcggcaccgtcatcggttctctggtggtcatgttcttgtacagcattcagctgaccggcatctttctgctcttcatggtcgtcagcatgctgatcacgcggatcgtcgcccgcaagaacctgaaaagcgcggcagagcgtcaggagaccatcggtgagctgaccggcatcgtggaagagttctacaatggccgcgacgtcatcaaggcctataaccatgagcatgcttccatcgccagagtgaaagaggcttcggccaagaatgccgctgcttcacagaaggcagacttcctgaccaacttcgtcaacccgctgatccgtctgctgaccaggcttgcgcatgtggtgatcgccatcatcgccggatatgagatgatcaacggcaggatgagcgtcggtgtcgtccaggcgttcttccagtatatcaatcaggcggccgagccgctgacagaagcatcgttcatgatcaactctctgcaggccgcactggccagcgctgagcgtaccttcgagatgctggatgaagaagaggaacgtccggatacgccttacccggtcatcctcagagagccgaagggccagatcagcttccagcatgtcagcttcggctatcagccgggccgtctgttgatgaaggacatcagcttcacggcccagcccgggcagaagatcgccatcgtcggcagcacaggcgcaggcaagacgaccctggtcaacctgctcatgcgattctatgaggtcaacggcggcgtgatctccatcgacggcgtatcgacgagcgacatgaccagaaaagggctgcgcagcaacttcggcatggtgctgcaggatacctggctgttcgaaggcaccgtagcggaaaacatcgcttatggaaaggcagacgcttcccgtgaagagatcatcgatgcggccaaggcagccaaggtcgattacttcatccgaacgatgtcccatggctatgacaccatgctggacaatgaggcttccgccctgtctgccggacagcgccagctgctgacagcgatgccgacaccatcctgttcatggaccatggaaacatcatcgaacaaggcagtcacgaaaaactgctgaaaaagaacggtgcctatgccgccttgtactacagccagttcgaataagcaaacgatccgaaccacaacggtccggatcattttgtttattctgcctttcgcctgctgatcatctgttcatactcccgcagcgaggccaatgccttcggcgcaagcgggatgagcgcgatcatgttgaatatggtcatgaggcctacgccgacatcgcccagatcccacacgaactgataggcggcgagaccgccgacaaacagcatgatgagcgcaaggatcttatagatcgtctgcgccgcccagctgtcgccgaataagtaggccacgttggagcgggcataaaacaagatgcccaagaaagtagagaagctgaacagccacaggatgacggcgatgaagatcacgccgaattcgccgagatggtaacgcatcgctgtctgcagcagatccatgccttccaggcctgcgcccatgctctgcggcatcagcagcatgatcatcgcggagcaggtgcagatcacgatggtgtcgatgaatacgcccagcgcctgaaggagcccttccttggccggatggctgatatccgccgcggccgcagcgcatggcgctgaaccagatcctgcctcattggaaaacagtcctcgtttggcgccgttcatgatcaccgcgccgagcccgccggccaccgcctgccgcaagccgaacgcttccgcaaatatccgctcgaacaccgccggcaatgccggggcattgtggatgatgatgaacacggtgatgaaaaaataacatgcggccatgatcggcacgatgatgtcgagcaccttcacggtcgtgttctttctcagcacgatcacggcagcgaccgccaccagcgcgatggtcgaatacagcggcgggatatggaacgcattctcaaacgatgaagagatcgaattggccgtcacttggctgatgccgaaccagcagatcagtccggacaacgcgaacagcgacgcgatcacagaccgctttctcctgctgcctttgcggatgaacagatgatgcaggtaataagccggaccgccgcggtatccgccatacagcggatccttttctttatacagctgcgccagcgtcgcttcgatgaacgccgtggatgagccgagcagggcgatcacccacatccagaacacagctccggcgccgcctgccgatatggccgccaccacgccgaccagattgcccatgcctacgcggcatgcggtagagatgatcagcgcctgtacgccggaaatgccctctcgatctcccttctggttgttttccagcgttacccggatcatctccgggaacatgcggaagggcaggaaccgcgtccgtatggtaaagtagatgcctgccgggacaaggatgagcaccagcagagaaagcccgagcgtgcttccgcccggaagggggatatggatgatgtctccccataacagatcatagatcgcttcaaatatcgccatatcagattcctctcatttccatcgtgcatgatcagacctcgtctgagcctatgctgcctgattatatcatcactttagcaatgtgaacagtaaaattgttcttttcgcgatctctcagcaaatgacacgtttatgtcttaaaatatccactacataaaatatgcctgaacagatggcttatcccgatctgttcaggcatatgatcatgcgctcatcttacgatcccaggcaatgacagcctgggcatcctcatgtttcccaccgtcttcgagcaattcggccagcataccgatccagtctctgcagtaataatgaatagcatggcgttcatcaaattctgcataagtctgaaccccttcttgttctcctaattcgcgcgctttttggaaagccagccatagatacttcatggtacggatcgcttcttttcggatgtcgcgatcccagatgagcatggggcgatcgatcatgcccagataaagaagctgatcaagttcgatgctttgcagatcatggtagtcacgcagataaaggcggccggaaatgcgctcctggccaagataaggataatccgccaatgcttttcctcgttccgctgcgctttcgatcgcatccaatgcggattttggtttctttaagcagcaattcttgtatttcttgccgctgccgcaaggacacggatcgtttctgccgatcttggttttggacgatgtctcctcctgcagcagcatcttcagcatctgatcaagatggcgttctgcgtcggcggaatcttcgtccttgaacatcgcccagtttcgcaggatctgtgccgcatcgatcggactttgacaatatggtcgatgttccttgccgtagttgaacatcagatcaacatgcgcgtcatatccgccgacaaaatgttcatcgatcagatcatgatcaaacagatatcggatttccccaagcatgtcgatgaaatgacattcacagatcatttcggccatcttatccagcacatgttcatattccctggcctgatggatgacctgtctgatgatcgctttccattctgtttccggcagacggccatccaagtacagctgtccaagcacactggctatgccggtccggacaaattcatctacctctgtatccatgatccgctgtttcaacagctcgatatttccatcgaacgtattgtacatgatatctggcaatgcttcagtgacggcatccccgatcaacacatccagcgtttccaaaggcaggctagccagatcgaggatacgtgaaaaggatgctttatcctgaaattgtccaagcaggaagagggcgtaaaaatgaagctgttcatctggatccagcgcatctggttcacgcacggcacgatcgaccgctgcccttaaataaggcaatgcggcctcctgatcggctgtgatgaccttaaaggcctgttcaggaaaagcaagcgttcggttcttcaatatgtccaaagccagctgcagctcatccatttcctgctcgcgggcattctcctgctggatccgctccttgatctgcctgctcagatcttcagcgatcgtttctgccgttctgccatccatctcatatctccaaggaatattgcggcatactttatccatcgccaggatatcttgtcggatatcctcaaggcaatatgctttatgcttgtttttatattcatcatctgcatatgccacatcatgttcatctgaaaataccaaacggtcaaagatatgttccggtgtatcacgaagatagatcgcgatcacttgtctttcacatacagcgcgatgaatgtattcttcatagaagataggactgacagcaatgaccgaacatcccctgacatttctgatcagctgctccagcagcatgctcttgtgatacgctcgctcacgatgatcattgtattcctcggtgaacatttccaatgtcatcccataagaggccttgacctcttcatccagatcataaaatctcgcgttcagctgattggcaagtagccttcctgtcgttgtcttccctacattagatatgccaaacaacaggaccgcagtgtttcttgcttttttcatcttgtcatacagtctccttttttttctcattattctacaatatccgcatattggcaatctcttcggcaaaaaaggagcacactttttatgtactcccttaatcagctgttgctctccacttgatgacattgtgctttgcgcatgatcctttatccgccaaacgccagactggcgatgatccagggaaccatgacatataatgcgatgcctacttctttccaggatatctcccgtttgcggtcccggtgcttctccagctgtttctccaggccctcatcatccttccggtcgaactttcccacgaaaaatccgcctggcatcagatagaagaccacgccgaacatgaccagcgcggtgatgagattgatcgcggtatgaaagaaagaaaagtcctttaacaaaaacgcgcccagcagaacgatggccgtatatactgccagaatcttgattgtcttacccattgtacacctctgtcaaaatttctgtcctcatcttatgcttaatcgtggggattgtcaatctgcaattctgaattctgcctgcgtttatgtcaaaagacccttcacggctttttttcttcaatacggcagtgaaggagacctcaacggcttgtgatgacatgctttcctcctttcaagacggcctgtaagccatccttgctctttgcaccatgattatcgcctttttctgttcacgttatgttaatgatctgtcaaagaatccaaaaacttccatgcctgtccaaatggcgccacgataaatgacaccatttcattttgcctgatagttctttacaaataaatatccggagattttatcaaagaattaatgaatgatacgacgatacaaaagatagaagatctactttaaaatgcaaggaaacatgttgcaatcgaaataaaggatacactcttgagaacttatacggacataggaagaatagttgttgaagatgttaagtctcatagcaacgattccgattaccaaacgaaatctcttagatttctttcaaaagaattaacaaagaaatttggaagaggtttttcaagatcacatttgaataatatgatcaatttttacctcaaatatggaagtgtccatacgctgtctggataactcagttggtctcatttttgtgaacctttatctatctccgatgatgataaaagacacttttatgaaattgaatgctcgaaggctaaatggagcgctagagaattaaaatggcagatggtgtcttctttatttggttgtatgcaaatgcctgagcttcatcaataagctcgtgatcatttcctgtccatttatttttcggtacagctcttgtatccggaacagtgctgcatagcgattgatatatt

SEQ ID NO: 1547 - DNA, 8220 bp, Unknown
  16S sequences of unknown bacteria
ttggggcgcggtcgcgggggtcgcgctttggggcgcggtcgcggggggcgcgctttggggcgggacgaggtcggccatgcgctcgtccagccacagggcggcccagccggcggcggggcccaggcacagcgccgtgcccagcgacaaaagcagcccctcgatgccggtctgccccgcggtgtccagccggtagcccagcgccaacgccagcacgaacagcgcgccgaacgtaccgaagcacgcctttgcgcggcggtcctgcacgcgcaggaagcgcatgcccgccaccgacgcggttgcccacaggagcacccacgcgaagcgcacgcctcccgtggcggggaaacccagcagcgcgcaggccatgaggcagcccagcgcgctcatcagacaggcagcaacgacggttccccggtcggtgcggaacatcaaaaaacgcctcctttgtacaggaaacgggctgtgcccggcgcgcacagcggcggaaggtaggcccggtatcggagaaaaacagtggagagcccgcggctgcgagcgcgcagggacgcggcgcttccccgtgcaggggccggaggggcgggagggggtgcggggcacgcggcgcttccccgtgcaggggccggaggggcgggagggggtgcggggcacgcggcgcttccccgtgcaggggccggaggagcgggaaggggtacggggcacgcggcgcttccttgcggcgcgcggggcgcggagcgcacttcattatgatagggcctgcgcggtcagcaccccgcccatgccgccgcctccagaagcgtgtccatgacgggcacgccggcggtcagaagcgtttcgcggctctggtggccgcgggcgaccagcacgcatcccgtgcccatggcgcgggccacctccgcgtcgtggagggtatcgccgatcatgagggtggacgcggcgggcacgccgcagcgggccaggtagtccaggcccacggcctccttgctgcgcgcgtagatatcggaaaggcccagcacgtcggtgaaataggcgcggatgggaaagcgcgcgatctggctttccagcatgtcgcggcgcgtggccgagagcaccgcctgccgcaagcccgccgccgcgaagcgcgcgagcgcctccaccgcgtccccatgcagggggacggtgtcaaagccgcgcacgtattcggccatccaggcgtgggccacggccacgaacgtctcgtccgtgaccccggcgcgctcgtagtagcggcgcacggggaaggtgaactggcggtggtactcggccacgctcccgatgcggggcaggccgaaggccggaaaggtgcggttgcgcacgccgatggcgtaggtgaggtcgtcgagcagggtgccgttccagtcccagaggacctgccggatggggctgaccgggggcgggggtgcggcgtttgcgggggatgggccgcacgccgggggcggggccgggctgcccgcggggcgcggggtgtttacgggggcggtgctgcccgccgaggatgcggcgtttgcgtaggtggtgctgcccgccgaggatgcggcgtttgcgggggcgctgccgcctgccggggatacggcgtttgcgtaggtggtgctgcccgacggggatgcggcgtttgccgggaccgggctgcccgccggacgcggggtgtctgccgattggggggctgggacatccgccgggcgcggggccgggatgtccgccggacggggggccgggctgcccgcggggcgcggggtgtttgcgggggcgctgccgcctgccggggatacggcgtttgcgtaggcggtgctgcccgccggggccgggctgcccgccggacgcggggtgtctgccggttgggagaccgggatgtccgccaggcgcgcccctcccttcgggcgcggatcagtacgcacgggcgaagtagatgagcttgtcggccttcttgccgcagcacacgcaggtatccccgatgggggtctggtcgaagggcatgttgcggctggaggcggcggtcagctccttgatcttgtcctcgcaggcgcggtcaccgcaccacatggcgcgggcgaagccgccgtccacggcgcgggtgagctcctccatgttgtgcacgtcggtgatgcgggtctggcggaaggcgtcggccagggcgtacatgttatgctggatattctccagaagcccggggagcatggcgggcagctccgtgagggcgacggtctgcttttcgtaggtgtcgcggcggaacacgacgcactggccgttttccacgtcgcgcgggccgatctccacgcgcacgggcacgcccttgagctcccagtcgttgaacttgaagccgggcgagagggtgtcgcggtcatcgagcttgacgcggatgccggcggccctgagctggtcgtaaatctcggcgcacttctccatcacgccgcccttgtgcgcggccacgggcacgatgacggcctgaatgggcgcgatgtgcggggggagcttgaggccgcgctcgtcgccgtgggtcatgatgatggccccgatgaggcgggtggacacgccccagctggtctcatggacgtaggtgagcttgccttccttgctgaggtactggatattgtaggcctcggcgaagttggtgccgaagttgtggctggtgccggcctgcagggccttgccgtcctgcatcatggcctccatgctgtaggtcgcgcgcgcgccggcgaacttctccttgtcgctcttgcggcccacgagcacgggcatggccagctcatcctcggccacctcgcggtagatgtcgagcatgcgcatggtctcctcctgcgcctcctcggcggtggcgtggatggtgtggccctcctgccagaggaactcgctggtgcgaaggaaggggcgcgtgctcttttcccagcgcatcacgctgcaccactggttgtacttcatgggcaggtcgcgccagctgcccacccacttggaatacatggcgcagaagatcgtctcgctcgtggggcgcacggccaggcgctcctgcagcttctcgctgccgccctgggtcacccacgccacctccggcgcgaagccctccacgtgctcggcctccttgagcagcaggctttcggggatgagcatgggcatgtagacgttctcgtggccgctttccttgaagcggcggtcgagctgctccttgatgcgctcccagatggcgaagccgtaggggcggatgaccatgcagccgcgaaccggcgcgtagtcaaccagctcgctctttagaatcacgtcggtataccattgggagaaatccacgtcgcgcggggtgatgtgctccacgaagccctgcttcttttcggtgtcctttgccatgatgcgccattcctttcttcgtgcggatacaaaaaacaggttcccatgctcccggccatggccacggccatgcgctgggacgaagggagccttcgcggtaccacccggcttaaaacgctttcagcgtgtcggaaaagctcgccttcggcgatcttttccgacgggacccgtttcccctcctcgcaaatatcggcgttctacgcgctgggcgcgcgcagcccttgtatttgctcacgccttcgggtcgctttgggccttcggcccaacagcccacagggctgacgcttcccatcggcgcctgcggcgcggccggggaaacgcgcgctggattcggatttcatttggagggctgcggccctccaaacctccccggaagggtacggtctgaacgcgaaaacgcgttttcacctttgtttgcgccggatatcgggggcgggccgtcggggattggccgagggagcgcagagacggggggcgcgccggggtccgtgaccgccctcgcagccggggaggcggctctcttggcacgggacaggggggcgcgcggttctcgcgcgtttccggcgcggggccgggaacgggggtattttaccacagacggccggggtttgcaacggggaaatgaggctgcgcgcggcctgcctgccgcttcaaaaaaattgcgcgtcttttccaaaaaacgattgacaaagtgacaggcctatgctatgataataaacgctgcttgagcggcaagcgacgcggggtggagcagtttggtagctcgtcgggctcataacccgaaggtcgagggttcaagtccctcccccgcaaccagtatggcggcgtagctcagttggctagagcattcggttcatacccggagtgtcactggttcgaatccagtcgccgctaccacaaaccctgtgaggcatgcctcacagggttttttcgacgcgcgggcttccggggcagcctggcaacccctttcgggcggtccggcgggccgcccccttcaaagggcatgcgtatcgcccggctccgggcggcggggcgtttgcgcacgtagccaaagcatccggcaaaaaaaggcccgcgcacccggctgcatgctaaaacccgcaaagcgcaaggctttgcgggttttggtggtacgcccggtgcggttcgaacgcatggccttcagagtcggagtctgacgctctatccagctgagctacgggcgcgcgacaactcccgccgtgcggcgcacggaaaggccggagggacccggtacgccgcgctacgggcagaggatattgtaccctcgcagggcggatttgtcaagggttttccccgatggcgcaattcttcccgaaaaacacccaaaatacagccgccccccttgtcaggccgggcggaatcctgtatcataacaggcagtgcggcagaagttcccggcgttccgggggaggattggaaggcgccgcagcagggtttgcagtctttgtaggatggaaggatggattcacaatgatgaaaattggtgtattggcgctctatgccctgatgatggtggcggtgatcgtgctgacggcgcgaaagaagctgtcgctgaacgaatttctgctgggcgggcgcaacgtgggcccgtggctgagcgcgctgagctacggggccagttatttcagcgcggtcatcatcgtgggctacgcgggatcgaccgggtggacgggcgggctgtccgccgtgtggtgcggcatcggcaacgcgctggtgggaagcctgctggcctggaagctgctggcccgccccacccgccgcatgggcgaaaagctgggcacggccacgattcccggcttctttgaaaagcgctaccggagcccggggctgcggcttttggcgagcctgattatcttcgtgtttctcctgccgtattcggccagcgtgtacaaggggctgggcggcatgttccagcgcgcgttcgggtttgactacgcctggtgcgtgacggccatcgcgctgctgtccgccgtgtacctcttcgcgggcggataccgcgccacggcggtgacggacttcattcagggattcatcatgctggcgggcatcgcggcggtggtggtgtacatcgtgcgggccgcgggcggcgtgagcggcggcgtcgaggcgctcgccgccgagggcgtggggtcgctcctgccgcctcagggcaaggggtcgtggctgctaagcaacgtgctgctcacctccatgggcgttttgggcatgccgcagatgatccacaagttcttcgccatccgcgacgagggaagcgtgaagcgggcgacggtgatctccaccgcctttgcgctgatcgtggcgggcggcgcgtatttcgcgggcagcttcggccgcgtggtgctggccaggatcgcctcgccggacggcgcgggcacgctgtatgatctggtgatggcgggcaaaatgtccatggacgacatcatgcccgccatgctcaccgaccccaccgtggtgggcatcccggacgcgatgcaggggctgtttgtggtgctgctgctctcggcgagcatttcgacgctgacctcgctggttttgtccagctcgtcggtggtgacgctggacctggtggggccggtcgcgcggctcaagcccaggggcgcgacgctgctgatgcgcgtattgtgcgtgctgtttgtggcgctgtcgctggcgatcaacttctggatgcaggatacgccgatcgtgtcgctgatgtcgctgtcgtggggcacgattgcgggggcgtttctggcgccgttcctctacgggcttgtgtggcgcggggtgacgaaggccggcgcgtgggccggggtgatcggcggggcgctgatttcgctgctgccgccgctggttgcgggggatatgagccttgcgcccatgagtggggccgcggcgatgatcgcggggctggcgattgtgccggtggtgagtctggtgacaaagcatgtgccggggatggcgtttgacgaagggtttttggatgagattttcgggaagcgggaggaaaaaagagtggggtgcaggggcctcaggcccttgccggggtttggggcagcgccccaaaaacctctgccgcagcaaaagccgtgagcgttgcgagcgaccgaaggcgcgaagggaagcgtgtgccctgtgggcacttgccaccggaggtggcaaagcgacccggagcggggcagcgaaaccatgagcgcgaccgtcagggaagcgcgaatgattgagcaaccgggacgcaagaaacgcggcttgatgcaggaagacgcaggaggacgccagcgctccggcggcaaagcccgtcgagcgttgcgagcgaccgaaggggagcgagaaacgcgggtctttccaaatgataatgttttttgaatagaagcggcgcggcccctccgggtggaggatggccgcgccgtttatgtgtcatgcaagaaagtaaggtatttgagcgaggcgcgtttcttgtgcccttcgggcactcgcaacgctcgcttttttgtgctgcggcacagggcttggggcaccggagggaagcgtcagccctgtgggctgttgcgcgcagcgcaaagcgacccgaaggtggggagcgaaacgagcggtgggcgcggccagcgccctccgcgacgattgagcgaccgggagtctgccccaaaccccggcaaggcgcgaagggaagcgtgtgccctgtgggcacttgggccaaaggcccaaagcgacccgcagcggggcagcgaaaccatgagcgcgaccgttagggaagcgcgaatgattgagcaaccgggaaggcccctgcaccccattcattccccctgtcttcccagtctctcccaatattccggcaaaatctcctcaaacctcagcccatacctcagcggctcgccgcccgccaaagtcagccggagggcctgatgcgtcaggtccagtgcgagcgcggcggcgtcgggcagggatttgccgcgcatcagcgcgcccagcaggagcgaggccagcacatcccccgtgccgtgaaacaggccctcatagcgctcgcggtagagaaagagcggctcgtccatgccgcgcgccaagaccgccgcgcccgtcaggcccggccttgccgccacgtccgtgaccaccacgttctccgggccgagatcgcgcaggccccgacacagccgcgccaccgccgcttcctccggcgtatcgccggggtaaggctcgtccagcagaaaggccgcttcggtcaggttgggcgtgatggtgcgcgcgcgggcgcacaggcggcgcatctgcgcgggcaggccgctgtccagcagggagtacagccgcccgtgatcgccgaaggccgggtccacaaagagatgggtatccccgtcgcagaggaggtcgatcatctccagcaccatctccacctgcgcccccgacgccagataccccgaatagaacgcgtcaaaatgcaggcccagcgtttcgatatgccgcgcgatgggcagaagctggccgctcaggtcgaggtgggtatagccggtaaattcgcccgtgtgggtgctcagcagcgccgtgggcaccacggcggtattcacccccgcggcgcttagcaccgggagcgccaccgtgagcgagcagcggcccacgcacgagatatcctgcacgacgatggcgcgcggctgcgcggcttcggtggattgggtcatggagcacctcctgacggcggcggggccgccgggcaacatcgtagtaccatcatacaccaaaacgcgaaaaaagcaagttgacacggcgcgggcgcgcgggtgtcgcgggcgcggggcgcgtgggtgttgcgggcgcggggtgcgtgcggggttgtgggcgcggggcgcgcgggtgttgcgggcgcggggcgcgcgggtgtcgcgggcg

SEQ ID NO: 1548 - DNA, 32759 bp, Unknown
  16S sequences of unknown bacteria
gaccggcgagccgtggcacctgtcgtgccacggcggtaaaaccccggccaagtcgcatgtccccctacgcccctgcgcgcatagcgcgcagtccgaaaggggttcagccccttgggaggttggtttcttcgagggccataaggcaggtctgcttggagcgctcgatgtgcttgcgcatcaggcgctcgaagctttcaagatccttctgctccacgtagtccaccagcttgtagtgctcggcgtgggcggcggagcggcggttctccttggagatggacatggcggagaaacggcggatgtactcgtcctgcccctcgatgacccggagaatgcgcttcatgccggaaatggaggtcaaccgcgcgtggaagttccgggcgcggggagacagctccgcgatcatgtttttttcgttgtagggatccatttcgtgcagcatggcgcgcagctcggcaatgtcctgcggcgtggctttttgaataatggcgggaagggtcagcatttccagcgagttgcggatggtgtaaatttccatcacgtcctccatggtgaaggcgcggacgatcacgccccggcgcatgacgtactccaccagtccgtcctgttccagcttgcgaagggcctcccgcagcggcgtgcggctgatgtgcatacgctcggcgtaatccgtctccacaatgcgcgacccggcggggatttccccggtgataatggcgtgcttgagggtctcgtaggcgatttcgcgaatcggtttgctttcacccatccgttcgaagctggtcatagcggctcctcctccgtaaattgcttttcttttgtatttttgtatcgtatcacgaaggcggattttctgtcaagcgtccgacgatggtttttgttggcatgtcaacggtttgacacgcttcgggggcgaatgctataatatctggacggcggacgaagggccgtcgaaaacgctttacggtcaaaataccgtttgacaggataagggagtgcttccgatggcggaacagatctgcacccggtgcgtgatggacagttcggacccggggatcgaatttgatgaaaacggcgtgtgctcggcttgcaagcagtacatgcacaaccgggaactgagcggctatcaccccggcgaaagcgaaaaaaaactgcaggaaaccgtggccatgatgaaggaaaactccaaggacagcgactacgactgtgtgctgggcatctccggcggcgtagacagcgcctatatggcctatctggcccatcagctgggactgcgggtgctggccgtccatgtggactccggctggaacagcgaggtagccgtccgcaatatcgaaaaaatgtgcgaaaagctgaatatccagctgcatacctacgtgatggactggcccaccatgaaggaactgacccgggcgttcatgctgtccggtctggccaatctggacgtgccgcaggatcacctgtttgcgtccgtggtgcccatgatggcgaagaaatatcacgtaaaatacatcttaaacggggccaacgtggctaccgagggttccatggctcccttctctcaacagcacacgtaccgggattcgtggcacatcaaaagcgtgtaccgcaagtgcggccggggcaagagcctgaaaaaatacccgctgatgtccttccgtcaggcgtggtttggcctgccgggggtacagcagatcaacctgctcaactacgtgccctattccaaaaaagaagccatggctacgctggagcgggagttcggttgggaatactatggcggcaagcactttgaaagccgcttcaccaagtatttccagtccgtttacctgccccggaaattcgggtacgacaagcgccgctctcacctgagctgtctggtgctcaacggcgaaatgacccgggaggaagcgttagccgagctggccaagccgccctatcccgtggaacagcaaaaggaagacgaggaatacatcctcaaaaagctggagatcgacccggcggaatggcagaaaattctggacgctccgcctacgcctgacagcgcgtacttctcccaaatggggttgcttcggctggcacaaaaaattctgggcaagaacaagctggaaaacatccgtaagaagcagcagagcggaaagtaatttcaacacaaataaacgcgccccttcccggttttgtgccggagaagaggcgcgtttgtttattccttttgggccgccagcgcttcgtgcaccagctgggacagtcgttccgggtcggcccgaccccgggtcagggccatggccttgcccataagggctttttctaccgtgagtttgccccgcagatagcccttcaccatggagggattgtcccgaagggcctgctccgctgcctgacggagaacattctcgtccgtcacaaggaacaggccgtgttcctgcgcgtaagtctctggctccacgtcctcgtcaaacagcgcggcgaggatctttttgccggtagagctgttcacccggccttcgtccagcagattgctgagcgctgccagccgccggggcggaatgggcaggctggattcgtcccgctcggttccgggcgtttcccgaagggtcagctgggcgaagacctcgcccaacagcagattggccagcgccgcgggattccgagcgtcagccgccgcccgcataaaataatccgccagccacttttcgtccgtcaaaagctccgccgccttgcggggcaggccgtacttctgctggaaaagggcgcgtttttcgtccggcagcataggcagcgaagcccggagtcgttccagctcctccgccgaaaagaccaccggcggcaggtcgggttccgggaaatagcggtaatcgcccgtcgtctcttttcggcgcatgacgatggtcttcccggtgcgctggtcaaagcgcagagtctcctgcagcaccgtgccgcccgcgtccagaatttccgcctgccgggcgtattcggcccgaatggcccgttccacgctctggaaggagttcagattcttcatttccgtgcgggtgcccatgggctggcccggacggcgaaggctcaggttcacatcgcagcggaggctgccctcgttcatgcggcagtcgctgaccccggcggcggtcaggatggcccgcagctttttcagataggcgctggcttcctccgccgtgcgaaagtccggctcggtcacaatctcgatcaggggcacgccgcaacggttcaggtcgatagccgttacgccgggccggtcgtgcagcagcttgcccgcgtcttcctccacgtggatgcgggtaatgccgatgcgtttcgttcccccatctgcgagaatttccacaaatcccgcttcgcacaaggggtagaaaaactgggtgatctgataggctttgggcaggtcgggataaaagaaatttttccggtcgaagctgctgatcgggttcacccggcagttcagggcaaagcccgccagcgcggccagctccatggcccggcggttcagcacgggcagcgtgcccggcagccccatgcacaccgggcagaccagcgtgttgggcggtgctccgtagcggttttcgcacccgcagaacgccttggtgcgggtcttcagctccacatgggtctccagacccaccaccagttcatagcggttttccgtcatgcccgcgctccttcctgcccggccgtcaggcgttcatagggataagaacccttggggagcggacattccgtttcataccgggccgccagccggaacagcaggggcagcgattcccggccgcccatcagcgtcatgcccatgggaagcccctccgccgacaggccgcagggcaggctcaaagccggaagccccgccagattggcaggcacgctgtacaggtcagacagatacatctgggcggggtcgtcctgcttttcgccgatgggccacgccgtggtggccgtggtggggaacagcagcgcgtccgcggatcccagcacccgttccagctccttctgcaaaagggcacgggcctgcacggcacggtcatagctttcgacccgttgttcttcggtcaggctgtacgcgcccagcaaaatgcgccgcttgacctccatgccaaagccctcccggcggctttcccggtacagctggtggatttcctccgccggggcacgatggccgtagcgaacgccgtcgtaccgggccagattgctgcccgcttctgcgcaggaaagcaccagataggcaggcagtccaaacggcagcgacgggagggagaccgtctcgatctccgcgcccagtcgccgaaatgcttcagcagcggtgcgaaccgcccgttccacgtccgcgtccaatccctgaccgaaggcctcctgcggcagggcgatcatgacgttttccaaggggcgttccagttcggaggtaaaatcagccgccagcgacgggtctgatgtcatatcgcgaggatcgctccccgccagcaggttcatgaccaatgccgcgtccccgcaggtcttgcacagcgggccgatctggtcaaaagagctggccattgccaccagaccgtagcggctgacggtcccataggagggcttgatcccggccacgccgcacagcgccgccggctgacggatgctgccgcccgtatcgctgcccagcgccaccggcgtcatgcccgcagccacggcggcggcgcatccgcctgatgacccgcccggcacccggcttgcatcccacggattgcgggacgggccgaaaaagctggtttcggtgctgctgcccatggcgaactcatccagattcacccggcccagcagcggcattccagcctcctgcagccgccgcaccgccgtggcggtatagggcgagcggtagttttccagcatccgactggcgcaggtgcaaagtctgccctccacgcacagattatccttcacggcaaaaggaacgccgtccagccgggacaggggctttccctcccggcggcggcggtcggacgcccgggcttcctcccgggccgtatccccgaaaacctccagaaacacgttcagtgtggagttttgcagggcgatattttccaaataagcgtctgtaacggcttcagacgaaaaactcccgttttccagcccgcgcgccaattccgaaacagtcagcgcgcacagggcgagggagcggcggttccctaccatgagcaaacagtcctcctttaatcttatgccagcgcgtgcggcacggtaatcagcccgtcttcggcggcgggggcgttggccagcgcctgatcccggtcaaggctggcggacggctcgtcagcccgaagcgcggcgcaacctgtctcccggcggaactctgtcccggcgttctttcccgtaaggggcggcagcgccgccgagcgcagcaccgagggccattgccgccggaggatttcttcctcctccggggtcattgccagcattcccgcatcgtccagcagacgactccattccgatttcatagatagcgctcctgttctggttccatcctgattttgacaacagcattgaagcccgcaacgcgctgaaagcatggagcgggccgctaaaagggtgcgcagcaccgagggttgaggacaccgcgcaagcggtaccgcaaacccgaagcccgcaaccaagggaggccgaaggccgactagcgccagaaatggctgaaagccatgaagcgcgtagccaagcacaagcatagcgcagggcttggccgccgtacgcaggggagcgggccgctaaaagggtgcgcagcaccgagggcgaggacagcccgaagggctaccgcagtccgaagcccgcaacccgcaggggagcgggccgctaaaagggtgcgcagcaccgagggttgaggacactgcgcaagcggtaccgcaaacccgaagcccgcaaccaagggagtccgaaggccgactagcgccagaaatggctgaatgccatgaagcgcgtagccaagcacaagcatagcgcagggcttggccgccgtacgcaggggagcgggccgctaaaaagaaggcccggggctttcattcatcccggtccgtccggcactactataccatgtttgcgctggcaattcaaccggcggcctgccgcagtacggaaggccgcctgcgggttcagtttacaccattttcgttgcgaagccacgaaagcacgtgttctgccgagcggcgcagcgcttccaactgatccgcagcgccgaagtgttccaccgagaaagaacccttgtagcctccctgaatcagggtacgggtcagttcgtccagtcccagccagccctcgcccacagggcaggggtacatccgctcccccgacagatcagccagccagttgtcgtccttggcgttggcaaaggccgcatcccggctgcgatccttcaaatgaacgtgacacacccacggccccagcaggtgcagaccgtccatggcgtcttccatagaataggcaaaattgcccgtatcgaaggtaaagcccaatccttccacattctgcagaaagaaccacagtcccatggacgtggagcagggcgaagcggcgttatcgtagtcctcgattgtgaccgtcacgccgtattcccgggccgcttccaccatgcggcacagttcctccgccatgcggcggcggatcagattggggtcgtcgccctttcggatcagtccgggcacgcacagtgcccgcttcgctccgaaggacgccgtccgttccagatggcagcggaactgccgctcgttttcttccggggtgctatgaccgaggtcataatcctcataaacggatgcgaccttcaacccgcagtcgtcgaaccattgccgccgttcctccgtcagctgccggcagccgcattccagcccgtcgtaccccatggccttcacctgccgcagaacttccggctccgtcaggccccgctgcgtgcaggcttccagtatatgagcgtgaaaagcgttcagttgagccataacaaaagtttcctccttatgatttgtgttttatgggtatttctcccgcgttcaaaagccgttcctcgctgctttttcctgcaaaagcactgattcaacggcattatagcattttttcgaccgaatgcctatgattttgcctgcagggcgacgtcattggtctggttgacggcaacggcgccaaaatggtatcttataattgcgatgcttggggtaagatgatcagcaagactggcaccttggcaactacattgggcacgctgcagcccttcaggtatcgcgggtgtatctttgacgaagaaaccggtctgtactatctgcgtagcaggtactacaatccgaatctgtgccgtttcatcaatgcggacgatggagaggcatatgttgatgctatcactaccaaacagtttgaggaacctgttaaggtatacaacttcgaagttgaggatttccacacctacttcattgcacggcatagtgtacttgcgcacaatatgtgcaaagtacctggcaaaagtggtaagcaggcgcgtctgaaagagctgatgaacgacgataagttgccgaggcatatccgtggagaactcaaacgcgacttcaatgccattcaacgcggcactcatcgtacattcgagtcccacagggatatgatttgtttcatcgcataggccaaagtgctcgaaagggctacagctatgctcattccaatctaaatatgcgagcacagcatctcctgcaccacaaagtctttggatataagtaaagtgtatctatcccaaatgagcttgtatataattaagtgaacggaggatcatcatgaataagtttgaaggtttaatgaatgcccaccctcgcaaacgctataagagttttgtgaccaccgttgctgacacggagatggtttggttggattgtgaccctcatcagcttgtactaaccgaacaatgccccatctccgtatggccggaagaaatgtttgcttccgcagtctgttctgataaagcagtattctccatcgaagttcatgagttctgcgaactaatgatggcatgtcctaacagatcaatccgtgtctttcccaatggtacagattatgtagatactactgctgatgcattgcttgcagatatcgaagaagaactggatttgctagaataacctatatcaatgggagaacgtccgccgctaaataagagtttctattgattggaggctatttcatgagtgccatttttctttcaacagagtcgcagtctcccgcggctcaaatgataattgattgctttatagaaatccagcagaacatggatatagtatcgttagataaatataccgatgccatattgacaatcagtattattcccttctgtgttgatgaagagttcaaaaacacatttgcttgtaaggaaagaaagtatattggctggaagcgaaaagaagcagatatcagactatttattccatttatcccttttgtccaagcatcaaaagaagaaaaactgtcaatctgtaagggaatcataaagaagtcccttacagaaattcacgccagatgcatggttaaaaaagtacgattcgatcttgaaaaattgctgtgcgatattttccctagcaaatgatctctatcaagtgctctcattgcaacaatagcattaaggatttgggcggagcttcgaaagaagttccgccttttctatgccttaaaacaagaaaggacgtgacaaaatgatcactcgcattttcggtgccgtcactggcggccgcctcaacctcctggcatctgcgaatttttccgcttccatcctcgcgagcatccccaatgaaaccttgctcgtcattacattcatacgcctacctgtacaacctgcagggcgacgtcattggctgaccgaatacctatgtttttgtctcattttgctattcagccgcagccgtgttataatgcatggggagagtggattgaaatatcctttccgacaagtggagcggattgaacgatccctttccgacaaaaggaggagctttcgatggaaaaactggaaccctgcgccccttgctggtgcggcagcggaaaagcatataaggattgccattgcgcctttgacgaaaaatacgaatccctgcgccatcccggcgttcacctgccgccccggcggctgatcaaaaacgaagcccagatcgagaagatccgccgcagcgccaaggtgaacatcgccgtgctggactatgtagcggagcacatccgccccggcgtttccaccgaggagatcgaccgctgggtctacgagcagaccgtgcaggccggggccatccccgcgccgctgaactacgagggcttccccaagagcgtctgcacctccatcaacgagcaggtctgccacggcattccctccccggaggacattctctgcgagggcgacatcgtcaatgtggactgctccaccattctggacggctactattccgactcctcccggatgttcatcatcggggagaccacgccggaaaaacagaagctggtggaagtcacccgccagtgtgttcaggccggactggaagaagtaaagccctgggagcccatcggcaacgtgggcgaagcggtgcacagcctggcccggaagaacggctataccgtcgtccgggaagtgggcggccacggcgtgggcgtggagttccacgaggatcccttcgtcagctatgtcactcgccggggcacgggcatgatcatggccccgggcatgatctttaccatcgagcccatggtcaacatgggcaccaaccgcatctacatcgacgcggacaacgactggaccatctacacccaggacggcaagccgtcggcccagtgggaaattcaggtgctggtgacggaaacgggccacgaagtgctggcctggtaagcgtcgggccgttccactttcccgcttcaacgaatcacgaaacgaggaatacgcatatgaaaaaggtactcatcatcggcgcgggccccgcgggactgaccgccgcctacgagcttctgaaaaccggtgaatacgacgtgaccgtgctggagcgcagtcaggagatcggcggcatttccaagaccgtccgctaccaggacaatcggatggacatcggcgggcaccgctttttcagcaaggacgagcgggtgatgcagtggtgggcggacatgatgcccatgcagggcgcacccgccatggacgaccggctcttgaaccgggaggtgcctctggccgagggcggccccgacccggagaaggaagaccgggtcatgctcacccgcaaccgggtcagccgcatctattatcagcatcacttctttgactatcccatcagcctcaagtgggaaacgctgaagaccatgggctttgccaccaccatgcaggtgggcttcagctatctggcggcctgcatccacaagcggcccaacgacaatctggaaaatttctacatcaattccttcggcaagaagctatactccatgttctttgagggttacaccgagaagctttggggccgtcatccccgggagatcgacgccagctggggcaagcagcgcaccaaggagctgagcatcatgggcatcctcagggacatgctctccaaggtgttcatgtccaaggaacgccgtcagcagcaggtgcagacctccctcattgaggagttccgctatcccaagtttggcccgggccagctttgggagaccaccgcgcaggagattgaaaagctgggcggcaggattgtcaagggctgtcaggtattgggggcgaagacggaaagcggcaaggtcgtcagtctgcgcgtccgggacggcgaaggcgagcgggacatggagggcgacgttttcttcagctccatgcccatcaaggatctgatcgcaggcatgaacgacgttccggcggacgtacaggagatcgccgccggtctgccctaccgggattttgtcaccgtaggtctgctggtggaccggctgaacctgaaaaacgaaacgaagctgaaaacgctggggaacatcgtgcccgactgctggatctacgttcaggacacggacgtgaagctgggccgcatccagattttcaacaactggtcgccctatctggtcaaggatccggagcacacggtctggatcgggttggagtacttctgcaacgaaggtgatccgttctggtcggcctcggaggaagagacggttcatcaggcggtcagcgagctgatccgcatgggcgtactggaggacgagacccacgttctggactcccaccgggagcaggtacagaaggcctatcccgcctacttcgacacctacgacgacattggccgggtgatcgaatatctggattcgtttgacaatctttactgtgtgggccgcaacggtcagcaccgctacaacaacatggatcactccatggccacgtccttcgaagccgtccatgcgctggaagcaggtatccgcgaccgttccaccatctggagcgtcaacactgagcaatcctaccacgagagcagggggtgatcccctgcaccccggactgcgcgccatgcgcgcagggatgtagggagacatgcggcttggccgggttctaccgccgtgacccggaaggggtcacggctcgccggtctggtgtggtgaactgctggttggcggaaaatggccgcggctcagcggcaggggcagtgcccctgcaccccagactgcgcgtcgtgcgcgcaggggcgtagggagacatgtggcttaaccggggttttaccgccgctcggcaacgggcctcgcggctggcgggtttcatgcggcgaaccgccggttggcttcctccgcagcgcatggcgcggatgccttgaaaaacggttttccggtctattcctgaaatgctgattccgccatttggcgggctgggaggttctcttgcttcgtcttttaccccgaaatacccgtcctttgaccccgcaggcggcggccgcgctgctgccctatcagggcacggcggcgcagcttctttacgcccgcggtatcgagaccgctgccgaagcggaggtctttctgcatccctccttagatcagctgcacgaccccatggaaatgcaggacatggacaaggcggtggcgattctccgtcaggcccgggacgaaaaaattcccacggtggtttacggcgactacgacgtagacggcatctgcgcggcctcgctgatgacgcaggccctgcgccggtacggaatcgccgccgacccccacacccctctccgggccgaggggtatgggctgaacaaggacgcggtgcggaagctggcggaaacctacggcctgctggtgacggtggacttgggcatcaccaaccacgaagaggttctgctggccaaagagctgggcatgaaggtgatcgtcaccgaccaccacggtctgcccctgacggaaagtcccggcgacgcggtgctgaacccgttgctgggcagctatccctatcgccgcttatgcggcacgggcgtagccttcaaagtggcgcaggcccttctggggctggaagcctgccgggaatatctggatttggcagcgctggccacggtggcggacatcgtgcccctgaccggcgagaaccgggtgctagtctcgctggggctgaaaaccattcaggaggcccgccgtccggggatcaaggcgcttttaagcgtgagcgcctgcggcggcggcgtgacctcggacacgctggggttccagctggggcctcggctgaatgctgccgggcggctggacgatgcgggcaaaggcgttcgcctgatgatgaccgcttccccctcggaggcagaaagtctggcggcggagctgaacgccctcaacgaccggcgcaagagtgccgagagccgtctggtgcgtcaggcgcaggaggcggctctcgaccatgattttttgaaagaaccggccctgatcgtttccggggatgaatggcacgtgggcgtgatcggcttggccgccgggcggctgtgcaatcagtatcactgcccggtctgcgtcctgagccgggaaaacgggcttttgcacggcagtctgcgcagcgtgccgggcattcacattcatcattgcctgcaggcgctggacgatattctcctgcgctacggcggccacgaacaggcggcgggcgtgaccttatcggcggacaaggaggatgagttccgcgcccgcctgcaagcggaggtacgcaaggccgacccggcctgtctggtgcctgcccagctctacgacgcggagattcagctggacgaatgcaccgatgccctctatgacgagctgaacctgctggccccctttggctgcgaaaaccccgcgcctctgcttctgtgccggagcgctgcgctggaggagcggcgggccgtgggcacggagggggcgcatctgaagctctccctgcggcaggaaggaaaactcctgccgggcattgccttttccatgggcagcaaggccagcgcactgccggaacgggtggacgcggtcttcgcgctgggaaagaacaccttccggggcgttacttccttacaggcggaagttcaggcgctgctgccggtgcaggaatccgttcgggagcaatttgctgccccggacggcgagccggagcggctggctctgtacaacgccgtcaagtccgggctgtgtctggcggcggctcaggaggggacgcccccggtgaaggaagccttcgacacgctggacgggctgaaagaagccctgtcccggctggatcggggcattctggcggtcagccgtacccatgcctcagcgctggcagcgctgcgtctggcggattgggacacagcggtttccgcgccgtcagacccccgcagttttcacacgctgctgaccgccccggcgttggagctggtcagcggccattacgcgcaggtctggctattggacggcgagttattccccggcgagggggtgctctggcagcgccgtctgccgggagccgagcttcacgttctgccccggagccgggcgctttcggcgctggcaggaaccatcgccccggatgacgaaagctgccggggactataccggctgattcggcggaccctgtgccgcagcgttgcggaagcggcgcagcagtcgggcctcacgcccgtacaggtgcgaacggcctttaccgccttcggggaactttcactggttcgctggacggagtcgccctttttctacgagctgcttccccccgtgtcctgccgtctgggcgacagtcccacgcttggcgcgctgcgggagctggcgctctcgctcccggtttcaaatcttcaaaaggaggaagcctgattgaaagaatcgaaagaaataaaaggaaaatcttcggtttccctgcaggcttttctgctgctgcacggcacgctgttgctttacgcggtggtcacagtgctcaccaagctggcctcgggctatctgagtcaggccaactggcccatgaccctcctctttctgtttttcagcgtggcggcgctgggcgcgtacagcatcctgtggcagcaggttttaaaacggatgccgctgaactttgcctattccaacaaaggcgtctgcaccctgtggacctgtctgttcggcattttattctttggcgaaagcctgactttgggaaaggcggcgggcattctggtagtgctgctgggcgtatggctggtggtgaccgaccatgcttaaaggcgtattgatctatctcattaccccgctggtatcggccttttcccagctgcttttgaaaaaagcggcggacgatcgcagcctgaccggcatccggttctatctcaacggccgggtcattctggcctacgggctgctgatgctctgcatggcgctgaacgtggtggcccagatgtgggtagggctgacgctggtaggcgtgctggaagccctgagctacgtctacgtcatgctgctgtcccgccgtttcctgaacgaaaagatcacccggcgcaggctcattggcaatctggtcatcgtattaggcgtggccctgaccctgctggcggattttctgaagttttaactgaccgatttgaggaggaatcaccatggaaacccagaccccggaagtcaaaaaaacgatcttctccggcattcagccctccggctccctgaccatcggcaactacatcggcgcgctgcggaatttcacccttctgcaggacgactacaactgcatctactgcgtggtggatatgcacgccatcaccgttcggcaggatcctgcccagctgcgccgccgctgtctggaagtggccgccacctacattgcctgcggtctggacccgaagaagaacatcatctactgtcagagccatgtcagcggccatgcggagctggcgtggattctgaactgctttacctacatgggcgagctttcccgcatgacccagtacaaggacaaatgcgccaagcacgcggacaacatcaacgcgggtctgttcgactatcccgtgctgatggcggcggacattctgctttatcaggctgatctggtgcccatcggagccgaccagaagcagcatctggagctgacccggaacattgcccagcgtttcaacagcatttacggcgacgttttcaccgtgcccgagggatacttcggcaaaatcggcagccggatcatgagcctgcaggagcccacccgcaagatgagcaagtccgacccggacgactgctacatcgccattctggaccccgaggatgccatccgccgcaagatcaagcgggccgtcaccgacagcgacggcgaaattcgctacgatcccgaaaacaagccgggcgtgagcaacctgctttccattatcgcggccatgagcaatcaggacattgcctccatcgtgaacgatctgcaggggcagggctacggcgctttgaaaaatcgctgcaccgaggtcgttctggacacgctgctgcccattcaggccgaacacgcccgtttgatggcggacaagggctatctgcaatccattctggacgaaaacgcccagcgggccaactacctggcccagaagaccctccgcaagattcagaaaaaagtcggcttcgccgcccggtagcaggggcagtgcccctgcaccccggactgcgcgccttgcgcgcaggggcgtagggagacatgaaacttggccggggttttaccgccgtggcacagagggtgccacggctcgcgggtctggtgtggttcccggttagttgattcgtacagaccgccattcggcgacgggcctcatggctcgcaacaaaggccagcgtgatttaaataccgcgctggcctttggcaggtctaataaagccctgcacccgaactgtgcgcaaggcgcgcaggggcgtagggagacatgggacttggccgggttttaccgccgcggcagggctaaagccctgcaccccggactgcgcgccttgcgcgcaggggcgtagggagacatgggacttggcggggttttaccgccgcggcagggctaaagccctgcaccccggactgcgcgccttgcgcgcagggggtgtagggagacatgggacttggccgggttttaccgccgcggcacggagggtgccacggctcgccggtctggtattgctttcttgtttgttggccgaagtcggccgccgctcggcgacaggcctcgcggctggcgcaggaggcgtcagtcccgttgttggctggatactccgacattccatggcaaaagactggttcgaaaaaacttcttcatcacgcaaacatcccccgtccgccggtttcaggcgaaagacgagggatgttatttcgattttcagctcagccctttccctgaccgatcaggttgatcaggccgccggccagcagcatatcccgctggcgttcggtaacggacaggttcatcgaaatggtgaagcccttggtgacgttctgcaccgtcaccttgccggtggcctcggccacctcccggcgcacgtcaggaagggcgatctcatcgtcccggtcgaaacgatcgtagtcgctttcattcgcaaattccagcggcagaatgccgttattgatcaggttggcccgatggatacgggcgaagctcttggccagcacgccgcgcacgtgcaggtacaggggcaccagcgccgcgtgttcccggctggagccctgaccgtagttatgaccagccagcaggaatccgccgcccgccgccttggcacgggccgggaaggtcgcgtccaccggggtcaggcaatgttcgctgagcttgggaatattgctgcggaagggcagcaggtcgctgccgctgggcataatatggtcggtggtgatattatcctccatcttcagcaacacctggccggaaagactgtccgccagcgcgtctgccttggggaagggctggatattggggccgcggacgacctccacggaagcggcttcttccggcgaagccgggggaagaatcatattgtcatgcaccgcaaaatgctccggcatttccaccgtcaggtcggcatccgtctcacggggatcggttagcacgccggtcagggcggtgacggcggcggtctcgcagctggtgaggtaaatgcctgcactcttcgtcccgctgcggccgaagaagttgcggttattggtgcgcacgctgacgccgttggtcttgggactctgacccatgccgatgcagaagccgcaggcggtctcgcagatgcgcgcgcctgcttcgatcatatcgtgcagcgcgccgttctggctgagcatactcagcacctgacggctgccgggggcgatgaccagcgacacatcaggattcacggttttgcccttgaggatggccgccacgcgcatcatatcctgatagctggaattggtgcaggagccgatacagacctgatccaccttgatggggcccgcctcccggacggttttcacattgtcgggcatatggggcaaagcgaccatgggttccagcttggacaggtcgatgtccacttcttcatcatattccgcgtcagggtcggcaaacaggggctgatagtcttcctcgcgctcctgcgccttcaggaagcgccgggccgcttcgtcgctggggaacacggaggtcgttgcgcccagttccgcgcccatattggcaatggtggcgcgttcggggatcgtcaggctttccacgccctcgccggtgtattccatcaccttgcccacgccgcccttgacggtcaggcggcgcagcagctccaaaatcacgtcctttgcggccacaccccggggcaatttcccggtcaggtgaacattgaccaccttggggcagttcaggtaatatgcgccgccgcccatagccacggccacgtccagtccgcccgcgccaatggccagcattcccagcgcgccgcctgtgggggtatggctatcgctgcccagcagcgtccggcccggcttgcccacccgttccagctgcacctgatgacagataccgttgccgggcttactcaaatagataccgtgctttttcgccacggtggtaatatactgatggtcgtcggcgttttcgaagcccgtctgcagggtattatggtcgatatacgccatgctgcgttccgttttcacccgatccacgcccatagcctccagctgcaggtaggccatggttcccgtagagtcctgcgtcagggtctgatcgattcgaatagcgatttcctcgcccggcaccagctcgcctttgagcaggtgattttttagaattttctgtgtcagattcattgaaacctttcctccaaaaaatccccggcgtcccgggtatttactctcccagtataccgttcttgcatcctgtatgcaatcaaaaaccaaagaaaaaacaaggggcaatagcaggggcagtgcccctgcaccccggactgcgcgctatgcgcgcagggcgcttgagggaaagcaaattggccgcggaattaccgccgttcggcaacgggcctcgcggctcgcgggtttgacagggcttcatgagggctggtcgaaatagacggccgctcggcaggcttaaagtcctgcacccaggactgcgcgctatgcgcgcagggcgcttgagggaaagcaaattggccgcggaattaccgccgttcggcaacgggcctcgcggctcgcgggtttgacagggcttcatgagggctggtcgaaatagacggccgctcggcaggcttaaagtcctgcacccaggactgcgcgctatgcgcgcagggcgcttgagggaaagcaaattggccgcggaattaccgccgttcggcaacgggcctcgcggctcgcgggtttgacagggcttcatgagagctggtttcacagcttgtataaagagcagcgcccaccggccacatattacgaccgtgcaggactggaataaaggaatatgtttcctaaccagaatgaccgcgtgacgatccggaaaagcggaaaccactatgatcgccgcgcaccatgaatacgcaggaatatagacgagtgcttcaaccatgacaaaaagcaacgcctgccttgaagccaagacagacgttgctcttatccgtatgaaaacgcaaaatcggttcgccgttccgtgccatttttccaagccagccggagggcctgtcgcccgacggcggcctgtgtcagccacctcacaaagggcttcataaaaccggcgagccgtggcacctgtcgtgccacggcggtaaaacccggccaagctgcatgtccccctacgcccctgcgcgcaaggcgcgcagtgatgggtgcagggctttagccctgctatttgccggcgcgtttctgggtgacttcccagccctggtcgatggccttctggtgggaggtggcataggggccgatggcctcgacctccgccttcgtgcgggggaagtggacgcagagatggcccgcgaaattgttgatatttttgttgttgtaggtgccatggggcgtgttgtgggtggaggccatgtagacagaaccgtcgctgaacatgacccagacgggcttcgggttccacgtggtcttgccgaacgccttgttcatcttcgccgtgtcctcggcggtgatcgggatcgcgtccgcgtgagcaccgttggagaagatggtcagctgccaggaaaggccggtggagaagtcgtagaccgtcacgttgggatacttccgagccttggcgcggatctcggtgtaccagttggcatagcggacgctggccgcgctgatggtggtcacgttgggcgcggtggtgggggtgacgatggtggtcgtgccgccgttgttgacggtgccgctggtctggttcagcttcttcgtggtggcggaacccatgatgccgtccgccttcaggccgttggcccgctggaaggcgatcaacgcaaggctggtctggttgccgaacttgccgtccgccttgccggtcagatagcccagcgcgatcagccggttctgcatggccttgaccgcttcgccggtagcgcccttgtacagggtgacgtagggaaccgtgttggaaacggctccgctgtccgtggtgccgtcgcccagcttggcctgcgtggccgcgcccacaatgccgtccggactcaggccgttggcctgctggaaggccttcaccgcgcggcgggtggaggaaccgaacttgccgtcggcggaaccgctcagatagcccagcgagatcagcttgttctgcagggtctgcacctccacgccctggctgccgtagcgcagcgtggccgccttggaggaggcgatcacgtcggaattggcgttgtcagcccgcttggccgcgtcactgtaaagcacggtctgagtgttgtagcccgccttgccgtcggtggtcaggccgttcgccttctggaaagcccgcactgcggcgatatcgtccgtcagatagatgccgtcctgacgggaggtgtagtagcccagctcctgcagacgaatctgcagccgcttcacatccatgccctgactgcctgccttgatggtgacgcagttttccttggtgatgggcgcataggtaggttcgggggtctcgttggcggcgatcacaggggtggcggtgggcaccgcgtacaccgggtgcgccgcaaacagcaccgcccgggtctgaatgccgcatacgccgtccgcgtccagcccattggccttctggaacttcttaagggcctttacgctgtcgtcatcaaaggtgccggtgactttgctggtcaggtagcccagctcggtcagacgggtctgcaccagcttcacatcgttgctcttgtcgccggggcgaaccacgtccttgggcatttcgggcacaggagtgggcgtgggagtcacggccacggaggcgtccagcgcccaagtgctgtaaagaagattctgatcggtagcggaaagcgcgccatccaccaccagactgttcttgcgttcaaattcctcaatagcggacaccgtcagcgcgtcgcatacgccggagggggtcgaggtgtagtagcccagctccttcagccgggtctgggccttggtgaccacttcgccctgtccgttgagcttgatgaccgcgcccgcgatgggcggaatggtcttgacgtgctggcggaagctgttcacatccttgggcgtgccttcgtagatcagcagctgcagttccgcgtccgcctgcccggtctgctccagcccgttgcgcttctgaagcagcttgacggcctgctcggtcttcgtgccgtacttgccgtccgcatcgccctcggaaagatacttcagctcaatcaacgcctgctgcagcgccgtcaccatcgcgccggtatcgccgctcttgatcagcgcataggactcggaaccgggcttgggcgtggccgtcggcacgggcgtaggcgtggggatgttggccagattcacatacttggcgtacacatagcccttctggccgtcgtattccacccgggcaaaatcgccctccacgctgagcaccgtcacaaggctgttgacgggaatggtgcgatacacgtcggcggtgcggttcgcttttttgcgcagcttcacataacccaacgtggtggtatcgtaaggataggacgtgaccgccagcggcgcggcatgcatcaggctttcgtccggctcgggatccgcgccggaatcagtgccgtcgatgtacttgatgagggcatagccctccttgccgtcgaactggatctgataataattgccggatttgcccacgacggtaacggtgtcgcccaccttgatccgcttgaggatggtggaagtcccgttcgcccgcttgcgcagattcacattggacatactggtggtctgatagggctggaaggttttgccggccgccagcgccgtactcagggtagaaaatgccagcagggcagccaataggaaggccagccagcgccgaatgcgaatctcctgtgtcattcccgattcctccaaaggcaaatcttatactgcatatggcaaatctgtccagcgcgggcatagatgcgaatacacgcagggcagaaccagagctttccagcccatattgtacgaaaagttattacgtgtgtcaaggataaatgttatatttccgtaataattttaacgtttctttgcttttttgccggtttttcccttttcggtgggcaaaacccggacggttttgaagcgcttcattttcgtgcgcacccagctttccgcctcaggaaactcctgcaccgggcagctgaccgccagaacctgccaataggccgggtcaaaaaacagcagcgtctgcccttcccgccagattttcacccgcttcatccgctcccacggcaggatcacccggcgcaccagcttaaggccaggcagggcgtgctcgtcctcctgcagcgtctccgcctgcgacggggtcaaaaaccgggcgtacagcgccagatcattcacttcctccgacacgtaggtgtaggcgctgacgccgtccttatccaatatataatgaactttttcccggccctgacaaaacagcagcgctagaaacaacagcagcatcccgcccagcagccacagcatggtcaggccgaagccccggcgaaacagccctgccagcgcttctgtgccgccggaacaaagctccgccagcgagatgaccagaaagctgatcccccacaccggcaggcccacccgcaaaagccggttccagcagaaccattcccgccagggggcccgggaaacgccgaaggacagccgttcccccgttttggtcagcttcgcgccgcagtaagggcagctttcgccgacggggacttcggctttgcatttccggcagtagttggcaaggggcatggcgtttcttcctttcaaacgtgaaatgattttttcggtcaggccgggcataacgtccgcctctccgggccatgctaccggcgaggtgatggcacatggcttcttattctacgcttcaagaactactcctgcacagccggaggagcaaaatctttttcgatgggctgaaccgggaggttcaggtgatgctgcaggagcagcggcaggacatccataccttcgaggagctgcaaaaggcagcgaggttcaaggggtagattcgcgttatccctcaccgcgccatttacatttcaagccgagagggtgtgcatttctcggctttagcatttttatggcagcgattttccaacacgatgaaccttgtcatgatactaataacttttgttttaatccagcagcatgaaacagtagacgttatctggagtcaaatggggaaggcgagatcctatcgggcattcgcatcaaaacctccctccgcttgatctgatccaccgccgctatgcctccacagcataacttcatgaaggcttctttcgatgtagatatagaagacccgccgctgcttcaatatgcattggcggttttttttaagtttctttttagtcagttgtcgtctgcggtgggcggctcggctccttctatgtttcaaaagcgcttcccgcctttttctattaggtctaacaagtcattacttatttttgttacagacgtttccccgtttttacattttgccctttactgcatcgacctccgtatcctgcaaagaacatctactggtcatcgctgccggatccagcagcgtttggagctcctgttcagtcagcaggccccgctcaagggcgatctttccgacggggcggttggtgcgcagggcctcgcgagccagactgcaggccgcgttgtagccgatcttcgggcacagggccgtgaccacgcctaccgagcgctccacctcctgacggcagacctcctcattggcgcgaacgccctgcagacagtggacattcagcgtatggattccgtgctgcagcatcacgagaccctgatacaggctgtcgaaaatgacgggttcaaaggcgttcagctccaactgaccggcctccaccgccagcgtgaccgtggtatcgtagccgatgatgcggaaggcgatctggttgaccacctcggggatcaccgggttgaccttgccgggcatgatggaggagccgttctgccgggcaggaaggacgatctcgcccagcccgtcccgcgggccggaggacatcagccgcaggtcattgcagattttggacagactcgcggcacagcctttcagggccgaggacagcgccagatagcagtccgtattctgggtggtgtcgatcaggtcacggctctgggtaaaggggatgcccgtcatttcggaaagcagcggcaccacctgcccgacataggcgagcgtcgcgttgatgcccgtgcccacggcggttccgcccagattcagctgaagcatttccttccgcccgcgttccagccggtctttttcccggcgcatcaccgacgcataggcggcaaattcctgtcccagccgaatgggcaccgcgtcctgaagctgggttcgccccatcttcaccacgccgtcaaagtcggcggcccgctcgtccaaaacggcaatcagcgcttccatttccttcagcagcgcgccgcagacctgatagagcgtcattttgacgcaagtgggataaacgtcgttggtggactggccgcagttcacatggtcgttggggtgcacaagagtatagtctcccttcacgccgcccagcagctcgatggcgcggttggcgatcacctcattggcgttcatattggtggacgtacccgcaccgccctgaatgggatcgacgatgaactggtcgtgcagcttgcccgcaattacctcatcgcaggcgctttcgatcgcgctgccgattttctccggaagtacgccggccagggtattcgcccgcgcgcacgccttcttaatcgatgccatgctcacgatcatttcgccgggcagacgtctgccggtgatcgaaaaattttccgccgcccgcaaagagtggatgccgtaataagcgtccgcgtccaccgccatcgttcccaccaggtcctgctctgttctgctcatcgtgtttcctgctcccttgcttatgtaagattgacaacagtatagagagccgctatactatttgcaaatatcaatttatcaaagttttaaataggcttatgcctatgttggagggaaccatgcttctgcacgaaatgaactacgtctacgaggtttaccggcagcgcagctttaccaaggccgcccaggcattatatattgcccagccgtctttgagccagatggtgcgaaaggcggaagcgcgcatcggtgcgcccattttcgaccgcagcacctctcctatcggggtaacagagctggggcgggcctacatccgcgccgccgaacaggtattgcagatcgaggccgacctgcagcagtatctggacgacacggaaaaatgtctcaccggcgcactgacgctgggagggacgacgttcttcacctcctatgtgctgccgccgttggtcagcgcttattcggagcgttatcccggcgtggagctgcgtctgcacgaggctcacaccgggcagctcaagcaggaattgcaggagggaacgctggactttgctctagacaacacgcttctcgacccggccatatacgaggccgtagagattcaaacggagcaggtgatccttgccgtgcctcgggcgctgcccgtgaacgaaaaggccgcggcgttccgcctgtccgctaaggaactgcctcaggcaggcgctccctgcgttccgctggagctgtttgcggacacgccttttctgctgctcaaggaaggcaatgacacccgcagtcgggctgaacaattgtgcgctcaggccggctttgagccaaaaatccggctggcgctggatcagcagctggcggcctacaatctggccggttacgggctgggcgcggcctttatcagcgacacactggctctaagcgccccgccggacgagcggctgtgcttttaccgtatcgacagtccggacgcaacgcgcagcatcagcctgttttacaagcgcacccgggcccttaccgcccccatgcgcgccctgctgacgatgctgaagccgccggagggagaggagcgagtgttccgtcaaaaaattccaaatgcctgacggcacttctttaagaccctctattatcgagcagatgaaaacagcccgcacgccttcaggcttgcgggctgttcttatggaacgcatcctgccagacgcaagaaaatcgcgccgtccaatcagtgtgtccgtatttgctattgtttcaccccttgatcgcccccagcataacgcccttgacgaagaagcgctgaaggagcggataaaggcaaaggattggcccggaggcaataacgatgagcgcgtatttcatcgtttcggacaccagaagcgccgtcatgccgctgtcgccgcctgcgccgccctgctcgctgtagtcgttggcgctgaaaaagctgcgcagcaccagttgaagcggatagcgggtgcggtctcgcagatagagaagggcgttaaaatagctgttccagtgagccacgccgtaataaagcaccatcacggccacgatgggggcggacagcggcagcaccacgcttcgcagaagatgaaaattgtccgcgccgtcgatgctggcggcttcgtacagctcggttggaatgctggtctgaaagtaatttttcataatgaacatattccacgggctgaccagtccgggcagcacgagcgaccacactgtgtcgatcaggccgagatttttgaccaccagaaacgtgggaatcatgccgccggaaaagagcatcgtaaacgccgtcagcatcgtaatggggcggcgcgccgcgaagtcgtggcggctgaggggataggccatcatcgtcgtgacggccacattcagcaccgtgcccagcagcgtgtagaacaaagtattctgatagccggtcatgatcagttcgttgcggaacacacgctgataggccaccagtgtgggctgcatcggcagaaaggtgatcttgctctgcaccaccagcagcgggtcgctgaaagaacaggacagcacatagatcaacggatagaggatcaccgccaacagcaggcacagcgcggcgacgttgatcgcgtcaaaaatgcggtcgccccgagttcggtgaatatgtttcattgcgttttccatggcggcgcctccttaccacaggctgacatcagccgttttgcggccaatgtagttgacggttaccacagcgatcaggttgatgacggaattgaacagatcgacagccgtggcgaaggaataattgttgtccaccaggccctgcgtgtaaacgtaggtcgaaagcacctgcgcggtcgtgcggttcagatcgttctgcatggcgaaagccttctcaaagcccacgctcatcagcgagcccagattgagaatgaacagcgtgaccgccgtggggatcagtgcgggcagcgtgatatgccacacgcgctgcaatttgttcgccccatccagcatggccgcctcatactgctgcggatccacgccggagagcgtcgccatatagatgatcgacccccagcccgcgttctgccagacgcccgaccagacgtacatatgccggaacgccgtctcgctggtcataaagggcaccgggctgccgcccaacgcctgaatcagcgtattgaccacgccgcccgtgcgcatcagcgcggagggagcggcgaaaagctgctgcatgatgcccaccagcacgatggtggaaatgaaatggggcgcataggtcacaaactgcatgacctttttgaagcggccgctgcgcagttcgttcatcatcagcgccagcaggatgcagcagggaaattcggccagcagactgtagacgctcactgccagcgtgtttccgataatgcgcatcgaataggcgctgttcaggaaccgcacgaagtgcttcagcacgttgatctgcccgcgttcgctggcccacggactgcgccagattcccagaatcggcttaaaatccttaaaagcgatttgaacgcccgccatgggccaataacgaaacagcagaaggtaaatgacacccggcagcaccagcagatacagctgccagttgttgcagagctcgcgcacgatgcgttccggcaatttcttcttcgggtgctggatgtgatatgcagtcatgttttcaaaaaccctttccggctttttccgatgcacaggcgggacaggaaccttcttcctgccccgcgcattggatgaatgggacgtttagttctgggcctgcatccggtcgagagcgccctgatagatctcgatatagcgttccagaccgagggactgcatctcgtccacatagctctgccaggccgcatcgtcgttcacgtccagctcgcccttgatgaacttggcgcggtaaacatcgtggcagttggtgatcagatccgccgtcagggggctgagttcctcgctctcttcggtggtgaagttgaacttccaggtgatctgattcacatagggttccaaatttttcgcggtttccaggtttacgccgcggcattccgctccgcagaagaactcgtccttgatgagaaccggcagtgtgccggaagcgtagggagaaatggcggagatgaccttgtcgtagggattctcggcggaaacctgatcgagaatttcctgattgtaggcgggcagaccgttttcgtcgtagtagaagtcctcgccttccttgccgaagtagaacatcttcgcgccctcgtcggtatagaagctgtcgatccagcggaccagcgtcgccgggtccttgcaggtgggagagatggcgaacgcacccagtccaacgcccttgttcatgttgttccactgctgatcgccgttcgggcctttcagggcgacttccagtccgacataatcatccgcattgacgctggcggcctgacagttgatgtaggacaggcagaagatcatgtcctgacttcccttggccaccatcttggccgtgctcagttcgaacagttccgggtcgatcaggccttcctgatagagcttggcgacataggcgagatactggcggtagctgtcgcaggtgtagacgaagcgaatcttggtcgggtcgctggggtcagagtccacgctcaggtcttcgcggccgcggttgttgaggccgaacgcgccggtgaaagcgcgcagcacgttgctcaagccgttgctggtgacaccgatctcatcattggcgtcgccgtttccgttcgcgtcggcgtctctgaccttcaccagcagctcatacaattcatccgtggtggtgggcaccttgccgccgacggcttccagcatcttcttattaaagaacattttgggatgcatccgggcggaaagcgcgctgttcagttccggcacggagtacattgcgccggtctccgggtccagcacattgctccacgcatccattttgtccagcgccttgcacaggttcggtgcgttctcctgaacgagttccttcaggtcgaggaacatgccgtccgggccgaagcgcttgagcatggaatcactgatccagcagcggtagaacgcatccgggaagtgttcaaagtcagccgagccaatcagcgtattgagcttttcgctcatttcatcattggaaaacagcacccagttgatatgaacgccggtagcttcttcgaaatacttccatgccttaatgctttcccattccgtctggtaggtggggttgtaagcggcccagaccgtaaattccttcggttcctcggtcacacgggcaacatccgccatggcggggacacaggcaagcgccagaaccagcgcaagcagggcacaaagcaatcttttcatccagcaataagcctccttttcatggttcgcaggggatgagctttccctccctcaacgacgggcctatagtacgcccgccatgtcaaaagtccaatccatccgaggcaaaaaataagtcagatttgaggccggacgggctgatatgccggattgtttttcattgacaagagtattcaaaagcggcgcaagtccttgctgaatcgttgtatgcttcaataccgggagatggaatcacccggcggggcagcaccgttttctttttcagttttttcttggcaatcgattctattgagcttataatgataaataaagaaggcatgcctttcgaaagcataagaaaaagcaccgcagcgatacaaccctcaaaattgttctcgcaacggcgcttctaaacctgatcgccgagttggtaggtctgctcgcgcagctactaaagcggtaatcagcgggggggaagggcgaaagccctccctgccccatcagtataacacagatgctttcccatggcaacaaaatgtatccctgctgatcttatgaaaaaaggagcatgaaaaaaatgaaactacggccgcagaagggaaacggaggacatgtgaccagctataatgtaacgatcggaagtcgggaggcaagagaggccggcttcctgcatgaggatggaagcccgaagccggtcaagaaaaccgtaatcccggaaaaacatcaaatcgtcatcgaactggatacggaaaccgaaggggagtaacaggcagctgctacagccaaggacaagacgatgcaagccgacattttgggtggaaaagtttgaacctcgttttgaacctcaaagggtgcagaataggagaaaacaggagacattgagaaaggaaaaatggataaagaaaacccgcaaaccgttatagtttgcggatttctttggtgagcccggcgggattcgaacccacgaccttttgattcgtagtcaaacactctatccagctgagctacgagcccacatgttttaaggcattccttaaaacatcttcattattataacaaagcccggcaaaaaaagcaactgttttttgaaattttttgaattttctttccggcagaagaaaaccgcccgtctttcggccgactagaagccgaagacgggcgattgcagaaatgggaattggttgggctgtgcttacagcaaggagaacaggtccacctgactggtggcgggcagaccctccagcgcgccctgcaggcgcagcatttcaatgacgctggtgcccacatgggcgcgggcctgcaggtcttcgatgctgatgtagggtttctccgggtcgcgggtatccagaatgccctgaatggccgcttcgcccagaccgttgatggccgtgaaggggcagcgcaggccgccttcctcgggcaggaaccggttagcgtggctcttgtacagatccaccggcagcatccggatgccgcgctcctgcatttccagcaccatgtgcagggcgttttcttcctgcttgtccttgatggacattttttcttcccggttggcaaactcttcaatgcgggaacgcagggtctggttgctcagcagcattttagccgcgtcgaagccgtcgccgcggatggaaaaataggccgcgtagtaggcggagggccgatacaccttgtaccaggccacgcgcagacccatggtcacataggccacggcatggccccgggggaacatgtacttgatcttgtggcaggaatcgatggcccattggggcacgttgtgctccctcatggcctcctcccactccggcttcaggccccggcccttgcggacgctttccatgatgtcgaagctcatcttttcctgcatcccctgcgagatcaggaagttcatgatgtcgtcccgggtacagaagcactgggccaacttggccgtgccggagttgatgatgtcctgcgcgttgcccagccacacgtccgtgccgtgggacaggccggaaatacggatcagttcctccatggtggaaggcttggtctccatcagcatgccctgcacgaagccggtgccgaactcaggaatgcccagcgtgccggtctggcagaggatctgatcctccgtcacccccagcgccttagggctggaaaacaggctcatgacctgcttgtcgtccagcggaatttcccggaagttcacgccggtcagttcttccaggcggtgcatcatggtggggtcgtcgtggcccaggcagtccagcttcaccagaatgtcgtgcatggagttgaagtcgtagtgggtggtcagggtggcgccgttgatgtcgtccgccgggtgctggatggcggtgaattggcagatgtcgtactccttgggcagcacgacgatgccgccggggtgctggccggtggtgcgctttacgcccacgcaacccgccgccagccgttccttatgggcacggcccgccttgatgcccctctcctccagatacttggcagcgaagccgtaggccgtcttttccgccagaccggagatggtgcccgcccggtacacgaagcccttgccgaagagctcctcgatataggcgtgggcccggggctgatattcgccggagaagttcaggtcgatgtcgggca

SEQ ID NO: 1549 - DNA, 1801 bp, Unknown
  16S sequences of unknown bacteria
ctctgctgacgaggtttgtgacacatgacggaaaagatgcaagcaagtgtgccgccgtgaaaccagcgttgttgcctaaagttattaccaaccgattgaacggagatattcgcggcttgcctttacggagtccattctggaaagacccattgaaggctcgtcctgctcaactacaacccactcagcgccggatttaactgacgcgtcgagaatagcgggcatatcctgcatgccgtgacctacaggacggaattcaaaggaagaaggctcgtcgtcatcattttcgtcgtccataccgatgagggcatagaggtgcttcgggagctttccttcaatattaaagtccttgagatgaacgacaggtgtgcgtccgttgtacttagctatgtattcagccggattttcgccgccgatgtttacccagcaggtgtcaagctccgtctggagatattccgcgggaaccttcttgtagagaatatcaagaccgtattcgccgtcgaccttcttgaattcaaagtcgtggttgtggtagagaagtgtgatgccgtacttctttgcggttttgccgagagctgctatttcgtcgatagtcttgaagaaatcctccgcaccgggacgtctttcctcggtaacgtagggaacagccacaaagcggcagccgattttcttgtaagtctcaaatgtaccgtcgggatctgcaagcatttcaacgagcggaacatgagcggaaatcggaacaagaccgatggcgtcaagaagacctctgatgtagtctgcggaatgaccgtagagtcccgcgaattcaactccgtcgtaacccatatctttgattttgcgaagagcggacgccatatcggcttcaacgctgtctcttaccgaatacaattgaacggctacaggtaatgccataattatacctccgaatatattaaatgtgttaattcagacgtgaaaataacacagaatttccctttttccatattgtaacccaatgcgacggtaaagtcaagagtttttttctgtatttcaggtaaaattgtaacgcaaatcgtcaaacggcataaataaaagcactgaatggtgtaaacacactgccgtaaatcacgaaatattgtgctttttagcaattgacaaatgtgggagaataatctataatctatacaatatccatttgcataaatgaatacggtcatgaaatgaataaagaaaggtatggttttgaagatggcgaaagactttatctcgagcaagatcgcgtatgaaggaatcacattcgacgacgttctcctcattcccgcaaaaagcgacgtcctcccgagcacagtatctctgaaaacgcatctcacaaaaaagatcgagctgaacattcctctgatgagcgcggctatggacacagtaaccgaatacgcgctggctattgctatggcgagagaaggcggtatcggaataatccacaaaaatatgacaatcgagcagcagtgcgaccaggttgaaagagtaaagagaagcgaaaacggcgtaattacagacccgttcttcctccatcccgacaattatgtctatgaagcagacgagcttatgggaaagtataagatttccggtgtgccgatctgtgatgaaaacggagttcttgtcggaatcataacaaaccgcgacctccgcttcatgaccgactacaatgtgccgattaaggatgttatgactaagaaaaaccttatcacagtccccgtcggaacaacgcttgagcaggcgaaggaaattctccgcaagcacaagatagaaaagctccccatagtagacg

SEQ ID NO: 1550 - DNA, 32759 bp, Unknown
  16S sequences of unknown bacteria
aattctgaatttaattttttaggctattatgtccatttgcttgctcaaacccttcgagcaacgcctcctcggcgaagggttcgacgcaggactcctccgcttggagctatgataaagaggtttcgtatactttcggttacggactctcctatctcccgtatgagcagaagctgacgggggtgacggtagaggaccgcgtcggcggcaacgtgacggcgacgatcgaaatcacgaacaacggagacaagagcggcatgttcctcgcgcagctttacgtacagacgccctatacggcgtacgataaagcgaataaggtagaaaagagcgcgattcagttcctgaattcgggaaaggtggaggtcggagcgcacgaaacggagatggtcaccgtcaccattcccacgaagtatctcgcgagctatgactatacgacggcaaagacgtacatactcgacggcggtacgtattattttgcgacgggcaacggtgcgcacgacgctttgaataacattcttgcggcgcagaatcatacgaagggcctgacggacgtcaacggcgaagcgacgacgggaaataaggaatgcgttgcgacgtggaagaacggggacgaaagtgcgacggatacctcgacgtttgcggtctccgattcgggcggaaagattacgaatgtggcggataacgcggacctcaattactatctgccgggcacggtgacatatctttcgcggacggattgggacgccacctatccggtcaattataatacgttcaaaaacggcggcggggtaactcttgcagacagcccgaagaaagacgagtggctgaaagagctccgcaatcagcagcatgttttggcgacggataaccccgtagagaacgtggacggcattccgagcgttaccttccaggatatcggttacgaacagcaaatcaatatcgaagacgaattctgggatcagctcgtcaacgcgatttctctcgatcaggcagtaggcgcggtagcgcacggcggttcccagtcggatactttggataatatcgagaatccggtcgtaaaacagaatgacggtcctacgggctttaacggaaaagctctttcgacgaataacggggagccgggttccgatccttactatgtagatcccgaatcggaagcgggaaaattcaaggcgaacgtaaattctcagacgttgctcggctcgtccttcaatcccgagctggctctcgaatggggcagaattttgggaaatacgggactttggatcaagaattatcagatttggggcggcggactcaattatcatcgttccccgtataacggaagaaataccgaatacctttcggaagacccgatgctgaccaacgtgctcggcacggagctcattaagggaacaaacgaatttggtatcatcaacggcccgaagcacatcggcttcaacgaccaggaatatgaccgttcgggtatctgcgtatacatgaacgagcagaaattccgtgaaacggacctccgcggcttccagggcgcggtggaagaaggcggagcgctggggctcatggtagcgtttaaccgaatcggcgccatcaacgcttcccatcacgtgggaatgttgaagaatctcgtccgcggcgaatggggcttcaaggggctgatttcgacggacatgatgaacaataaatattatttcaatcccgaaggttgtatcatggcgacagtgacgcagatggcggactttgccggagataacagtaccttgggcggcgccggaggaacggacgcgacctggacttatctttcggtagataatgtaaagaacgacgccgaactcgtagatgcggcgagagagtgcatgaagtatcagctctatgcctttgcgaacagcgcggtgctgaacattacgacgacgcccgtagttcccagctgggagaaggcgcttcgcggcgtaatcggaacgacgatagtgctttctgcaggatttgcgacgctttgggcagtgagcctcgtactcggtaaaaagaaggaggaagaataatcatgaacgcgattaaaaaacaaaaactcggaacgtggctgacactcgtcgtcataatcctcggtatcgtaagcgtaattatctactccgtaaacggcagtgtagagggttacttcaaaggaacgaaccaatcttcggtcgtaatcatgtcggttttagcgattgttttcgccgtaatatccattattctcgcgcagttttctgcaaacggcgcggcggggaaaatcctttccgcgattaccgatattctgcgcatagcggcggcggtgcttctcatcgcttcgctcatgggctttgtttccacgagagtagaggggctcggttatattttcggctccgatgaaaacgtgctcgacgaaattcagacggaggaaaatatgcgctccgcctatacggcaatcgcgggcttcgcattctatgcggtaacttggctggtcgcgctcgtcgcatgcttctgtggaatgaccaaagcggcaaaaaagacgaacgcatgacgaagtagaaacttttctgcggccttttccgccgaagtcgactgttcggcggaaaaggagcaaagcgttccgcaatctgagaaaaggagaggcggcagagtatacggcgacctctccttttcataagagcgggcgaggaggacgagagatgttgaaaatagtgaaattcacctgtgaaaatctttctgaggggtgtgtgacggacgaatcgaatccccgtttttccttttcgctttcaagcgacgggcaaggggggcgcttaaagcgcgcgactttgaaaatcaacggcgaaaggatagacgcgacggagcaaatcggcatccgctataaaggcgcgccgctgaaagcgttcacgaaatacacggcgacgctggaagcggaatctgataacggagaccgcgcagacgcctcgctcgaatttgaaacgggccgcatgggtaatccttggaaagcggaatggattacggacggcggctatcgctttacggagaaaaagacgtctcccgtcccgatgcttttccgtaagacgttctcttttgaaaaagagattcgttccgcgaaaatttacgccacggcgatcgggatttacgagctggaattaaacggaaaaaaggtcggcaaggactatttttctcccgggtttacctcctataaatcccatttgcaatatcagacatacgacgtaacggagcagataaaaaaggataacacgctgacggcgacggttgcgggcggctgggcggtaggcgcgttcgtaatgagtcgcaaaaaccgaatcacggcgccccgacaggcatttttggcggagcttcgcgtcgtctgtgcggacggaacggaagcggtgctcggaacggacgaaacttggcaggtgacgcgggaagggcctttgcgcttcgcggaattttacgacggtgaaattttcgacgcgacggttttccccgaaaaaatctcttggacgaacgcctccgccgagcgtttgaaaatccgccccgctttggaagcctcctatggggctcccgtccgcgcccacgaaaccttccgccccgtatccgtcacccgcgcaaagagcggcgaactcatctacgatttcggacagaactttgcgggcgtggtaaaaatcagggtaaaggggaagaagggacagaaaattacggttcgccacgcggaaattctgacctcggaaggagaacttcatacggcgtttctgcgttctgcgaaatgcaggctcgtctatatctgccgcgacggcgagcaggaatattctccccgcatgacctatatgggcttccgttacgcgggcgtgacgggcgtttcggaggagaatatcgagcttagcgcgaccgcgctgtattcggaaattcccgaaacgggtgcgtttgaatgttcggacgaacgaatcaaccgcctgcaaaaaaatatcgtatggagcgggaaatccaatttcgtggatattcccacggactgtccccagcgcgacgagcgcatgggctggacgggcgacatcgcggtatttgcgccgacggcgtgctataatttcagcatggaaagattcttgaacaaatggttgaaagacgtgaagtcggagcagacgaagggcggaggaatccccaataccgtcccgtcacagggttacggttttcccgagaccatgccgaaaaaagcggtggcattctggggcgacgcgtgcgtgttcgtgccgtgggcggagtacatggcttacggggataaagacattctcaaagaaatgtatcccgtcatgaaaaaatacgtcaaggcgtgcctgttttgggcgggactcttttctttcggaaaaaacaaatatatttggaacgatatccccgcgatgcagttcggggattgggtagcgcccgacgtcccgaagatgtcggaatggcaggcgcgctgtaaatggacgggaacggcggcgttggcgcgttcgacgcggctgctttccgaaatcgcgtcgattttgggcaacgcagaggacgcagcgaagtatcggacaatcagcgaaaaggtttccgacgcctattgcagtattttgacggacggcgacggaaaattgaaggaggaatttcagacggcttacgtcctgcccctgtactttaagatgtttcccgattccgttcgtcccaaagcggcgaaaaatctcgtctcgctgatagaaaagaacgattatcggatcggaacgggatttccgggcactccctatatcctgttcgcgctgagcgataacggctatgccgacgtcgcgtataaaatgctggaaaacacgcaatgtccctcgtggctgtacgaggtggaagcgggcgcaacgacggtatgggagcgctgggacggactcgataaagacggaacgtgtccgatcggcgacgacggcacgggcggaatgatttcttataaccattatgcgttcggcgccgtgggcgatttcctgtaccgccgcgtggcaggcatcgaagcgacggagggcggctataaaaaatttcggatagcgccgctcgcgggcggcggactgacgtttgcatcgggcagcgtggaaacgccttacggaaagataacttccgcgtggaggctcacggacggagagtttcatatcgaagcggaggtccctttcggaacggtctgtaccttaaaaatgccctcgggcgcggaacgagtgctggaaagcggtcgctatacgttctcggaacgttactgcgaaaaaaaatgaggtaaataaatggaagatcagacgacaaaaaagagttttttctccaatcccgtgctccgcacgcggattacgtcggcgaacgtgaagccgaaggagatgtttctcggatactttgtggggccgttctgcgcgttgatatccaatgcgattttcggctccttcctgaaccgttattatacggacgtcatcggcatcacccgtcccgaatacggcgcattttcggcgctgtatccgatgatttcggtcatcttcgtcgtcctcggcaatcttttggtcggccagctcatcgagcgcacgagaacgagtcaaggcaaagcgcggccgtggctcctgctttcggctctgctcgtgcctgccgccatctgctttttgtttctggtgcccgtgggctcgtccccgacggcgcagatggcttggatagccgtttcgtacaatctctattatgcggtcgcgtatcccttcttttatacggcgcacagctcccttgtagggctgtccacgcgcaattccaagcataggggcctgcttgccaccttctccaacgcttccggcgtggcggcggtcggtatcggcgcgagtattctcgtcccgctcctgttgcagtccctgctgttcgtggaaggcgcgggcggcggaatcgatacggcggcgagctataataattggcgcatcgtgatgatcgtgctcgtcgttctcacgtttttcgccattctcatcgaatatttctttacgagagaacgcatcaccgaagagaacatgaagctgaatatcaaggaagaaaagattcccatgttgaaacagctcaaagcggtggtcaacgagaaatattggtggtttatcattctgtattttcttttgttccagttcagcggccttttgaagaacagctccatgaccttttattgcaagtggatgctgcaacccgtcagtttgggcggaatgcagctcgaccccatgtttctcctggggctggtaggcggaatccccacggcaatcggaatggtggtggcatggccgattgcggcaaagctgggtaaaaagaacgcggtcgtcggcgggctcgtcatttccgttttgggcggtctcgtcagctttatcgacgtacataatctgtatatcgtctgcgcgggggtggttctgaaaggtatcggctccatacccgccatgtacgtcacgctcgctctcctgtccgacgtcctcgaccatttggaggcgaaaaacggtttcaggagcgacggtttcaccatgtcggtatacggcgccatcatggtcggcctttcggggctcggaaacggaattctgaacgcgcttctctccgcaaacgggtataatgcggagctcgcctcccaacccaaaggagtggaaacggcgctcgtcgtttgctacttggccatggagctcatctgctatgccgtcatcgcggtgttgctttgtttcctgacggtagaaaagcacatcgacgaggaccataaaattatcctcgaacatcagcggcaggcggtgcttgccgcgggcggggaatggatagagcccgccgagcgtttgagaatggaacaggaagaggcagatcgtttggccgacgaagcgcgccgcgcggaactcaaagcgtggtgcgagaagaaagggaaatcctttgaagaggaagaaggcaaatacgaagccgcacaggaagcgaagcgccgccgagcggaggaacgcgccgcagcgaaggcggcgaagaaaaagtaagacagccataaggttgtcggttcgccgcagcggcgaaggcggtcggggacgaataaggctttcgagtttccgtaccggcaaaacaatcaaaaaaataattgcgttcgggttcccgaggtaaaatcccgataccgagcgcgagacactcaggcggcgccgcgtaaaacagcggcgtcgcccgaatgtgcaaagaggggcggcaatatggacaaagaaaaaattatctcgcagatgacgcttgaagaaaaagcggaaatgcttacgggcaaagatttttggtcgacgaaggatttcccgaatttcggaatcaggagcctgtttctttccgacggcccgcacgggctgagaaagcaggccgccgcgagcgaccatttaggactgaatgcgtccattcccgcgacgtgttttcccacggcttcggtcatggcatgttcttgggacgaggagttgggcgaacgaatcggcgaagcgctgggcgaggaagcggctgcgctgaacgtagacgtgttgttgggaccggggctgaatatcaagagaaatcctctctgcggaaggaatttcgagtatttttcggaagatccgtacttggcgggaaagatggcggcggcttacgtgcgcggaatccagagtaaaggggttgcggcgtgcgtgaagcattttgcggcgaataaccgcgagtatcgccgcatgacgagcgattcggtcatagacgaacgcacgcttcgggaaatttatcttcgcggctttgaaatagcggtgaaggaaggtggagcgaaatgcgtaatgtctgcttataataaggtgaacggcgaatttgcgaatgagaacccgcatcttctgaaagagattttgcgggaagactggggctttgacggagtggtggtgacggattggggcggctgtaacgaccgtgtagacggcttgaaatgcggcaacgagctggaaatgcccgcttgtaaatatgcagtcgaggacgtaataacggcggtcgaggaaggccgtatagaggaaagtcttttagaggaaagcatacgtcgccttttggaactttcggaatttactgctcgaaagcaagtcaaggcatacgatgaaagggcacatcacgctcttgcgcgggaagcggcggaaaagagcgccgttcttctcgaaaacgacggtatacttccgctgaaagcggggacgcgcgtggcgctggtcggagattttgcctttctgccgcggtatcagggggcgggatcttcggtggtaaatcctacctttttgtcgacggcggaaaaggtatttgcttctctccatccgtctctttcgtcgtctgtgtcgaagcacgtatcggactcgtctgccgaaattctttcctctcccgattctgtgtcgtcatccgattcggtatcaccttccgtttcgatgtcgtcatccgattcggtatcaccttccgtttcgatgtcgtcatccgattcggcattatcttccgtttcgatgtcgtcatccgattcggtatcctctcccgattctgtgtcgtcatccgattcggtatcatttttcgatttggtatcttcgtccctttcggctcgtccttccctctccgcgccgccgctttctcacgccccttctgtccctttgtccgtcgttgggtgcgaacgcggctttcatcgtttcggaaaaaagagcaagaaacttttccgccgtgccttgcaggtagcgaagaaagcagaagttactctctttttcgcgggattggacgaattttccgaagccgagggcatcgaccgtgcagacatgaagattccgcaaaatcaaatcgagctgttcagagcgttggtcgcggcaggaaataaagtcgtcgtgcttttgcactgcggttcgtccgtggaattggattggacggaaggcgccgcggcggtcttttggcttgggctttcgggacaggcgggtgcggaagcggcgtttcggcttgtcacgggagaagtgaatccttcgggcaaacttgcggagacttggtgggggaagtacgaagattgttccacctcctctcccgatctttttccgggcggagaagatcgcgttgagtacaaagagggactgttcgtgggatatagatccggacggaaagcgaaatatcccttcggatacggtctttcgtacacgaaattcgagtactcgaatttgcgcatttcggacggaaaaattttcttcgtcgtaaaaaacgtcggaagcctttcgggaaaagagattgcgggcatttattacggcaaaaaagacggaaaggtaaaacgcccgaaacgccaattatttgcgtttataaatgtatatcttaaagagggcgaggaaaaagaggtctccgtgccttatgatataagggatttctcctattacgacgtcggcgcggaaaagtggctgacggaggcgggaatctacgatattgaagtgggcgcttcctcagaggacataaggctttgcgggcaattattcatggagggagttacccctacggaaaaggcatgtataaatgtaagttttcctttgtggaaggaagcgaaaaaacggaagggaatgtccattcacgaaaacagtacggtaggggatctccgctatgcaaaaggttgggttggcagagccttttcgggcggaatccgattcgcggttgtcttttgcagggctttcagaatgcgctcgaaggcgaatactttggttatgggcgttttgcatcagcccgtccgagggcttgcaaaattcggcggaatgaacaggaataaaatggaaggactgcttttgatgttcaacggatatttctttaagggaataaagcaatttttcaaaaaagaaaagggcagggtagaggataaatgaaaacgattgaatggaatgacggctggaaatatcggcggataaacgaggaaacttttcgggaggtcattttgcctcacgacgccatgctttcggaagcgcgcggaaattcgtgtgcgagcggcacgcacggggcttggtttgatggacacgactatgagtacgtaaaggaattttctcttttgccggaatggtcggataaaaaagtcatattggaatttgaaggggtatattctcatgcggaggtatacataaacggcaaaaaagtcgcgtatcgtccgtatggcttcacgaatttttatgtccctttggaagagagcggagaaattcgcgtagtggcgcataattccgatcagccgaattgtcgctggtatgcgggagcggggatttaccgtcccgtaaagttgcatattcttcccaaggaaagtttggctctcaacggcgtaaaaattcgtaccgcggactatctgtcccgcgaaatggaagtgctttttatttccgacaaaaattttattttgggttcagaaagcggttgcgttcgtgattcagaggatatttccgcctatcaagaagttctgttctccgtatgcgacggagaaaaaacactgtatgaaggccgaacaaaaatcggggaaaagaccagatttaagattgaaaacgcggagctttggtgtccgtataatccgaaactttatacgcttaaagtcgtatacggtgaagatgaacgcgaaatcccgttcggcattcgtcaagttacggtgagtaggtcggaaggatttacactgaacggagagcggataattcttcgcggcgcgtgtattcacagcgacaacggtcttttgggagccgcggctcatccctttgccgacagacgaaaaatagagcttctgaaagccgtgggatataacgcggtgcgctctgcacacaatccttgttcgaaagcgactttggatgcatgtgaccgattgggaatgttggtgctggatgaatatacggacggttggtatattcataaaacccgtttcgactatgcttcttatatggaagaatggtggcagaaagattttatagatatggtcgataaagattataatcatccttctgtcgtcatgtattcgacgggtaacgaggtttcggaaacggcgcagaaaaaagggatagagcttacgggaagaatgacgcaatatcttcattctttggacgatacgcgtcccgtaacatgcggcatcaatatatttttcaactttctttcttcgctcggtttcggcgtttacagcgacgaaaaagcggaaaaaggagagcatgttggcagtgctttttttaataatatcgcgggaatcttcggagataagacgatgaaaatcggagccacgttgcatggctgcgatgtaaagacaagagaagcctttgcaaaaatggatgtggcgggatacaattacgggattttacgatataaaaaggatttgaaaaagtatcctgagcgcatcattgtcggaagcgaaactttttgtaacgatgcgtacagattctacgagtttgcgaaaaaaaatcccggagtcataggcgatttcgtctgggcgggtatggattatctcggcgaagtgggaatcggcgcatgggaatatgcgagctatgcaaaggatttctcccctcgcgcggggtggatttccgcaggatcgggaaggttagacctcaccggacgacaacttggcgaggctctgtatacccgcgtagccttcggtctggatactatccgcatggcgacagttcccgcaaatgacttcggcaaatctcattcgccttctgcttggaaaatgtctaatgcaagagaaagctgggcttggaatggttgtgaaggaaggaaaactcgcgtggaagtctatgcacgaactccgtttgtggaattaaaattgaacggaaaaacgataggacggaaacgtgtcaatctggaaaaaaattgtctcgtttccttcaaggtaaaatattttcccggagaattgactgcaatcgcttacgaccgatcgggaaaagaacgcggtaggacgtcgttattcagcggtaagggtacgccaagacttcttcttactcccgaaaaaatgtcggtaggaaaggatgaactcgcctatattcgcattcgctatgcagatgaagacgggaaaacgctgccgctgtgccgaggaagggtaaaagtctcggcggagaatggacagctattggctttggggcatgcatgtccctataaccccgatgggtatctcagagaggaaacggatacctactacggggaagccttggctatccttcgcccttcggcatcgggagaaaaaatcagaatttctgtttcaagtccgtttggaaaagctcaaacgattgtggaagtattataatcatttgtcgaaattcattcgtattacaaataaagctcttcggaattttccgaagggctttttcgctatcttgtaggaaaacagtattaaaaaaactttttatatgaaaaatagtatttgattaaatattaataaaatagagagtgcttaataaaaaattttgaaagatttatagggacataactaatgagctttactttcttcggaaaaaagtgtataataaatttcagaatcaaagggaggaggatgaaaatggtaaaagatcatgagtctgaggaaatgtatctcgaaaccattcttcgattgaaaagtacaaagccgaatttgagatcggtggatattgtggaggcgctgggatacgcaaagtcaagcgtttcttctgcggtcaataagctcgttagaaaaggttatatttccataaataataacggggagatttctctaacggaaagtggaaagcaaaaagccgacgccgtttatgaacgccaccgcatcattactgcgctctttataaaattgggggcagagcctcaatcggctgaacaaaatgcttgtcgtgtcgagcatgttcttacggaggatgtttttgaactcataaaacaatacgtcgggaaaagcgagtgaggataatgtttattttaaccttttcctaaaaggcggagttgaaaatcgactccgtcttttcaaaaattttgtttggttaaacaaacaaaaaaggaagggcaaataaaaaaagtttaattttcgcattttcgacctcaaagatgattgaattttttatgccttttatggtataatattcataagtaggataaagcggaaaccccgtggaaaatatccgatttatttacaggaaaaaaggctttcgggggcgtccgaaaagttttcggcaaaataaaaagaaagccgcggaggtgataagatgttagaggaattgaaggtgcgtgtgtttcaagagaccatgaagctcgtgaaatacggattggtgggcttgacgaggggaaatgtgagcgggatagaccaagaaaagggattgatggtcattactcccagcggagtaccttacgaggaaatgaaggcggaagatatggtcgtcgtcgatatgatagacggcagagttgcagagggcggaaagccttccggagatactcccactcatttacatttatatcggacattcccggagcttggcggtatcgtacatatacattccctcaatgcgactgtttgggctcaggcggggaaagggatacctccttatggtgtcattcatgctgacgcattttgcggtgaaattccgtgcacgagaggattgacggaaaaagaatgtaaaaattcgtatgaactgaatgtcggaaaactgatagaagaaacgttcaatcagcgggattatatcgagattcccggcgtattggtcaaaagtcatggggcggtcacctggggagattgtgtggaaagagctgctgaaaacgctatggctttggaagccgcggcggaaatagctataaaaatgaagtcgatcgattccgaggtttcggagatagaagcctttttacttgaaaagcgctatatgaaaaaacatggcaagcggacaaatcgcaacagcagaaaataaagtttgaaggacagagcaacaaagtcagtcgaaatttttcgactgactttgtttatgaagaacaagacagcggcttgttttctactgccttgtaaactttacagactatgccggtggcctgtgaaagagagctgacttcaagtgctattactatacaaaaagtttctttgtgccaaacggaatactgtacataagcaagtataaaggagtacaatcggcggttaaaggcggtcggcaacggttaaatcaaaaaaaatgaaaactgtgtgaaaattgcgtgaaagtagttgacaactcaaaaagttagtgataagataaaatcgcaatacagaagaattgttgtttggcttagagcaagaagtttgcaaatgatttgtaaatgactcaaagagtaagtacgtaaagacccgatcgaccgataagtgtagattcgggtaaaaaattacgagccgttaacgataacaattgcagaaatccataaattaatgagataagggagggatgaaaaaaacagggcggcgggagccgtcaaaggtgcagtggaacatgaaaaaggtgagagtgaccatgagagatgtagcgcgtgcagcgaatgtaacgccgcaaacagtatctcgagcaattcgtaatgcccccgaagtttcggctgaaacgagggagaaggtactgaaagttgctgcggagttgaactatgtgaaaaacaattctgcaagttcgctccgttgcgggaacagcaagctgatcgttatcatctatgatcatctcgtcaacgtatatttctctattatgattgattatttgcaagcgtgtttcagggaacgggattattctattttgatgatgtccgtaaccaaacaccgacttgaccggtcggattacgagtttgcggtatcgcacaatgtcgcgggaattatcagttttctcgaacccggcgaagaagtgacggaaatgttggatagttttgtcgtaccgatacttcttttcggcagacggacagacgtcaaatcgatcgattatatttgtatggatgacgaaaagggaggcagattggctgcgcggcgttttctcgaaaagggatgtaagcgttccgtttacgtgagtgtcggaacagcctcctgtacatacgaccgttttatgggcttcaaaaaagaatttgaaaacgcgggtgcgccgtcccccgttctcttggattccatggacaatttcgaggaaaaatttttcgcgctgtttgagaatccggaaacgagacccgattcgttcttttgtttcagcgatatgatcgcgtttgacatcgtttatcgtttggaaagagcggggattgagaatatacaggttatcggcttcgacgatattcaaaaagaaatacggattccccgtcgtctcgtttccgtcggaacggataaacgcgcaatggccgagcgggccgtaaatgttctcgtttcccgcatagaaaagggtcgagaaccccgagtgacggatactttcgacgtatatttggacgaaaattttatatcctgaatttcaaaaagaattttttatcattcttaatatttctgttttatatcgttaacgttaacgatataaaaaattaaaattgtataagttgccccaaaagacctaggtcttttgttaattcaaggttttgaattaacaaaagacctaggtcttttgttaattcaaggttttgaattaacaaaaaaacttatcgagcaatcgccgcgggaaacgaaaaaaatacggttttcgggaaggtgcgccgaaaggtaatataaaaagtgaaaggtcggggataaaaatcaaaaaaacgaggaggaacgggaaaaatggtatgatttagtataaaaatattttttatgtgagttcgtaactttgtagattccgttcgatcggaacgtaaattttaggaaaaaaggaatgaaaattccaaataaataaaaaactatgattcaggaggcaattatgaaaaagacactgaaattcgtatgttcttccgtgctcacgctgtgtttggcagcgggtgttcttgccggatgcggcgagaaaactaacgacagcgaagaaaattccgagttcacctggtcgggaatgaccgacgcaacagtagtggcgggaactccgtttgatttattggacggcgttaaagtcacaaatgcggcgggagaggatatttcatcgtcggtcacggtactcactcttgacgaaaacgaagccgaattgaccgaattggatatatatgatgattatgacgatttcgattatcatattacgggcgtttataccgtttattacatggccgtcgatgacggagtaaaggattttgaatcccgggaaattacggtagaacagcagtacaatctttccaacggtgattttgccgtggagagcaacgacgggttctacggctggcagctcgatattccgggcggaaaggcgacgatggaaaaagtgacggaaaacggggtgaaaaagcctaagttcaacatcacgggcttggggaatgcgtggtattcgatgcaatacatgtcttccgtcaacctgcttgaaggagaaacctataaaattaccgtaaacgccaagtccgatagcggaaaatccgtttctttcggatttgaaaatccttccacgaactattcgatgatgcaggggcttacgccttataagttgagctccgaatatgcagattatgtcagctactatacggcggataaagattataccaatgccaaagcggtgctttatttcggatatattttggaagaggatacgacgaaagcctatgacgtgaccattaacagcatcaagattgaaaaagtgcaaagatgcggcgaggtgacgtttgaagggctcgacagcgttacgtattatgcggaatccgaagagcttaaagagtttatagcaaatcccaaggcgggtgtgacggcgaagagcggagataccgatcttaccgatcggatcactgtgatgggacaggtttccgaacaaatcatggagggtacaaactatacccttgcttatgtggtcgaaaacgaaaacgggccttcggctatcggttatcgttcgatcagagtgcgtttgcagaaggaacatccttacagtttaagcaacgggacgttcgacaacgatatcaaatattggactcaggacgtcaacgcacaaaatcccggcaaagcgacgtttgaatgggtagaaggcgatgaaaaagaaggtgcggcaaagatcaccattgaaaatccttcgaccgacggatggcatattcagttccgccaagacgtctccatggaaaagaacaccaattatatcatcaaaatccgcgcaaaggcgagccgcaaccgttcaatgaatctcgaacttaacgcgggaaccaattattcttatgcaatcgatctgaccacggaatataccgtaacggaaatttattattccgcgcccaataacacgacgggcttccgtttcctgctcggcggaggaggatcggaaaacaacgggagcgtcatttggatcgattatgcggaaattacgctcgaccccgacacgacgaaatacgagggctggcagttgaagaactctgactttgaatacggcatgagacattggggctcggaaggttcttcattcgtagaaggctcggacgataacggcacttatgtttccacgacttttgcggaggatacgggcgccgattggaatattcagcttcgccaggacggaaaacagtttgaagcaggcaagacctataaattgattgtgaaagcatcgtccacggtagacagaaatatcaaggtggaaatcaatccaaatcaggattcctccaagggtaaaaatacgacgtttgcattgaccgaagaagtaaagacgtttgaatttgaattttcgttcgatgaagctgcgagcggaacgcgcgtcggaatgttgctcggcggcagcggaatcaagggttccacggtcaaaatttaccagttcgagatcgtggaagtttcggcggacgcttaacgccgatgcggaaaaaaggacgcataacaatgaaaaaaatagttggtatattgctgacggttatcatgttgacggcgggcttcggggggtgcggcgaaagcgcaccttcccaaagctccgaaagctcgggaaatacgcagacggagtacgataatcccgtctacgaaccggtattcgccgatccttgcatcatcgaatacgagggcaaatattacgcttatgcgacggaagactacgggcagtggaagccgagcgacgatccgctcgaaaatatatcgaataagcagatcgtacccattctcgaatcggatgacctcgtgcattggtatttcaaaaacgccgcgttcaccgcacgggaaaaacccgattggggtacctacggtgcaaatgtctgggctcccgacgtcgtaaaaatcggggatacgttcgtcatgtattatgctctgtcggtatggggagattccgatcccggaatcggcatagcgaccgcgcctcatcctttggggccttggacggatcagggaaaactgttcaagtccagcgaaatcggcgtgaacaattccatcgatcctgccgtgtttcctgatcaggaaggaaattactacatgatttggggtagtttccgcggtctgtacggagtgcggttgacggatgacggattgggattggaaggcggtttagaaaacgcgaaggcgaataagacgctcgtcgcgggactggatacgagtacggcgtttaatattgccacgtatgaggcaccctatatcgtgtataaagacggatattattatatgttcgtatccagcggttcctgctgtgagggcttgaattccacttatcatgtgcgcgtggcaagatccaagcagccgctcggcccgtacgttgacgacgaaggcagggatatgctcggagaaaaccgtggggcgatcgttttgcaggcgagcgatgatttcgtcggagtcgggcataatgccgtcattcaggacgacgcggggaattggtatatcgtctatcacggattcgatacagaagaaccgggcacttacggaaattctaaccgcagatcgttgctcatagataaattggaatgggacggggaattcccgcagaccaaggataaaatcgcgggcaagagcggaatgccgcttcccgtcattaaatagtatccgaaatccgaaaaaaactttccgcggcggattcctgccgcggaagaaattgcgctatcaaatttatagacagagaggtttattttatgaaaaagaaatttttgacaggtttaatttccgttttgttggctggaaccatgtcgttgggcttcgctgcctgcggaggcgggggaggcgatgacggcgacgattccgcttcgggaggcaccgtatccctcaaactttggacacccatcacgggagccgatttgacggtgtttgaacgcatgatcacgaagttcaatcaagaatatgagggacaaattcatatagaccaccattcggatgtacgcgacacgcattacaataatcttaaaaataacattcccaataacgggccggatcttgcgattatccacagtcagctcgtcaaaaactatgcggtgaacgactacatcgttcccatcgacgagagtttctttaccaaggaaacgatcaatcccgacgattatcagcagaatgtcatgtccacccttatcgcgggcgaaaattcttattacgggttcccccttgacattcatccgattgtcctgtattacaacaaagaaatcgtaggcgataacccgttgcccaccagttattccgaattgatgactcttgctcagaaacttacgggcggagacgtatgggggcttcctatttccacgctttggccgaccgaattcacttataccaccgcgctttatcaggcaggaggagaagaaatagatacggagaccagtcagcccaagttcaattcggaggccggggcggaagctgcggaaaatttgcgcgatatcatctataagtataaagtttcccccgcaaatttacagacggacgccgatcttcagctcttcacttccggaaaagcggcgtttcatattcagggttgctggcagctgcttgcgcttgaagatgcgcttggagacgacctcggagtgatgagtctttccggattgcttacggataaaaaggacggaaattatcgtcaggttatggcgcgttcgcacgtatttaccgtagcgagacaaaagcgaaacatcagtcagcgcaagaaagaagcgatggttacttttatcaaatggatgggcgaaaactccgccgaatggtcgaacgcgggacaaattcccgcattcaacgccgcgcgcgaaacggacgcgttcaaaaatgcgccttatgtcaacgatttcggcgatccttccgtattccgtaccgcggcttccgctgcatatttcgaatcgggatatgaaaccgtgttccagtatgtgacgactattatgacgagtgcaacctccaacattgccgaacagcttaaaaaggcggaagaggaggccaagagagccgttaataccgaaatgaacggttaattgcgggcatttttcagaggtggcgaacatgaatgaaaaaaacacggatacgtccggaaaaaccgttctcaggaagctgaaactcttcaaacggcaatttcacggctttctgttcgcggtgcctttccttgtgatttttgccatatttttcatctatccctttttcagcgggattatacagagctttctcaataaacgcggggaattcgtcggcttccaaaattataaaaacattttattcagtcaagacttcacctatcgcacggactttttccgcggactgaaaaatacattgatatttgtcgtattttctgtccctttgctcatcgtcattccgctctttatcgctattttgattgacattcaacccaagggatataagtttttccgcgctttgctgttcatgccgacggtattttctatttcctcggtcattctcatgtggaagcgcgtgcttgaagtggaaacaggcttcattaacggcgttttgaaatttcttaatttgagtcagataaattttttgggctctcagccatgggcgtggatttctttactgctcgtcaccgtatggtggacgatgggtacgaatatcgtcattctcggcgcgggactgaaaaatatcgataaatccgtatatgaggccgcatcgattgacggcgcatcatatatcagaacagtgttctcgattacgcttccgctgttggtcggacagcttatcgtcgtattgatcatgaccctgctcgcttcgttcaacgtatacggacagcctgctctgttgacgtcgggaggccccgaacggagcacacaggtacttctcatggtcattctcgacaacttgtacgaccggccttacgttgcggcagcgatgtctctcatgctcggagcggttatgatcgtaatcagtttggcacaggcggctattatgcgtaggaggagggattgatatgacgacggcgaaagcgaaaatgaagacaaaattcaatatgggcgaacgtcgccgcaaactcatagcatttatcttactgacaatcatcagcattttctgcgtgctgcctcttttatgggcgttcggtacctcgttcaagaaaaatgcgctgaccgatgtcgcttcgattatcccgaaagaatttacttttaacaattatgtgcagctcttctccaataaagatgcgcccgtttttcgttggatgttaaacagtgtgtttatttccagcgtacacacgatactgtatctgatcgtcgccgcgctggcgggctttgctttcggcgtggcggagtggaaagggcgcaacgtcgtattcggattgctgctcgcgacggcgctgatccccaatgtcatcaacctcgttcctctctataagctcattaccaatatggaacttaacggcaatgctttggccctcattctccccggattgggcggagtattgtatatgatgctgattcgtcaatatttcctctctgtccccaaagaactcgttgaagcggctcaattggagggagcgggaatgttcagaatttttttgcagatcgaagttccgctctgtaagtctgtgtttatggtcgcggcgatgatgacttttatcggaaactggaacgattacctgtggccgtcgattgctatggccggcgtagagagtaagtatcttacccttccgctcggcattgcgaaactgcttggcgataacaacattcagtacggcatgaccatggcgggcgccgtgacgtctatgcttcccacgctcatcgtatacctgttcctgcaaaacaaggttatagagagcgtcgcaaacagcggttcaaaatcttaatgtgtttaatttatcggagaaattgactttatgaatctcaaaaacattactgtaacggatgttaccaatatcggtgatccctttgtcctgcgtgtaggcaataagtactatctctatgcaacttgtttcaagagcgggttcgattatcgcacctctaccgacctcgttcattggtccgctcccgaaaaagcgtatacgccgggcgaacggagcttcggctacactgatttttgggcgcccgaagtcgtcgaacacaacgggcggtatcttatgcattataccgcccgccgaaagggcgacgacactttgctgatcggagtggctgccgccgaccgtccggaagggccgtttgtcgatgttttcgacggaccgatgtttgatttcggatatgccgcgatcgacggacacgtgttccgtgacggaaaagacaattatcttttttattcgagagactgttcgcagaatgttgtcgaaggcagacgggaaagccatatttatgccgtgcgtctcgacgaatcgcttacgcacacgcagggagatcccgtactcatctccaagcccgattgtccatgggaaaccgtaacgggcgatacgcgttggaacgagggcgcgtttgtcgtaaaacacgacggaatttattatttgatgtattcgtcgggattttatgcctctccgacctattcgctcggctatgccgtttcggacaacgtactcggcccttataaaaaatctgcggacaatccgttgcttcattcggaaggaaatctcagcggtcccggacacaacagcgtcgtagttgccgaggacggaacaaactattgtgtgtttcacgtccataccgatcccgcccatcccggcgagaacaggcgcatgtgcttttgtcccataacattcgacaaagggattatccgtcagctttgagcggcacggcgctgctccgttcgatatatagaaggagtattattatgaaaaaacattttttgggacgtattttttgttttctgtgcgccgcagtgttttgtcttgctgggtgttccggcggcgcagctgattccggagacgtttccgaatcttcggaaccagaaccggaacctgtttatgttaccaatccccttaccgattatgatacggcggatcctcatattctgcgttgggaagactccctttacatctattcgacaggcggaaagatttctcgctccgacgacggaattacttggaaagaagtcggaaatgtaggcatttctccgtcttggggaacgcccggcgcgggcttttgggcgcccgatatcgtacgtatcggagataaacttttactgtattattccttgtccacctggggggattcaaatcccggcataggcgtcgcttccgcggagcatccggaagggccttggacggatcacggaaaattgtttacctctcaggagatcggcgtcaacaattccattgatccttgtgtttttgtcggtcaggacgagaaagtatacatgatttggggcagcttttacggctgtttcgggatcgaattgacggaggacggactcggggtaaaaaacggattggattatgccagggaaaacaaagtgctcgtcgcgggcgcggcgggttcgtcttgggacggatccatgtttgaaggttcgtacgtcattttcagagacggttggtactattatttcggttccagcggaacctgttgcgaggaactgagaagtacttatcatgtccgcatcggacgctcgaaaaatcctctcggaccgtatgtggattcgcgcggaagagaacttgccggcgcgggaaacgtgggggacacgattcttgcggggtcgggaaatttcgtggggccgggacataattccgtgcttgtcgacgatctcggatattattatatcgtctatcatgtttgggtgaacgacaacggagagggcaagggaagatatcttgcgatgtcccgtttggactggacagaggacggttggtgcgaagtcaaagggaatgcaccgagcaaacgcgttatcgctccctatatcgataagtcaaaataaaattaaaaattttttagtgctcgatttagagacagggcgtccgtctatttgaacgggcgccctgtctctaacaaagaatttttatcgtaatgtttgaagtttattatataataaaatttatataaaagatatcgtggaaggcaataaaattcaaagagagaacttcgggaacaagattatgacagaggaaacaatcatttgtgacaaagcaagaagccaaagagttaagaggagcgaggcggaggagaaattatagagcaaataaaggatagtagagaacaagatgaaaacagacaagagggaaatttcgataagaaagctttttcgtgaaaaaatcaatttaagcggagaattttttctctttctataaaagcttgataaaagaaataagttgaattaagttgacattttattttttttgatgtaaaatgaaataaaatttcaaaatggaagaggatatgttcaaagaattttattttcttgggaaatatacggaattaaaaagttcaaaatttatttttgataaagaaatagaagcggatggatttagggtatcaatagcggaggacggaagcgttgtagggcgatattctgatgagcggggaaaggagtatatgtttcgagcaatgaaaactttgacgcggagaggaaaatatcccatttgtcaatgcggcgattggccctccttttcgatgcgtggagtcgtggaagggttttatggaaaaccttatagttggacgcagcggttgtccctgatgaaatatttatctgaattaaagatgaatacatatatttatgctcccaaaggggacgaatttcatcgggataaatggcgaatttcttatccctcctcggaaatggaaaacttaaaaaaattagctgtggaagccgaaagaaacaatatagctttctattacgctctttctcctggaaaggattttgattttgccgaaaaggtggattttcaggcggctttatctaaattagaagaaatacgacagttagggatagagcattttgctctacttatggacgatatcgatccgacgttgtctccggcggcggagaaaaaattcaaaacgccggcaggtgcgcatgcggcgcttgccaattatatctacgagcatttgcggcctcaatcaccgcttctattttgtcctaccgactatatgcaaaatttcgatacgccataccgaaccgttttaagaggagctctaaacgaagaaatttccgtgttttggacaggatataatacggtagcggaggcggtgacagacggggacggagaagcggctgctgcgtctttcggaaggaagtgcgttctctgggacaattatcccgtcaatgattttcagcccaaacgacggatttatttgggagctatacaaaatcgcggtcgatatttacctcgtacgcatacgggatatattgctaatttatccgaattatacgaatgtagcaaaatccctttatctacgatggcagagtatgcttgggattcggagaactacgaggcgaaaaaagctctggataaagtagtagggacatatttcaaggggtgcgtcaaggcggggaaaatttttaccgcattgaatgggaacaatgtcatgtgtcgagaggaaaaagtacgtttcgccgtagaaaaagaggattttctttttttagacaagcattaccgtaaagtaaacgagagtataaaaattttgaggaaaaaagctccggtcgcctttttagaagaggcaaaagcgttgttgaattatgcggaaaatgaatgtgaattatatttttcttttcgacgcggggaggacatttcgcggtttgaaaaggtgcttggagaaagtaagtattcgacggcagatttttctcttttacgctattttaacgagaaaaaaggtactcatttccgcattgatgaggaacggaaaatatataggaaaataggagaagataaatggtaggaaaagtagtttctataacgaatgatgaaaatataaaattacaatcttaaagacttcgactgaaaaatatatcggaaaagaaaaaaattatctgttgtgataaggataataccgaagatctattgcggaatagatttcggcgctcgattgcggcaatattcggcaaagaaactaacggccgaggcatgataaaagtgattatttagatatataaaaaacgggctttgggtagaataaggcacaaatgggaacatgggttggtttcctaaaattaattttaggaaatacttgtggcagaaaattgaggaaatgcttatggtaaataaaaaacaactggacagattgactttaaaaatatcccgtctcctcgacgtatatagtgagtatctcgtcatagagggcgaggaacaggaggtgcttttggacggcgagagaatccgtttgggagaacgctggggaaaagaatttggatatgggaattttacctttcggtatcggcggagattgaaaaatccctatttattcgtcaatgacggaggcgtagaacatcttgtcaaagcagacgggaagcctttcggtatgattgattggctggaacagggaaaggatgcaatatttcgctgtcataagtatgtgtctttgacggatattcccgacggggcggagattacgattgaagcgtatgcctctcataccttttacggcactatgcccttcgagaaaaagcagaccttttccgtcgccggctatatgccggaacggatatataagggaatctttgtcgtagagattgacgaagaattaaaagtattcttgtccgatttgcggttgttctgctcttattttcgaagtatggacgaaggggacgtcaataaggcggacgcctatgagctatttgaacaactattttctattctctctccggagccgggtgttcgcccggaagcggaagacatacgggcggcagataaattattaaaagaatatttcaataaattggcgggaggaaaccggaaaaatctgccttatgtcggcgtcgtgggacacagccatttagataccgcttggttgtggacgatggaggaaactcgtcgcaaagccgcgagaacggttgcgaacgccatcacgttgttaaaaagatatcccgattaccgctttattatgtcctctgcgctacatctcgattggataaagaccgattatccggaagtgtttcaagaagtacaggcgttgacgagtacggggcgttttgagccgaatggcgctgcttgggttgaatgcgattgcaatataacggacggtgagtcgttgattcggcaattcttaaagggaaaaacttttttgagagaaaatttgcattttgaatccgatgtcttttggctgcccgatacgttcgggtacagtgcggctctgccacagattatgaaggggtgcggcgtaccctattttctcacaacaaagttaagctggaacgataccaataaatttccttacgaatctttccgctggaaggggattgacggcagcgaagtgattgtgcatttcaataccattcaaagccgctccgatcccgaatttatcgcttcccgattggaaaagcgacagaataagcatttgacaaaaaatgtattgattgcttatggttacggcgacgggggcggaggacccgacgcggatatggtggcggaggctttgacgacggaacaaacctatccgtatgccgaagtgaaacatacctccgtttccgattttatgaaaaaattggaagaggaagaacagcttcctttatatgaaggagagctgtatctcgaactccaccgtggaactttgacgaccaatagtgaggtgaaacgactcaatcgacgtttggagggggctctgaaggattgggaaatcctcagtgtgggaacgggaaaaaaagagctcctccctgtcatagaaaacggctgggcaacactgatgacaaaccaatttcacgatattttgcccggtacatgtatccgagaagttaatgaggacgccgtaaaacgtaatgccgaagccttgaatatgctggattcgctttgcgatggcaggggagaatactttaatactttgagctttgctcgaacggaaattcttccttccgaaagcggcgtccagatatatgaggacgttgagggaaagaagatagcactcgatgtttttgattttgccccttattcctatggagtaaagagaaggtgcgagacctcgcccttttccttcgacggagaaaatatttgtacgcccttttgtaccgcccgcataaagcgcggaaagctcctttctttggtctttaacggtagagagtttgcgtccggaacgttaaacgatattcggctttataaagatgttccttatctttgggataattgggatatcgatgcagattatactcaaaaagtttgtcccgtcgaggcgggggaaagccgattaatttcctctggacctctccaattaagacttcgtacagagtattctctcgcaggaaaaagccaattgacgcaggatattgtttttaatgccttttctccgacgatcatgtttgagaacgtggtcgattgggaggacgagcacaagctccttcgcgcagaatttgagacaaatctttcagcttcgagttatcgtagcgaaattcaattcggatatatcgagcgctccacgacgaggaatacgagtgaagaacaggcaaaatatgaggtctgcaatcataaatggacggatttatcagaaccgggcggggggctttcccttctgaacgattgcaaatacggcgtcagcgtcgaaagaggaaaaataggcctttctttaatcaagagcggcaaacggccggatattatcggtgaacgcggtatcagaaaattttcctatgcacttctgcctcataaaggaggcttttccgccgaaacgacgattttgcccgcatatacgcttaaccgtcgcccgataaagtacccgcagggcgtatgcgtgcccgtcgtcggtgtttccgagccgaacgtcattgtcgaagcgataaagtttgcggaaaggggaaaggggataatccttcgtctctatgaatgcgaacgctcgttgacagaatgtgttctccgcttgtcggaggatttcaacgtttatcaatgcgatatgttggaggaaaatcccatatttctcggcaagggaaaaaatatacggttacattttagacaatttgaaattaaaacactgctgattgaccgctgaaatttaccgccgcagggaaagcctgcgacggttttcttttttatcgttttgaaaaaatttttatttttcatagaattaagaaaataaaaatttttttcattttatataaaaattttgaaataagtattgacattgagattttcttatgatataatatgaacaaattcaaagaaagtcgagtgaaagaaaatgttgaacagaggacttattgtatcctgtcaggcctgtgtaaacgaaccgctatacggatacggcataatgccgattatggccaaggccgctgtcgagggcggagctgtgggaatccgtgcattatatgatgacgtagacgccataaaaaaggtcgtcaatgtaccggtaatcgggcttgtcaagcggaattatcaaaattgtgcagtgtatatcacgcctacggaaaaggaagtggatttagtgctcgccacgcgggcagattgtttggccatagatgccacttcccgacctcgtccgggcggaattatgctaaaagatttggtcgcctacgtacgggcgaaaaagccggatgtagagttgatggccgacgtagatactctggaaaatgcgatacgggccgaagaaatcggattcgattacatatctacaacgcttaggggatatacggaggaaacaaggggaattcagcttcccgatatcgatttcttggccgaagtgattaagcgagtgaaaaggtccaaagtaatcgccgaaggaggaatttttgaaacgggggaattggaaaaaatcagccgtatcaatccttatgctgttgtgatagggtctgctgtcactcggccggcggtaattacgaaccgatttgtaaaagcgttaagattgggcgaacgagtatgaaaaaaattgtaattcttccgctggatgagcgaccgtgtaattataatttcccgctgtttttgagcgagggaaattcccgctatgttttggcggcgcccccgcgagaaatgatgggcaagaaaaaaatccccgggaattatagcgctttgaaggagttcctccaaagggagtgcagtgacgcatatggtttaattttatcggtagatgctctcttgtacggcggaatcgttccttcgagattgcacggattatccgaggaacagctcacggagagactgtcggtcatagaagagctcaaaaggaaaaatcccgatttgaaaatctatgccttcgccctgttgatgcgatgtccgtcctattccagctccgatgaggagcccgattattacgccgaatgcggacgggaaatttttctgacggggcaggcggaacataaatacatcgacgggttactcgataaaaaagagtatatccggcaaagagaggctctcgacagaataacgggagatgctctgaaagattatctttctcgcagaaaagttaatttgcggcttttggaaaagaccttgatgctggttggaggggcaatcgataaattgattattccgcaagacgattcggcgccttacgggtatacggctctcgaccagcgaaaaataaagagctttatcgcggaaaatcaaatacgaaaagtcgccatctatccgggcgcggacgaaacgggaatgactctcttggctgcactcgtctcggacatggaggagaaaaggcctgtaatctgtcccatatatccaaaagaagaatgtaaaggagtcattcctctttatgaggacagagctgttgaacagagcataagggctcaaatagaaggcgcgggagcgattatgtcggaaaactcggataccgcggatattctattattttgtaacctgccggcgggaaatatgaaaaatgcttcagagtacggcggctcggattacgatagcagagatttgccccgatttacggaagaaatgaaaaaaggtttttgcgaggggaaaattgtcgcggcggcagacctcgcttactgcaacggcggcgacgccgaatgggcggaattgctggataagagcgtaggactgttcgagctgggcggctatgcgggctggaatacctcctcaaacagcctcggtacagtcatctgtcaatccgtgctgcgttttttatacgggaacggcgacgcattaaaagcctttacggcagagagaatatacgaggatgtaggatattgcgcatatgtacgcaaacgcatgtgcgacgaggttttgccgaaaatggggctggattattttcacgtcgacggcgtcagaggcgaggtgagccgcgccgtcaaaaagatgttggaagattatataaaaaaacgttttcccgacgtttgggagaactatgaaataaccgactgcgcaatgccatggaacagaatgtttgaagtggagttgcgagtggaaaaaagactgaaataaggagaagaaaatggtaaacaaaaggtttctcgtttggacagcggctatctgtgcggcggtatcgatcgccgcaggtacggcagttttgaacagcgttcccgccgtggcggaacagggagatttttccgtagagggcatcaaggtatcgaacggcagcgtctccgtggagaatgtgacctccgacccgtatatttacatagacgaggcttcgggcggcagtttgacgaacgcgagcgaaaagctggataccgaaaagctcgaaagccagcagccactgttatttactgcaaaatatccctatacgacgacgcacagggtcgggaattacatagaatacgccgtggaatattccgaaaataaatattccgtgacggaaattaatgccgcgggcgacggagaaacctatattcccgtcggcggatatgtactttctgtgccggagtcctcctcctttacggcgaaagagggagatgtactcacgttggagggaaaggttacgcttcccgaaatggcagtggaatcagacaagggcgcccgcgtcgctatcgacgcgctcaacagtaaccgctccatgcctatggtcgtgtattacgactatgatttcggggataagacgggcactaacgcttacggtaccgaattatccgctatattcgacgaggagagcgcttccttcgaggtcgtgtccttccgaggcttcggcgtgggggacggctcgggaatagaaattcccgaaaacgggtttgtactgagcgcgtacggcgtcggttaccgcggtatctttttagaaaataaccgtttcagtctcggagataagctgacgatggtcggattcgattatatccgcttcggcggcgaccccgtcacttatacttacaactacgactattacgacgagaacgacccgaacgacgcttgccataccaatcccggccgcatggagacggaaacgactcccttcgccgcttatcgggg

SEQ ID NO: 1551 - DNA, 27505 bp, Unknown
  16S sequences of unknown bacteria
tcagccccggcacgcagacggtcttccccgccccctgatacagtccgcccttgaggaagttcggcagatgcaggttggtcagcagcatcgctcccgcctggatccagccccggaagcgggacagtacctgagatacgccgcgttttttcttatccaatgcccacacactccagacataatttgattgctttgctcagcaccgtcgctgcctcgccccgccagacaccgaagcacagcatggcggctcccgctgccagcaggatcacctgggccgccgccttttttacatggctcatttttctcaccctttccgattttctgcccctatcatagcgcaggggagttaaagtccctgttaagaagaaaaatttaacacaaaccttatctgtttttgctataattaagaacaacgaaaacatgaagaaatgtaaaaggagggctctcatgcaccttttggttattgaagacgaacgcgccttgtgcgaaaccatcgtccgcagcctgcggcggctggcctacagcgtggactactgctacgacggggagaaggctctggagctgctgggcgtggagcgctacgatctggtaattctcgacctgaacctgccggggaaggacggcatgacggtgctgcgaaccctgcggcagactgaccgggatacgcgggtgctgatcctctccgcccgcagcgaggtggaggacaaggtccaggggctggacgccggggccaacgattatctggcaaagccctttcatctggcggagctggaggcccgcatccgcagcctgaccctgcggcagtttacgcagcagggcgtactgctgacctgcggaggtctgcgttttgacacccgctcccgcaccgccgccgtcaacgggcagacgctgacgctgacccgcaaggagacggggattttagaatatctgatggtgcatcaggggcggccggtaagtcaggaggagctgatggagcacgtttgggacaacagcgtggacagcttcagcaactccatccgggtgcatatttccgccctgcgcaaaaagctccgcgccgcgctgggctacgatcccatccgcaaccgcatcggcgagggctatctgatgggaggcgatgaggcgtgaaaaagatttccctgcagtggcgcatcacgctgatgactgttctgctcatcggcgttacctgcgtggctatgaatctgctgctctgctcctccggcgtgtactatatggacaaaattgcggacgccctgcagggcagcggcacggtgatcctgaatgagggcgaagcagcgagctttgacccgcagctcatagcgcccaacgaggagctgaccatcgtcgtcaatggggcgcagggacgcttccgcaccaccaactggtatatcacggcggcggtgacgatcctgagcggcattcttgcttacttcgtcagcggacgcgctctcaagcccctgcgcagctttgcttcgcaggtggagaaggtgcagctgaacaatctggcggatatgaggatcgacgaagatgtgcttccggagttcaggcagctcagccgctccttcaatcagatgctggagcggctgaacaacgcctttgccgcccagcggcagttcaccggcaatgccgcccacgagctgcgcacgccgctggcgctgatgcaggcgcagctggagctgttttccgcagagcatcccgatgtgcggccggagactgcggagtttctcaccctcctgcgcgagcagacggagcggctgacacagatgaccaagacgctgctggagatgagcaatttgcagcaggtggcgcggaacgagcagctccagctcgcccccatggtcgaggagatcttcacggatcttgcgccgctggcggagcagcgaagcatctcgctggaagcggagggcgacgccgctctcaccggcagcgacgcgctgatctatcgtctgctctttaacctgacggagaacgccgtcaaatacaaccggccgggcggctcggtacgggtcgagcttgcgcaggggcaggaaaagtgcatcattcgcgtttccgacaccggctgcggcattccggaggagtatcagcgcagtatcttccagcccttcttccgggtggacaaatcccgcagccgggaatacggcggcgcgggactgggactttctctggtgtgggagatcgccgatctccacggcggctccgtttgggtggaggaaagctcggacaagggcacgaccatcgcggtggagctgccggcagggacagaaagtgatccctccggcgcggatatcacataacagtcctcggctgattcatggcgatcgtttttcaacctccacaacgttatcgcagcagctctcgatcagctccctgtcgtgggtgatcacgagaatgcttctaccgttccgcgcttcgcctctcagcctttctgcgacgaggcgcaaatactctatgcatcagcttcctccagaacggcttgttgcagtccacaaaccgcagcctgcggaagatcggcaggatcaggttttcctccatctcctcgatctcacggaacgatgtaatggccttgcaggccgtgtaatagctcataatggcgatgcagtcgtaggtgccgcctacgccgttgtggaagttccgtttgccacccaagtcggtacgccagtcggagagaaactccgcatactaccgctgtacctgttcccatatcgcctcccgctccgcttccgggtagtgcagggcgatcttcgcccgtatctccttcttgcagggattggaatacagcacatggcatttgcggtcgaatgggagcttcttgtccttcatcttcctgcttctccctcacttccgcgccgtgatgcagagccagcttttctttttatgaatttgaatatcgtgaaaccccgcctgctccaggtacgcctttaactctacgtccttatagatggtcatgccgccgatgatctccgtccacttctcatccttgtccgtgtcgccgtttgcttcgttgcagatgagaaatgtcccgccgggcttcagcactcgataaacctcccggaagcatcggggcaggtcaggccaaaaatagacggtttcaaaggccgtgaccgcgtcgaaccagttgtcagcaaacatcatatccgccacgctgccttgcagaacggtgcagcgtccctccatgatggcggccttgttgacctttttcgacttctccacactgacgggcgaatagtcgatacccttgacgacgccctgcgggcattttttcagcagccttttcatgttcgccccgccgccgcagccgcagtccagcaccttggcgtccggcgcagcattcagaaattgaagcccccaccgggcaacggcgctgtgaccgagattcatcatggcgaccatgattttcccgccaaagcctacgggcttgcgggtgttttcaaagaatgacatatcacacctccatttttacacactcagcataggtcagcgggaacgaggctttcagcacagcgcctttccgcaccgcccagccgttttgccgcaggaagcgcaggtattcctcgctcgcccacttgctgtggagagggaagcctgccagcttcatgaaaaatgccctgaccttaccggtaaacgagttccctgcgtgggtaaaggtcggcgcaatgagcacgccgtcatccttcagaacccggcggatctcggcaagggctttctccggctgcggcacgatgtgcagcgcgttggacacgatcaccacgtcgaaggacttgtccgcatacggcaggcggaacatatcctgcaccgaaaagtgcagcttcgcagattgattaccccgctttgcttcaagaatcatctccggcgatgcgtccgtggcctcgatatgcgccgccgcattcacgatgtgctttgcgatcagccccgtgccgcttgccagctccagcaccgtcttggctttcaccaccggctggatcagcttatacatctcttcgtatgccgcccgatcctttcgcataaagcggtcgtaccgaccggcatttctgtcccagaaggtctttcgttcactcatggctgtctatctccccatgcgggcatcttcccgccgctgcctggcgtattccagcagggcggcacacgccggacaaagcgcctcgccccttgtcccatgcacaccccggcaataccgatgcaccatgagggtaacagtttcgatctccttttccttgttcaagctccgaattcctttctgctctgtatttcagttagctcgctctaaccaattggcggaagaaaaggcaggccacctgtatgcagtctgccttttgcctgatgcgaaagcccgcagacgcgcggggcttacagcaccagcgagggcgcggtgtagacccgtgccttcagctcgctgttgagcatatacagccccttgctgtctccgccgaacagctccatcttggtgataaggtcggcggcgttcttctcttcctcgccctgctccttaatgaaccagtccagcatctgcatagcgcggaagtccctgacctcgtatgcggcggcgtagatggcatcgatgctggcggtgaccagcttctcatgcgccagcgcctttttcagcggggtcgtgtggtcgcctcgttcccactccggccttgcgatggcctcaaaggtgacgccctcgccgttattctgcaaatactgataaaacagcatggcgtgatcccgctcctcctgcgcctggacccggtaccagttctcaaagccgtctaagcccacggaggcgtagtaattggcaaagtccagatacagataggcggagtagaactccttattgatctgctcgttgagtagtttcgataccttagcgttcatgatacttctcctccataagattgtctttttcctgctcccggcaggcagggcagatataccgtacccagagcgatgctgggatgctcccttttcatctccaggaacacctgctccgccgtgggatgctgctgcagttccgttacggcggccaatatctcctctgcgtattttggcataccgccaaccctccaaatgcaagaatgagtcttattcttttgcttttattatacctatatttttttctctgtcaacaaccacaaagggcctgtgctccaaaagctgcctcgaagtaccttgacagttttaaccgtatctgttatatttcagtataaactgtatcagtagcaagcacagttacattggaggttgattatgcgtcagatattactttttgcggcacttgccgcctcgctggcactgctgagcggctgcgcgctgtccaaaacaaaaaaggacgcggaggatatgaccggcaaggcggcgtatcataagatcagtgccgaggaagcctatgagatgacggcctcgcaggacgtcgtggtggtggatgttcgcacccgggaggaatacgacggcgggcatattgaaaacgccgtccttgtccccaacgagagcatcgggagcgaaatgcctgaggcgctgcccgacaaggaagccacgctgctgatctactgccgcagcggccgccgcagcaaggaggcagcccaaaagctgctatcgcttgggtatcagagcgtctacgacttcggcggcgtcatcgactggccctacgagcttgtgaaggagggataattgtggacagctcctttaatctggcagtccacgcgctggtctgcctgagccacagcggacgctctctcagcagcgaggcgctggcggagaatatctgcaccaactccacccgcgttcgccgggtgctggcggggctgaaaaaggcgggaatggtggagacccgggagggcttggacggcggctaccgcctgacggcagaccccgcaaccctttctctccggcaggtggcggaggcggtgaatgcccgctttgtggactgcgcgtggcacagcggcgacattgaccgggactgcgccatttgctccggtatggcgggcgtgatggacgtgctgtatcggcagatgaatgaacagtgcgccgcctatctctcgcacattacgattacagatattgaaatacagctccttctgcgcgttaaggagccccctttgggcgtattggcaagtgcggataacccccgtcagccacggagcgtcggggttttgcagatggatgaagcagctacggtctgtatagatcggcaggacagcgtcagctcgtacaatctgatttgatcatacccacagtcgctttggctcttggtattttctgtttgaactccaaaagctttgcagagctcaaggagcctaatcgtacaaccagagcagcgccgcgccgattttctcaaattatgtgacgccgtcacagtaaaaccgcttgtcacgcagtatactatacccaaacaaaggaaaggagctgacagatatggcagctatgaatatgaatcaggagcagtttgagcaggcgatccgggaggaaaagcccgttttggtggatttctgggcgccctggtgcggctactgccggaggatcggccccgcgtatgagaagatcggagaggaatacgcggacagcctcgccgtcggcaagatcaacattgacgaggagccgcggctggcgggggccgaggggatcgaggtcatcccaactctggtgctgtactggaacggaaaggccgtggattccatcaccgcgcccggctcaaaggcagagatcgaccgtttcattcaggaagccttggcgaaataacggagggttcagatatgaacaacaatcatgtttatgatatgctcgtggtgggcggcggcccaggcggctacaccgccgccctgtacgccgccagaagcgggctttctgtactggtgctggaaaagctctctgccggcggacagatggcgctgacggagcagatcgacaactaccccggctttgaggacggcatcgacggctttacgctgggtgaaaagatgcagcaaagcgcggaacgcttcggcgcggtgacggagctggcggaggtgtacaaggccagcctttccaggaagatcaagacgctggacaccagcgagggtgtttttcagggccgcacggtggtcatcgccaccggcgcgacgcctcgtcccttgggcgttcccggcgaggaaacgctcgttggcaagggcgttcactactgcgccgcctgcgacggcgcgccctatcggggcaagactgtggcggtggtgggcggcggcaactctgccgcggcggatgccctgaccctgtcccgcattgcaaaaaaggtctacctcatccaccgccgcgacagcctacgggccaccaaggtataccatgcaccgctgatgaacgcgcccaacgtagaattttgctggaacagcaccgtttccgctctgctgcacgacagccgcctgacggggcttcggctaaaagacgtcaacaccggcgcggaacacgaccttgcctgtgacggcgtgttcgtcagcgtgggacgcgccccggcgacggagctgttccgaagcgagctggcactggacaaatccggctacatcatcgcggacgaatccacccgcacgaatcttcccggcgtgttcgccgcgggggacgtgcgcaccaaggcgctgcggcaggtggtcaccgccgtatcggacggcgcggtagccgtccactacgcggaggaatatctggcggagaaccggtaagggaggaatattttgagaacatataaggataaagatgagctcaaaaacgagatccgtcagagctttgaaaagtacaattccgagtttgatacgatcccggaagccctgaaggataaaagagtacccggtgtggacaggacaccggcagagaatcttgcatatcaggtggggtggacaacactgctcttgaaatgggaggctgacgagaagcgcggaatggaagtgaaaacaccgttggagcagttcaagtggaaccagctgggcggcctgtaccaatggttcacggacacctacgcccatttgtccttggcggaattgaagggcaaattaaatgaaaatatcgccgctatccagaccatgatcgattccatgagcgaggaggagctgttccagccgcacatgagacggtgggcggatgacgccaccaaaacagcggtgtgggaggtttacaaatttatccacgtcaataccgtcgcgcccttcggaacgtttcggacgaagatcaggaaatggaaaaaggcagcgctgtaaattgcaaggaagtgcagcaaaaagcgcagccgcagagaacatctgcggctgcgcttttatccattctcaaggcttcagcctcacgcagcaccatattgccgtctaaatcagcaacgccgtttcacttttgaggcatcgggcggctggacgaagccaacctcggcgcggggataccgtccggcctcccgcagcttattccgcgcagagctcagccaccagagcgtccatctgcgcctcactggtttggttcagtgcgccgcgcagcgatacctccgtttcacacagtcggagttccttcatcttttccaactcggcgcgcatcagccgcgcggcagcaggtgcccaagagccgttttcaataaggccaacccggcggtttcggaatccctttgtctgcaaatgttccaaaaactccttcatgggcggaaacagtcctccgtcataggtggagcaggccaacaccagtttcccacagtagaatgcgctggtcacggcataggaaaggtctgttgtcgtcagatcgcacatggtgacttgcgcaccttttcccgccagcttgctcttgagggcctccgatgcatatgcggtatttccatggatggacgcgtggacgatcaggatgccctccggttcttccggtttccattgtgaccagagatcatagagccgcagacactcctccagcccttctgtaagtacgggaccatggagcgggcagatcgtttggatctccagcgcggcggtctttttcagcagagcctgcacctgtgcgccatatttaccgataatattgtaataataccgccgggcctgcggtgcccagggggcacgggcagtccgttccagtgaaccgaagcggccaaaggcatccgccgagaacaggattttttccgtttcctcatacgccatcatcacctccggccagtgtaccattggtgccagcaggaagcgcagccggtgtgagcccagagagatcgtgctgccctcgccaacctccagcatacgctcttccggcaatgcacctgtgccgaagaactgcttgatcagggtaaatgtttttgcgtttcccacgatcttcatctccgggtactcttgcgctatccgcatgaggctgccggaatgatccggctccatgtgtgtgaccacaagatagtcggggctgcgcccctccaacacctgcgctacattggaaagccattcctccgccgcccgtgcgtccacgctgtccatcacggcgattttctcgtccagaatgacataggagttgtagctcactcccataggctggacggggtactggttttcaaagagtgctaatgtgttatcatccacccctacatagcggatggcatctgttaccattcggatagccatataaaaaatacctcctattttccttactcagactgataggttcttcttttctaatggatcatacgctcaaccgcggatcgacggtcgcgcattttaccgttgccttgcttcccccagagtcgttacatgtggtacaccgcagcggagcgaagtccttccggcaggccgtcgggcgcagcaggtgaaagttcccagcgtacctgccccgcccactgggaggcgacggcggagaagtggagcatgacaataccgagatccaatgcggcatccaaattatcggtgtagtcatcctcctgctgcaccaaatagatgctgtgatcctgcacaaggaagccatagggctgacggttgagatagctgggggagagcgaagcggcgtagaaggactgccagagcatatcgtcgtagaagtccatcatctcgtcaagcccagacttgttgctccagctccccatgtgaaccaaatcatgcacgccctttttgggcgcgtagtactgctgctcagcccgcacatcgatctgagacatacttaggatattcagccgcagcttttttgcggtcttttccccgtagccaaaggcaacgattgccgccacctctaacggggtggtgagagaaagtgcctttttgatcttgtcgctgtcggtgaatgtcatccagcaggtgtcaatgtccaactcagtcagcttgaggacgagatcttccatcatgtagccggcgttgatggccgcataggaatgcggggcagacataaggagcaggtagtgcggtgctccgatgagaaattgcttatagcccgctgagctctccagcgccggctgtgcatccttgtccaagacgatcagctccgtggcgatctccggaacaaggcgggggcaggtcttttcgtagtaggtgcgaagctgggcgagcacctcgttcggcacctcctttccgcgaaaggcgcgaacggacttgcggttttggatcatagcgctgtaattcatagtggtatcctcctattctgatgtctttggttttcttataaatcgtctatcagtgcggtgctcttggcgtaggcggtactgcgcgcctcaaagaaatcggtcttgaccatgttggcgtcggcgtactggctgacccattccatgctctccggttcgctctcaaagcctggatacaatgcgggatagccaaggctcgtccagcgaagattgccgagatagcggatgtaatcgctgatcatctgccggttcaaccccgggatgtcgtcgccgatcacataatgcccccatgcgatctcctgctccacgccctcgcgcatcatctcgcgcagcgcttgtacgctctcggcggtgaacaactccggctgctccttttgcagctccgtgatgatattgcggaacagccacaagtgcgtgttctcatcgcggttgatgtagcggatctcctgcgccgaaccggacatcttcccgtttcgggagagattgtagaagaacataaagccgctgtaaaaatagatgccctccaaaatatagttcgccatcatcacgcgcagcagcgtgggagcgtccttccgctcctgaaactcgttgtagcagttcccaatgaaggtgttgcggcgcagcagatgctcgtccgttttccattggtagaggatgtcattgcgctccacgggagagcagatggtgtcgagcatatagctgtagctctgtgagtggacacactcttgaaacgcctgaatggacaggcagagattgacctcgttggcggtaatgtaggcgccgatattaggcaggttcgctgtctgaatggaatccaaaaagacaagaaaactcaaaattttatcgtaggcgctgcgctcggctggcagcaggcggggataatccttcacatcctgcgagaggttgatctcctcagggatccagaagttgttcatagcctgccggtaccagtcgctgacccaagcgtacttcatgttattgaagtcgttaaggttggtggtattgccgccgatcatgcgccgcaggcgcacatcaaggtcgccctccgggttaaagaggggctttttcttcagttccgtcatgctatcctccttatgacgagcagctttcgcagtcctcgacctcaagggccttgctgcggacatagtaaatggtcttgacgccggccctccacgcctctaaatacagtctgagcacctgacgcatggaatagtcattggtgatatagagattcatgctctgcgcctggtcaatatgtctctggcgaaatcccgcggcgcgcaccgaccagctttggtcgatcagatgcgccgccttatagtaccaccatgtatccatagaaagctccggggcaacgcggggcagcatgctgccctttttctcctctaagaagaatttcttcataattggatcgatgcccgccgacgtgccggagaggatagatgtgctggaggtcggtgcgaccgccagcagataggcgttgcgcattccctgcaccgccaccgtttccgcaagcgcctgccacttttcggaggtataaccccgcttttcaaaatacgcgcccgtctgccagtcgctgccctcaaagagcgcgtagcggcccttttcccgtgccagtgctgcgtccgccttgacggcggcgtagttgatgtactcgaacaccgcgtcggtgaaggcaaggtgctcctcgctctcccagcggatgccgcgctttgccagcatgtggtggtagccgctgacgcccaggccgatgctgcggtacttctgattggtaagccgcgcgtattccaacgggtagaagttgaggtcgatcacattatccagtgcgcggatggccgtttccaccgtgcgttccatataggcctcgtcctccaccggcagattaccgagagacagactcgccaggttgcagaccacaaactcacctgggcgtgtgaccgtcaccaccactgtgttgccgttctccgtgtgcacctcagtgctgatatgctcgatgggcgccatgttctgcgcgatctccgtgcagagattggagcaatagatcattcccgtgtggccgtttgggttcatacgatttacgctgtcgcggttgaaggcgaagggcgtgccggtctccactgccgagcgaagcaccagccgcacgatgtccttgacggtgacgctgcgcttttcgatgcgcgggtcattgacgcagtccagataccgcttctcccattccgtaccccagtaatcctccagagcgtaacccttgaccgtgaggatctcatgcggacacatgagatgccacagcgcgtctatgttctcctccgccagtcgccagaagagatccggatagcacacggcgggaaacacatcatgcgccttcatgcggtcgtcgccgttgttggtgcgcagttgaaggaattccggcagatcccggtgccatgcgtctaagtaaaccgccacagcgccctgccgcatccccaactgatccaccgccacggcggtgtcgttgaccagccggatccagcggataacaccgcccgccgccccttgaaagccgcggatggtgctgcctgcagcgcgcaccttaccgaagtacatccccattccgccgccgaatttagagacctttgcgaagttgtccagcgagcggtagatgccgtccagactgtccggcacagtgtccacaaagcagcttgaaagctgatggtagggctttcgtgcgttggacatggtaggtgtcgccatcgtgacctccatacggctgagcatatcgtaaaagcgttttacccaccccatgcggtcagagccttcgttcatagcaagatgcagcgcgatacccaaaaacatctcctgcggtgtttccagcggcacgcggctgcgtgactggatcacatagcgtttgagcagcaggtcaaggccggagtaggtgaacagctcgtcccgttccgggcagagaaagtcctccgccatggcgatctcctcgtgggtatagtgggcaagaatatagtcaccgtagagtcccttatccgtcagatagcgaagcctgccatagaggtcgccgatgccgcgcccctcccattcctgtgcgttgcgacagcgaaaggagtggttcagaagccgcgccgcgatgaactcccacttgggtgcctctgccgtagtcagctctaccgctgccttggtcagtgcctcagcccgctcatcctccgtcatgcccgggcgacagaagctctcaaacttcatttgaagcgccgcaagggagtagatttcctcggtaaaatccatctggatgcggcgcagcacctcgtcaagcgagttatcccccaccgtctgcgcgatggtatgccgtacgctgcgcagcgccgaccgcttttcgcgatagaggatgtacgcctttgccacctcatagtgtccgcgctccatgagcgtccgctccacctcatcctgcacacgctccacggtgagcggcgctgcggcggcgaggttgtcgagaacggcggtgaggatctcattcagctctctgctcccgatctcccttccctgcccatcaaacgcttttttcatggcgttgaaaactttctcctgttgaaaaggaacagacttcccgtttcgttttctgatctccatttcgatcctctcatcttctccggtcacttctcatgtccttttgggcaaagagcgggcaagcgcagtatcacgcttgcccgctctgtttttgaaagccggttttcctgcagccgacgcggcggggctgtttgttgtctgttgtcttggttttggctttcctgccagtcacttcatagattccagaatggcgtccgccagtgcttccagctcagtgcgcttgtccgtgcccatggacgaggcgaggctgagccgttcgttgagcaccgtcatgttcttgagctcatcgttgacgaatttctgcatgaggtcgccggacttcaccgcccacgagccgttttcaatgatggcaaaggtgcggttttgcagattcagtgccttcatatccatgaggaaatcgtgcatggcgggatagatgccgaggttgtaggtcacagaggccagaacgatgtggctgtacttaaacgcctcggagatcagttgggagacatgggtggaggacacgtcgtacagtgccacacggctcatgcccttgtcgcagagcgacgccgccagcgcctgcgccgcgttctccgtgttgccgtacatagaggcgtagacgatgagcacgccctgggtctcaggggcatagcggctccatgtatcgtatttttcgatgaaccagcccagatccttgcgccacacggggccgtggagcgggcagatgtacttgatctgatccaaaacgccgccggcctttttcagcaggagctggatgtgggggccgtacttgcccacgatgttggtgaggtagcggcgggcgtcgtccagccagtcccgctcgaagtccacctcgtcggcaaacagcttgccgtccagcgcgccgaaggtgccgaaggcgtcggcggaaaagaggacgccgtcggtgacgtcgagggtcaccatggcctccggccagtgcaccataggcgcgcccacaaaggtgacggtgtgcttgccgaaggagaaggtgtcgccctccttcacctcgatgcactcatgtccgtccacatggaagccgaactgccgcatgagcatgaaggccttctcgttggagatcagtttcaccttgggatggcgcagcaggatctcctcgatgcaggcggcgtgatccggctccagatggttgaccagcaggtagtccagttcgcggccatccagcacatacgccagattttccaaaagctggcggcaggcagaccagtccaccgtgtcaaagagcaccgtcttttcatccagcaggcagtaggagttgtagcttacgccccggggaatgggaaagcagttttcaaacagggccaggcgatggtcgttggcgcccacccagtagaggtcgttcgttactttacgcacgcaatacatcttatcttacctccttcacggctcaagcctttacaaattgatccttcgtctccgcgcactcgggacacacccactcggcgggaagctgctcaaagagcgtaccgggcgcgatctcgccgtcctcgtcgcccaactccggcacatactcgtagccgcagccgctgcagacgtagcggtcgccgatgggggcgggcttcggcggcttgggccgcttcatctttaccatgggcggcgcgggcagcttttcgccgctatccagcgcagcagtgagcaggggcaggatctcctccacatcgcccacgatgccgtagtcgcagttcttgaagataggcgcgttaccgttcttattgatggccacgatggtggaggcgtccttgatacccttgaggtgctgggacgcgccggagatgccgcaggcgatgtacagattgccggtaaacttctgcccggacatacccacatagcggttcagcggcagatacttgagggtctccgccacgggacgggaggagccgatggccgcgccagcggcctttgccagcgactctaccagtttcatgttctttttctccccgatgcccttgcccgcggagaccacccgctccgcctgcgggatgggcgtatccatggggatgcccacggagaagtcgtggccgtccttcttcagcgccgctacaaggtcagccacctgctgggcggcatccccctcccggaagatggtgcgcttgcggatgccggtgatgggcgcgggtttcttggccgccgaacggctctcgccgccggagctcttgcccagcctgccgatgagatgggaggcgatgaccacccgctgaatctcgttggtgccctcgtagatggtggtgatcttggcgtcgcggtaggcccgttccacctccatgcccttgaggaagccgctgccgccgtggatctgcaaggcatcgttggtgacctccagcgcgatgtccgatgcgtacatcttcgccatggcggactccatgccgtaaggcgcgtgctgctccttcagctccgccgcggagtagataaggaaccgggcgcagcgcagcttggtggccatatccgccagcttgaaggcgatgctctgctgggccgcgatgggcttgccgaactggatgcgctccttggaatagctcaacgcgtgctcaaacgcgccctgggcgatgcccagcgcctgcgcggcgatgccgatgcgtccgccgtccagcgtggacatggcaatcttgaagccctcgccctccttgcccaataggttttccttggggaccttcacgtcgttgaagatcagctccgccgtggaggaggagcgaatacccatcttgtcatagtggtcgccgaactcaaagcccttccagcccttctccacgatgaaagcggagatgccccgggtgccgatgtccggcgtggtgacggcgaaaaccacataggtgtccgccttaggggcgttggtaatgaagatcttgccgccgttgaggaggtagtagtcccccttatccagcgccgtggtctccgtgccgccggcgtcagaaccggcgtttggctccgtcaggccgaaggcgccgatcttctcgcccttggccagcggaaccaggtatttcttcttctgctcctcggtgccgtaggcgaaaataggccatgagccgagggagacgtgggcggagaggatgacgcccgcaccgccgtccacacgggccagctcctccaccgcgatggcgtagctcagggcgtccagaccggcaccgccgtactccttggggaagggaatgcccatccagcccagcttacccagcttcttgacagcctcctcgggaaactcattgttctgatccatcataaacgcgaggggcttgatctcctcctccgcaaagctccggatcttcgcgcgcagctcttcgtgcgccgccgtggtttgaaacagcatacgggtacctcctcttaaaattttacagctcgcttgtatcttggggatcggatccgccggtcagcagcctgcgcaggctcacggcgcggaacgcctcgtcctgctttcgctgcaaggccgcaagctgacagtggatggcgcaccgtccatgctcgtcccgccagcggcatacatatcccggctccatgcaggcgcacaggacgccccgatcccccatgacccccatgagatcgtagagggaggtcgcgtccagatcgcaggacagctcacagcccccaagggcgccgcggctcacccgcaccaaattaccggcggagagcttgcgcaggatctggtaggcaaactgagtagggatcagctccgtttccgacatctcggccaccgaatgcttctccccgtccagcagcacccgcaaaatgcgcagcgcgtagtccgtctctttggtgatgatcatgctccgtatcctcttttcgcttgcttgttagtcccatcatatcaatcttgacaaaatttgtcaagataattttcaaaaaatttatctctttaacacagaccgccccagcccgggtcagcttcgctttccattcagcgaaaagccatgttccttccaattatagaaggccgaaaaagctgtgccgtggcagtccgctgaaagcagaaaagactatgactgaaaaccagaaagcggagaaatcggttggggctcacaggggtcgcccacccaaggcggatgcggcgatccctgacaagcctaagccgtccagccgaaacaagcaataaagtgcgtgcttttcatgttatattcgacacattatgttaagatgtgcagtagatgctccattttaccatcccactctctgctggaatcggcgcactctttcagttcagtttcgacttcagtatttatcggcaggtttttcttatagcggatggtatgttcaaggcttgcccagaagtccatagcgattgtacggagttgtatctccaccggcacatggatctcttttttcgcaaagaataccggcaaccggatcgtcaggtgcagactgcgatagccatttggcttagggtgtgaaatatagtctttctctgtgatgatttcaatgtcagactgatcttttaagcactttgccaaaaagaacacatcctcctcaaaagagcagatcacacgcacaccggcaacatccatgatatttgcctgcatggtcggaaaatccagaggaagtccgcgcttctgcatcttgttcataatgctggacggcgacttcaatcggcttttcatactttctatcggattgcggtcatgctgcaatgaaaactcttcgttcagaatttccaacctgctttcaagtgctttcagtgcgcagcggtattgcagcatgacttcctgatacctgcgattttcacttaaaaggcgttggcattgcagatcatccaagcctttatctgtcgcaaccgtcaaaccaaataaattttcactcatagcttctccattccgcagggataggcgctccgcgctgtctgctgctcttttgttacgacccgataaaagctgtatccgccggagagatgggcacaggtaaaaccatactgcgtcaaaaggcggcaggccagataactgcgaagccctgtctggcaattcacatagacaggcttaccccggtctaactcgtccaaatgctcccgcagatcgtccagtggaatattgcggaatccattcaagtgcccacgccgatattcgccttctgtacggacatccagcagtgtcgcattgccatcgcaaggcaagtcctcaacctcattccaatggaactgccgtaccttcccgctctccaaatcctcgatcataaaaccggccatattgacagggtctttggcagaggaataaggcggcgcataggaaaggtcaagctccgtcagttgcaaagctgtcatctttgcgcgaatggccgttgccagtacatcaatgcgcttgtcaacaccgtcgccgccaacgatttgcgcacccagcagccgcaggctttctttttcatacagcaccttcattgccatagactgtgcgccgggataataggtagcgtgggatgccgggaaaagtacgactctgtcgtaagcgatccctgctgcctgcgctgccttttcgttaatccccgtggaggccgcggtcaagctaaacaatttcagaacagacgaaccctgagagccgtgaaagtggctgtttccgccgcagatgttgtcggcggcaatgcgtccctgcttgttggcgggccccgccagcgagatcaatgctttttggccggtcacgaaatgggtgacctctacggcatcgcccacagcatagatgtccggcacggaggtttccatccgctcgttgacagcgatgctgccacgaataccaagcctgagtccggcatcttttgctaaatgcgtatccggggtaacaccgatggccagcagcaccatgtcggagcgcagcggcgcactttcctccagcagcgtcagcacggaatctccgtcctgccggaatccggtgacggtttcacccaaccgcagagccacgccgtgtctgcgcatttccgcatggacaaagctcgccatatccgtatccagcggcgctaatagctgctttggacgttggacgatggtgacgaaaacgcccatctccacaaggttctccgccatttccagaccgataaagccgccgccagccaaaacagcggttttcggcttctgcgcctcaacaaagcgcctgatgcggagggtgtcctccactgtgcgcagtgtgaaaacacgctcactgctgacgccggaaagcgcaggaaccgtcggctttgcgccgggtgcgaggagcagtttgtcataggtttccgtgtagacctttccactatctaatgcgtgaacggtgacggttttctctgtgggattgatcgcagttgcttcctgctgtactcgcacatcaatgcgaaagcggtcccagaagctctccggagtttgcagcgtcagttcttcttgctccttgatcacaccgcccacataatacggcaggccgcagttggcataggacacatagccgctgcgctcgatcatgatgatctgcgcgtgttcatccagacggcggatgcgggcggcggcagacgcaccgcccgccacaccgcctacgatcacaactttcatcttgcgccctccaccatggcggcaatctccgacttaggccgatagcccaccgatttggcaatggcctttccatccttgaatacgaccagcatcgggatgctggatacctgaaaacgcattgccagctccatctgctcgtccacattgatcttgcccaccttgagggcaccgcttttttcttcggcaagctcatgcagaatgggagagagcattttgcatggtccgcaccagtccgcgtagaaatccaacaggacgggtttgtcggaatgcagtacttcattttcaaaattcgcagcagtaattttcaattcagccatgagaaaggctcctttctgttatccttagttattctttgtttttcagcttgcaaatgccctgcgtcatggttcccatggggcaaaacgcacaccatgtccggggcttatagagcaccataacgatcaggcccagcagcagagaggtcagcatcaagctataaaagccgaagctgaactgtgccacccaatcagcgaccgtcccggctgtataagtccagccccacggcacacggaatgtccagaacagcttaatggcctcccgcagggatgcagcccctgccgccaccagataggtctggaacaccatgttgccgaacatcgtcaggaaaaagatcaaaaagccgtaacggaaccacttggaggacatccagctgggcgtgggcttgcagcgggagcatttaaggtctgtccccagcttgctgaacagttgtccccgtccgcagaggtggttgcaaaagaatttgttcccgccgaagatggctaagaacagcggtagaagaaaatcgatcatgcccagccatgcaaacaggatattgaaaaagcccagtgcaaagtagatgatggcatatacccacaggtaatcgtaccaatgctttgctttcatgcgtcagccctcgctttcacctcaatgcagcccacgggacagagctttgcgcacttgccgcagcctacgcagcgttcgtcctccacggcggcgtagcagccccggcgcaccttgacagcccccagcggacaggtattttcacacacgccgcaggcgacgcaccgcgttttatctacggcagccagtttctttgacagcatagcgttcctcccttaatcctgcaaggatttgtaatagagcatacagtggcagaatccctcgaagcccggatctgcaatttgatccttaaactcctggcacatacatttggtcgcctctgtgcgctccctgcggcagggacagtatcctccggtgcgcttgagtccttcccggatggtgttgacaatctcctgatcgggattgagcttgattttcatgttcgccacctctttcttaattgtggctttatcataccgcaggacaaatcttttttatgtgacgaggttacattgatagataaaaaatccggtgcttttttaagcaccggatttttaagaggatgaattatgctttccacaggctgtggaggttgcagtaggcgtagaccgcttcgacctcgtcgccctcgcagagagcgaagcagacctcgggcttctcgccggggtgcagctccttgcgctggttgccctgcttggtgtggagagagacccactcgatatagtgctccggcagcatgggatgctccacggagccgaccttcacatggacgatgccgttttccacagtccagaccgggacgtgcttctccacggccgcgtcggtcgtgccggggatgatctcgctcatcggctcaccgcagcagatgacgggaacgcccgtatccttgaccttggcaatgatgtttccgcaatgcttgcaaatgtaaaacttctgctccatgatgattctccttttctttctttaataattctccgcgtgaatttcaaagtagctctggggatggttgcaggcggggcaaacctccggggccttctcgcccacgacgatgtgaccgcagttgcggcactcccacaccttgacctcgctcttggcgaagacctccgccatctccacattgtgcagcagggcacggtagcgctcctcatggtgcttttcaatggcggctaccaggcggaaacgctgggccagctcatggaaaccctcctcgtcggcggttttggcaaagccgtcgtacatatccgtccactcgtagttctcgccctcagcggcggcgagaagattttcggcggtgtcgccgatgccgttcaattccttgaaccagagctttgcgtgctctttttcattctcagcggtcttgagaaacagcgccgcgatctgctcgtagccctccttcttggccttggaggcaaagtaggtatacttgttgcgagcctcggactcaccggcaaaggccgtcatcaggtttttttcggtttgagtacctgcatattttgtttctttcatggtcgatgctcctttcagtttttctgctttcattatatcggaattatgattccgttctgtaacaaagtcacattatttcaagcggtttaggctgttcttatcccgcagcgtaatcgcgcctcgccttagttccaccagcccgtcctctgagaagcttttgagcatccgtgccactgcctcccgcgccgagctgatgtgctgggcgatctgctcatgggtcatgcgtatggtatcggagccggtacgctccgcttcggcaaggagaaattctgccagccgccgatccaatcccttgaacatgatctgctgcatcgcccacatcacatcagaaaaccgtttcgttgccaactcatagaggaagcagcggacatgaagattttgctccttgagtgcagcgatgacatttgcagggataatcagaacgtccgtatccattcccgcggtcatttgcgtatcaaaggtgatctgactgatcacacaagaggcagaaagcacgcacagctcacccggatacagccggaacaatgtgacttctcgcccctcctcggagagaagataggtgcggatctcgccggaaaggacgaacatcattccgagacattcattgtcgctgctgtgaacaaatgcgcccttttcataatgacggactaaggcacttcggcgcagcgtgtcttgctcctgttcggtcaaggatgaccagaacggaagttgtgtcagtgtgcgctccatatcagtggcagctatgcttgccgcagccgtggtcaccgcaggtgtgcccatcctcgccgtgctcgtggttatggtggtcacagtgaacattgggatcgtagcccagatttccgttgagcaatgcgctcaccgccgcatcaacgtccccgctgacaccgccgtagagcttgatgcccgcttcggccagagctgcctgcgcaccgccgccgatgcctccgcaaatcaaagtgtccacgccgttctgcatcaggaagcctgccagtgcgccgtgaccgctgccgttggtatcaacaacttccgcatgagtgattttgccgtccacagcttcataaagcttgaactgctcggtgtgaccgaaatgctgaaagatttgaccgttttcataggtaactgcaattttcataatagaatctcctttgcaatttttgtcggatttttctgtgttggctctctgcatccggcagcagcggccgcagtgggctgcctcctgtcctccgcagatacggtagtttcccccggtgatgtgcagcgatttcccgtggacaagacacgctgcgatcttgcgccgtgcgctttcgtaaatctcctgcacggtagagcgggaaatgtccatttgcgcggcacattgctcgtgggtttgctgctccaggtcaaccagccggatgacctcgtactcgtccagcgtcagcaggatcggctcgatatcctcgcccccgttggggcagaaggtatcaacttgtggtgcgccacaaatccgacggcaccgtggcggtcttggcatggatacaccctcctacgtttccggtatataccgattataacactttgggtagaaaaaagcaatattcttttcaaaagccactgcaatttccgtcctcatatagatacggactgatattcggagtcgaaagcaacatgtaagctatcctcaagttagatactttacgaaaagaagcgacgcctgaacgagtgcccgtggcactcttttttttgttgcaatgcaatgcgggttaaaacatttttgatacgctataaacaaacacaattcgtgcgtgatcgaattactcagctgagattaaaaaagggtgtctctgaatatcaaatgagttatgatctcgggtatagcagaagctatgtttataacatatcctctggcaaatcgttgccgcctatggctgagtttcttcaaatctgtaactattttgatattacaccaagccaatttttcgatgaatccgaagaaaatcctgcgctcctgcaaacggccattgaagaattgcgaaagctgaatgacgatgacttaatgctcatcatcggcaatattcgtcggctgacccgtgagtgaccattccctgaaataacacatttgtaagtacagagaaaccgcaaggcatcggtgtataatccatgccttgcgggattttgctttatagaggtgatttgcattgaagcctgagagaaaaacaacttgcagttctaactctgggtaatacgccggaattgcatagtatatcaccacaaagtacacatcatttgattgccatataccatactgatgagttctacaaggataatcaaatgagatgtaaactaataacatagtaggtggtaccaatgttcaatgcacaacagcggattcggcagctgatggccgagcgtggatggactatttatcgattagcgcaggaatccaagctgtcgcagacaacgatcagcaatatcttcaagagaaataaccaaccgtccctgccaacggtaaatgcgatttgtgatgcttgcgggattacactggcgcagttctttacggagaatgatacagcaaattcacctaacgccaagagtgaattagataatagtgttgcggctctcaaggaggatcagcgcgaggcgcttgccgcattcatcaagacaatcgtatagtacataaccgctcagctctgctgtgcggcgcacagcagaggctgcccgagttacgttggacagtctctgcgcttttttaccaatcaaaggaggcgtattcatgagcaaggaaattatgcaggaaagcacacaaattgttgaatgtaatgcgttactccggcattggtatcaacaaactgcgtgagatcaccaacgaggaccggtgcaaattcgtcctctgggtgggcaataagcgcctgattaaacgccgcctgttcgatcagttcatcgagcaggcgtattctatttgaaatttgtggtgtaaatcggagccttgatatgatacaataagtgtgtcatatcaaggctctttccatcacggaaaggagtttgacaatgtccgaaaagagaaaagacaacaagggacgcatcctgcggacaggagagagccagagaaaagacctgatttatcaatatcggtacacagacattcgcggcaaacggcagacagtgtattcctccgatctgaaagaactgcgggaaaaagaaaaggaaatccagaagcagctcgacgatggcattgattatgcggctggcaaaatcaacgtcattcaactgctggaacgctacatcagcatcaaacagggcgtgcgctacaataccaaggttggctataacttcgtgctgaatctggtgaagaaagaagattttggctaccgttccatccgagacatcaaggtttcggacgcgcagaaatggatcatgaagctacacgaggacggaaagggatacagcaccctcaccagcgttcggggcgttgtcaaaccggctttccagatggcgtacaatgaggatgtgatccgtcggaatccctttgacttcaagctggtcgatgtagtttccaatgattcacagaagcgcattgccatgacagaggaacagcagacgctttggatggatttcatccgggaggacaagacctactgcaagtattacgacgagtttgtggtgctgctgggaaccgggatgcgcgtcagcgagttctgcgggctgacaaaggctgatctggactttaccgggcggaaaatccgagtagatcaccagctcgtccgagagcgcggcggcaagtattatgtggagaaaaccaaaaccgagtgcggttgccgctacattcccatgacggatgaggtttaccgaagcctacaaaatattctttcccgccgcaagcgcgtgaaaacggaaacgatcatcgatgggtacagcggtttccttctgctggacaaaaacgacagtccgaaggttgccctgcacatcgagaatgaaatgcgctgggcaatgaagaagtatcaaaagctgcacccggacaagccgctgccgcacatcacccctcatgtgttccggcacaccttctgcacgaactatgcaaacgacggcatggacattaaaaatcttcagtacctgatgggtcactcggatgcgggcgtgacactgaatgtttacgcccacgcaagctacgcacacgctgcggagcagatggcggaaatctcacagttccgccattcccctgaagcaaaaaaagacaggggttttgctgttggttaaacagcaaatatggtggtagtatcttacgtttactacaccatttactacaccacttggtggtgtagttacataaatttatagagacttatgaaaaaatgaagaaaaaccgaaagtccgaaaaaccttgtaacatcagctttttcgaggcttatggaggaatatagagattatgataaaagtgctttttatctgccatggcaatatctgccgcagccccatggccgagttcgtgatga

SEQ ID NO: 1552 - DNA, 14453 bp, Unknown
  16S sequences of unknown bacteria
ggcggtcagcggttcaatatcctggcaaacaaggttgtgatggagggtccctgccgtaccttctcccgcaagactctggagaccatcgacaaggatctggagcgcattgccgccaatactgccgctgctttcggcgcatctgcatcgctggagtaccagcacctcaccacaccggtcatcaacgaccatgaggacctcaaccggatcgcccggaacgcagtgatcaagctgtatggcgaggagggcctcggtcatctgcccaccatgatgggcagtgaggacttcgccttcttcatggaggaagtgcccggcgtctttggcttcatcggaagccgtgacccggagcagggctatatctacaccaaccaccatgagaagtacagcgtgcccgaagaagtgctgcagcgcggcgctgccatgcacgcccagttcgcactggacttcctcaccgaaaaggccggcgaataaccgtccggttttagcctgaactgaaaactcccccgccgggtctttccgggcgggggagttttttgtataaagaaaaccactcgctaggcgagtggttcaaaagaaggcttttgccgatcatgaggacaagaaaaactccctttgctagaatagaagtgcggtctggcaactgcacaaagaagcaaagggaggtcactcagaatgaacgacagtaatagtttagcgcatacgaaatggaattgcaaatatcatgtggtatttgctccaaagtatcggaggaaagtattctataaagaaaaaagagtagagatagggaaaatcttaagaatgctgtgtgagtggaaaagcgtaagaatcatagaggcagaagtatgtccagatcacattcatatgcttgtagaaatcccgccaaaggtagcggtatcaagtttcatgggatatctgaaagggaaaagcagcctgatgatatacgaacagttcccggaactaaaatacaagtataggaaccgagaattctggtgcagagggtattacgttgatacagcaggcaagaatgcaaaaaagatccaggaatacatacagcaacaatacgaaaaggacaaggctggagaacagttaacgatgccgaatttctaaacaacccgtttacgggtagcaagtagcaaactccatgcaggtgtcagatcgtatctacgtgacgtgacacgtggccagcaacatagggctatgcccgtcatgtgaaatacccccggctccgccgggggatttttatttgcgttcagtgagattatgcatacggagagaaatcagccatcaaccgccgcagcttggcagccgagccttccgagagggtgtaggtgacggtctgatccaggtcggagcagtaaaaatagaaggtagagccgccgggatcgggggttcccgacatttcgccatagccgaagccaaagtaccggacgcctgtatcaaacttgatctccacactgtaaagtgtgccgggcgtatctggattgatggggaagtttacagtttccgggtctttggagggtgtggcagtgaagtcgtgcttgaggaagtcagagatccgggcgatcaccgccgggtcggtggtgctgacgctcccctgagcgctgttcagattgatctcagtgatcttggaagtggtcatgtgggtgtaccaatgcaggttcttttcgccctgggcgttgtaggcactctcccatacactgtggagcggcgagccctctcccagccagacatagtgccgcccggcgtcggtgaagagaatgatcgcccgggagccggagtcatcgtttgcttcggcagcctcggtcagatcgtccatcaccggctccagcagcgcgagcgggcagtcggcagtgaaatggaggtcatagtccagcacagcggcttccagaacagtctcgccctggaaggtgagggtcggctgggctgcctgggacgaactgccggaatcagcagacggttcgggtacagagccgggctcggcttcagagggcagttcctctgcttcggaggaactctcctccggttcggacggggactcttccggctgggaagagctgctttccgatgggctgtccgaggcggtcgaggacggctcggatgaacagccggcagcagcgagcatcagcagtgccgccagaagaagcgcgcacaggcggcgggttaatttcatgggaattcctccttttctgcggggttctgttacccacattataatacaggaactggaatcggacaagccggtataggggtttttgatggaaacagacaggtttcacagggttaaaatagggaaaaggacggatttatcccagtcaaaccccgggaaataccaatcagaaaccggtgattttcctgttgacgaaagaataccggtatggtatagtattatcaagttagttaaaactaactgaactgaaacaacacccttgacccccaggcggaaggaggaagaaccatgctggaacactatctgatcggacactgttcccccacactggcaaacctgaaaacagccaatctctttggttaccggtatgaccgggcggaggagctcattgtccagctgacagagctccggcagcagcttcttccccggggagtggaactgcggcttctgcagctgggaccggaccgggctctgatctatgtctatcggatcaggcggctggtacgggatctggctgacccggagatccggcagttcctggcagactgcggctatcgggatttttctgtggagggcgcgctggcacatctggcgcggcgcatcatggaaaaaggtggagaattcccgcatgagatcggtctgtttctcggctatccgctgggggatgtcaagggctttatcaaacacagaggtcagaactgcaaatgcaccggctgctggaaggtatactgtgatgaacgggaagccagacgccagttctgccggttcgaaaagtgcagatccatttactgccggctgtaccgggagggaagagctctttcccggctgacagtggcggcatgatctcctgacacgaaagtgaggctgatttacacaatgagcaaagctgcgattgtatattggagcggcaccggcaacaccgaactcatggcacagaaagtgctggaaggagcccgggctgccggagcggaagcactgattttccaggcggcggatttttctgccgataagatggacgaatttgacgccattgcattcggatgtccgtccatgggcgccgaacagctggaggaaagggaattcgagcccatgttcacagcctgccgaccgggactgcggggcaagaagatcgccctgttcggttcctatggctggggcgacggggaatggatgcgcacctgggaagccgactgccgtgccgatggcgcacagcttctggcagagccggtgatctgcaatgagatccccgatgccgatgcgcaggaggcctgcatcgccctgggacgcgccctggcctgacgaattctccctttggatgacacgcacaagtttccacaacttcttttttacccttttgattttacgggctggttccggtttttacccggctgggatcagcagtcagaaatttaccccttctgatttttccataatgggcggaccgggccttaccctcccggctgccaactccttttgattacccctgaagacaaaaaagaccggatgtatgccccggtcttttttgccgttcagcgaaacatttcgggaaggcatgccccgggattcctgtccggcatgacgggacaaccgggccggaaagtggtataatagctgtaaaagccgctattatatctgctttaggccggacgatccgcaggccaaacctgctgcccgaaggaggactgagcgatgagctgtatttccgatactgagaaatttgcccggcgcatgtttcggatatgcctggtgcttgcagccggaatggcattgatcactctgtattggtggattctttgggaccggatctggctgtcgccggtcgattcgatcgaggaggcactctacggcaggaatgtcaccggcattctggcgcagctctggctgctgccgggtatttcacccgcaaagctggtcagccaaaccagtgctgacagctttctgtgagtcacccttgcgttggtatcctggacccggttctggctgaaaattacccagggccgggagagaaaagggcgtccggattccgcccgctcttacagccgggtcgctttttttacaactgcgtttctgactgtatttgatgggattggcctggatacagcggcggcactgctgcccatttttctgattcttctgcctctggagcttatctggcggcgcttttcctgtacatacgagccaatccgctcctgacccatgggacccgctttgcgcgggtctttttttctgacagaaaccggaaaaagccctgcgtaattgtaagtattttataaacattgacgcccagcggcttgaatgcctcaaaatatggtgtataatatgggggtaacacgaaaatttctcttcctttttcccgtaaggagtttttgatatgccaaatcagagaagatcccggccggtgcggcgttccagcggttccggtgatgtttttatccctgtgattattattctgctgggaattaccattctgtccctgctcattgcctttgtctggcagaaatggcaggataagtatgaccccgattacctctatcccgattcccggccctcctcgtcccagagcgaatcctcttcggaggcctctgagccgtcttcgtcggaggagagctcgtctgagccggagtcgtcggctgtacagttcggtcagccggtgcccgaaagcgaacgggtgaccagcgcctacttcaatgacgctgtctttatcggcgactcgctcaccaccggtatccagctctacaatatcctgccggataccaccgtgctggcggcagtgggtgtcggcctggagaatatctatacccaggaggtcatcggcaccgaggacagcaagcagaccattctggaagccgcagacgcccagcagcctgccaagatctatgtgatgctgggtatcaacggtctgaagggactgggtgcggacaagactgtggaactctaccgtgacctggtacagcacctcaaggaaacccatccggacagcattatctatgtgcagtccttcatgcccatcaatgagcagaagtttgaggccaactatggctacaacctcaccaatgccgagattgatgaatgcaatgaaaagctgatggcaatggctggggaagagcaggtttactatgtggatgtcgcttcggcgatcaaggatgaaaccggcggcctgccggcagagtttaccaccgatggtctgcacttcaagggtgaatactacaataagtggattgattatctcaaggaacacactgtgccggaaacctgatctgacggcacagctgcgataaagattggaggatatctacaatgaagaaactgatggctgcggtacttgccgcaatgatggtactgagcctttccgcctgttcgagtaattcggatcagggcgaaagctccagctcgactgcttcccagaacagcagctccagctcgcaggcttcggaggttactgccgacagcctggctcagaagatggtagaggcgaccaccttcaatgatgaagtgatcgcaatcagtgcagatgtagtgcccaactactacaccattccggacagtgtggaggactatgcggtttatatgtgtcccaccggcgccactgtggaggagatctcggtattccgcaccagcgatgccgctgctgtggaggagatgatccagacccatctggatgcccgcaagacagagtatgaatcctaccgtcccgatgaagtgaagaagctggacggcgccgctgtggtaaagagcggtgactatgtggcagtcatcatcgcggatgacactgccgcagctgaggcagcttttgaggcagaactgggcgcataagcggtttatttgggggtgaccggtcatggctgtggaatgcgccgctgtgctgatcatgctgctggctatgagcatcgtgatccgtcagaagggaaaccggggcgctgatctggcaatgatcccgctctatttcatgccggcgatctatctggcagcgggctttgcggcccggtatctgccggcagatggcccgatccagccggttccgttccggatcgtctgctatctggtggctctgctggcctccggcatcgtaatgggtgtactgggactggctgtccgccgccgtcggacccgacagatgtattttgcccttgccggcgggttcaacctggttctggctgtgatcttcacactggaacttctggtatagcttcgcattaaaaactccggggagtactcccggagttttttctgttttgctgcaaaataagtgaaaaaaatccgctgctttcggcggatctggcagtgaggaagagcagtgggaaccgggcttcggggcggctcggtcaaactgccaaaaacagcccggcaccccgcggaaaaactgacagcctccatccgcgccggaccggcagacagacgggtttttgttgtcctttgggggagtttgtgatatacttaaacagatatcgtggagcggtctgcgcttttttcgaccggacaattttccgctccatgaacagggagtttttctatgatcattctgggcattgaccccggttatgccattgtgggctatggcgtggtcagctatgacaaccgaacctttacgcccatcacctatggggctgtgaccaccgaagccggcctggatgcggatctgcgtctggaacaggtttacgatgggatcagcgccgtcatcgaccggtatcagcccgatgccattgccattgagcagctcttcttcaccaacaacaagaccaccggtatcatggtggcccaggcccggggcgtgatcctgctggctgcccggaaaaagggcgtgcccacctatgaatacacccccatgcaggtcaagcagtcggtggtgggctatggcaaggccatcaagaagcaggttatggagatgacccgcattctgctgcggctggagaagatccccaagcctgacgatgctgccgatgccctggcgattgccatctgtcacggacattcggcgggctcctatatgggacgcagccgtctggaggaggccattgcccgcagtgaggcacgggatgcccggcggatggcggaaatcgaacggagaaagctggaacagagaggataaaaggctatgtattattcactcagaggaacactcattgccgcggacggacgctcggcggcagtggaatgcggcggcgtggggtatctgtgcaccgtgtcagcccagacctattcccagctccccgagcccggggaggaagtactgctctatacccatctctcggtccgggaggacgccatggagctctatggcttctccacccaggtggagcgcagctgcttccggatgctcacccaggtcagcggcgtgggcgccaaggtggcgattgccatcctctcgtccctgaccgccgatcaggtggcctttgccatcatggcaggggattccaaggcactcaccgctgctccgggcgtgggtcccaagctggcccagcgcatcgtgctggagctcaaggacaagttcggcaagggcacagccgagttctctgccggatcgctgtcggcttcggtgccggcagtcatgggcaagggcagccggggcgaggcagtggcagccctggcagccctgggttacagccaggctgaggcggcatccgctctttcggactgcgccgataccatgagcgttgaggatatgatccgggcagggctcaagaagctctcccggaatctgtgaccggcagtacagctgaggaggcgggaatttggacagatttgacatggattttgaaaaccgcattgtcactccggaatataccggcgccgatgcggagacagaattttccctgcgtcccaggacgctggcggaatacatcggtcaggacaaggccaaggagaacctgagcatctatatcgaggccgccaaaatgcggggcgagaacctcgaccatgtgctgctctatggccctcccggactgggcaagaccaccctttccaccatcatcgccaatgagatgaatgtgaatatccgggtcacctccggcccggccattgaaaaacagggtgatctggctgctttgcttactaatctgagcgagaacgacatactctttattgatgagatccaccgcctcaaccgcagtgtggaggaggtgctctatccggcgatggaggactttgccctggatattatcatcggcaaggggccttcggcacggtcgatccgcatcgacctgcccaagttcaccctggtgggcgccaccacccgggccggacagctcaccgccccgctccgggaccgcttcggcgtgatcctgcgcctggagctctacaccgtggagcagctcaccgagatcgtcacccgcagcgccgggattctgggcatcgaatgcgaagccgagggcgctgtggagatcgcgcggcgcagccggggcacgccccgaatcgccaaccgcctactcaagcgggtgcgggattttgctcaggtgctgggcaacggtgtcatcacccgggaaatcgccgatgaggcgctgcgccggcaggagatcgaccagctggggctggatgccatcgaccgccggatgctcaccactatcatccgcaattacggcggcggtccggggggtctggaaaccctggcggcagccatcggcgaggaatcggtgacgctggaagatgtctatgagccgtatctgatgcagattggcttcctctcccggactccccggggacggtgtgccactccgctggcctatgagcatctgggactgacgccgaacgggcgtccccagccggcgccggaggcagatcagctcagcctgctggaggacgagtaaggcgcatctgcattttgtgaggcaggaaagctcctcaccggcctgtgacgcacaggccacagaacgaattttggaaggaacgattggtatgggcagaattttcgggacagacggaatccgaggcgtagccggtgtggatatgacaccggaactggcactggatctgggccgtgcggcggcaacggttgtcaaggagcggggcaatacccacccgcattttctcatcgggcgggacacccggatctccggcggcatgctggagagcgccattgcggcaggactctgctcggtgggcgctgatgtgaccctgctgggcgtgatcaccacaccgggcgtggcctatctggcccggaaatatcaggcggacggagcctttgtcatctccgccagccacaatccctatgagtacaacggcatcaagctctttgatgccgagggctataaattccccgacagctatgaggaggagatcgaggaactgatcctggacgacctgcggatgtatgcgctggtggacggacaggacttcggacgcatccgggtggacaacgatgccagaaccgactatgtggagtatctggcctccactgccccggcacgggccgagggcatccgggtgctggtggactgtgccaacggcgcagccagcaccaccgccagggagctgttcacagccatcggggcggacttcaccatcatcaacgacacccctgacggcatcaacatcaatgtggactgcggcagcacccacattgaacagctctgtccccgggtggtggagggcggctatgacctgggcatcgcctttgacggtgacgccgaccgcatcatcgccgtggacgaacggggcgaagtggtggacggcgatatgctgctggcagtattcgcctgctatctcatcagccaggataagctggcccagcgcaccctggtgggcacagtgatgagcaacatcggcctgctcaagttcggcgagatgagcgatgtacatatcgaaaccaccaaggtgggcgaccgctatgtgctggaacggatgcgggaacagggctacaatctgggcggcgagcagtcgggacacatcaccttcctggactacatgcccaccggcgatgcccagctctgtgcggtgcagcttctgggcatcatggcaaagaccggcctgaagctgtcggaactggcggcggtgatgaagaaatatccccaggtgctggtgaatgtcaaggccagtcagcaggtcaaggacttcctgccggagaaccgtccggtgcaggagctgatcgccgagtgcgaagcccagctgggcagccggggacgggtgctggtgcgtccgtcggggaccgagccgctgatccgggtcatgctcgaaggcgaggacctggaggagatcaccggcatggcacagaggattgcggaaaagatcgaggagagtttgtaaatgagagcagcagaacactggaaagactttgaggtgctggacacctccggcggggaaaagctggagcgctggggcaatgtgatcctggcccggcccgacccgcagatcatctggaacaccccgaaaggggattcctggaagaagatcaatgcccggtacctccggtcccggagcggcggcggcagctgggaagtgcgcaatatgcctgccggcagctggaccatcggctaccgggagctgaccttcaagatccagcccactggcttcaagcacaccgggcttttcccggagcaggcggtgaactgggacttcatggcggagaagatccgggctgcccggaaaaaggaccccaaccgggagatcaaggtgctcaacctctttgcctataccggcggcgccaccattgcctgcagtgcggcaggcgcgtcggtctgccatgtggacgcctccaagggcatggtggcctgggcccgggaaaacgcggccctgtccggcctggagaaccgtcccatccggtggattgtggacgactgcctgaagtttatccgccgggagatccgccggggcaaccggtatgacggcatcatcatggacccgccctcctatggacggggcccgggcggtgaggtctggcagctggaggagcaggtctatacactggtggaggaagctgccaagctgctgtatgaggacagcctcttcttcctgctcaactcctataccaccggactttctgcttcggtaatggagtatattctgggtgtagtgatccgggaccgcatcggcggacaggtttcgtcggatgagatcggtctgccggtgaagagcaccggttatgtattgccctgcggcagtacagccatctggcagcgctgacaggctgcggtatttttaggcgaacgggaggaaaacctgtgaaagattttatcagtgcggaggacatcagcttcggctatgaagcggacgacggacagatgatcccggtgctggagaacctctccatctccatccgggaaggggagttcgtggcagtgctgggacacaatggctcgggcaagagcaccctggcaaagcatttcaatgcggtgctgctgcccagcggcggtgcctgttatgtggacggcatgaataccgccgatgaggacaagctctttgacatccggcagacggtgggcatggtgttccagaacccggacaaccagctggttgccaccattgtggaggaagatgtggccttcgggccggagaatatcggcgtcccgccggcggagatccgtcagcgggtggacgatgcgctccggtcggtgggtatgtatgagttccgggaacatgcgccccatcagctttcgggcggacagaagcagcgcattgccattgccggcgtgattgccatgcgtccccgctgcattgttctggacgagcccaccgccatgctggacccccggggccgtgtggaggtgctttccaccatccgggagatgaacaagcagtacggcatcaccgtggtgctcatcacccactatatggacgaggctgcccagtgcgaccgggttgtggtggtggatgacggcaagatcatcctggacggcacagcccgggaggtattcacccatgtgcagctgctcaagagccgcggcctggatgtgccccagtctaccgatctcgccaatgacctggcagacgccggatattccattgaccgctccatcctcggggaggaggagtgtgccgatgccctggcagccctgctggaggcacacggcatccattcgacaaaacaggcagaggaggcatagtacaatgagtgtgatcaaactggaccatgtcagctatgtctactccaagggcactccctttgagaaagtcgctgtcaatgatgtgaatgtggagattgaaaagggcgagttcgtgggcgtgatcggacacaccggctcgggcaagagtactctggtgcagcatctcaacgccctgctgcagcccacctccggcaaggtgtatattgacggggaggatatgtgggccgatcccaagcaggtgcggaagttccgcttcaaggtgggcctggtgttccagtaccccgagtaccagctctttgaggagaccatctataaggatgtggcctttggtcccaccaatatggggctgtcggagcaggaagtggacgagcgggtccgtcatgccactgccatggtgggcatcgaccccgctgacctggagaaatccccctttgagctgtccggcggtcagaagcgccgggttgccatcgccggtgtgatggcgatgcgtccggaggtgctggtgctggacgagcccaccgctggtctggaccccatgggtcgggaactgatcctgggccagatccgggaatatcaccgggagaccggcagcaccattctgctggtatcccacagcatggaggacatcgccaactatgcgggcaaggcactggtgatgaacgacggttccctttatatgtacgatgatgtggagaaggtgttctcccatcagaaggagatcgctgagatgggactttcggtgccgcaggtggcccggatcttcacccgtctggcggagaagggctatccggtcaatcccaatgtgttccgggtggaggacgctgtggcccagatccgggaactgatccgaaagggggaaaatctccatgcttaaagacatcaccatcgggcagtacttcccggggaccagccccatccaccggatggacccccggggcaagatcatcttcatggcgatctatattgtggaactgttcctggcaggcaacctgcaggccatggcagtttccgccctgtttatcctctgctgctacaagatctccggcattcccatcaaaatgatgctcaagagcatcaagccggtgatcatgctcatcgtctttacgggtgtgctgaatatgctctttgtggacggcaatgtcctgttccagttcggctttatccgcatcaccgatcagggtgtgttctatgccattgtcatggcggtacgcatcatctgcctcatcgccggcaccaccctgctgacctataccacttcgcccatcgtcctcaccgacggtctggaacggctgatggagcccctcaacaagctccatgtgccggtgcatgagatctcgatgatgatgaccatcgcgctgcggttcattcccaccctcatcgaggagaccgacaagatcatgtcggcccagaaggcccggggcgccgattttgaaagcggcgggctcatggacaaggccaagagcctggtgccgatcatggtgccgctgtttgtgtcctccttccgccgggccgatgaactggcgctggccatggagtgccgctgctatcatggcggagccggacgcacccggatgcgccagctcaaataccagggtgtggactatgcgggctttgccgtatcgctgttggtactggcggcagtggtggcagtgaacgcctatttcccgtccatttactaaaagaggaggcaccatgagaaatctgctgctgcatatcgcctataacggttcccggtaccatgggtaccaggtgcagcagaacgccgtttcggtagcggggaccttccagccggtgctggaaaagatcctggctgagaaggtgcagctcaagggctgctcccggacagataccggcgttcatgccaacgactttgctgtgtcgttcaagaccaactgccgcatcccctgtgaagggctggtgcgggcactcaacaacgacctcccgccggatatggcggcgctgcgctgtgaggaagtggacgaggaattccatgcccggtacagctgtaccggcaagcggtatatctacaagatccgcaacagcgagatccgcagtccctttgaacaggatcaggtgtgggtatactacaagtaccccatcgatgccgaggcactgaacgccgctgcccaggggttcatcggaacctatgactatcaggcgttctgcagtcctgggggcagtgtggaggacacagtgcgcaccatctatgaattcactgtccgccgggatggggagatggtggaattttctgtgaccgg

SEQ ID NO: 1553 - DNA, 6344 bp, Unknown
  16S sequences of unknown bacteria
tgcggtcctggcggcggctgcgccgcgcatgatgcgctgcgctgcatttgctcaggaaaccgagataagctgcattttctgcctgccgggctggaatgttgcgcgaaaggatgcggaaaaaagcccacagaatgatagccagacccagcagctgcaccaggggcaggtcacagaaaatgccgaagatacagatgccgagatagatcagcagcagtgtgaaactgagttcatcactgccatagcggccggccataatgttttgcagccattttttcatagggacatacctcgcagagcagaaatcgttccatgcaaaattcaaagattgtttacattttttacccctttgtccattgcatgggcatttggattgtgctatgataattagcagtcgaagggtgagagtgctaaaacacattcttatcgttcctattataatcacaatgcacgcaaagttcaaatttttcctgcattgtttaaaatttatttacattatgaacgcgctgcctgccgttccggcatgtgggcgcaatcgtgtggaggttgaaacgcaatggcaaagaaacaatttaaagccgaatccaagcgtctgctggatctgatgatcaactcgatctacacccacaaggaaattttcctgcgggagctgatctctaatgccagcgatgccgaggataaactgtgctatctggcgctgaccgatgacaaagtggggatgaaccggagcgacttcaagatcgagatcaaagccgatcccgaagcgcggaccctgacgatcaccgacaacggcatcggtatgagcaaggaggatttggaaaacaatctgggcgtgatcgcctcttccggttcttaccgtttccgccaggaaatggctgaaaaggatgaaaagaacgaggatgtggacattattggccagttcggcgtgggcttttattcggcgttcatggtggcggataccatcactgtgacgaccaaaaagtacggcgaagaacaggcttggcagtggaaatcctccggtgtggacggatataccgttaccgaagctgaacgcgacggcgtgggtaccgacattgtcatgcacatcaaggaagacgccgagggcgaagattattctgtgtttttgaaggagtacaagctcacggaactgatccgcaaatactccgactatattcgctaccccattcagatggcagtgaccaagcatcagcgcaaggaaggttcccccgaggacaagcctgagtacgaggatgtcaaagaggttgaaaccatcaacagcatggtacccttgtggcagcgccgcaaaggcgaggtgacggacgaggaatacaacaaattctatcaggagaaattcttcgactatgtggcgcctcagcgtaccatccccatctctgtggaaggcactgtgacctacaaagctctgctgtttattcccggcaagaccccttatgatttctacaccaaggactataagaaagggctgcagctctattccggcggtgtgcttattatggagaactgcgccgacctgctgccggattacctgcgatttgtcaagggtgtggtggatacgccggacgtgtcgctgaacatttcccgcgagatgctccagcatgaccggcagctgaaggttatcgctgccaacctgaaaaagaagatcctggcggagctggcgaaaatgctgcgcgaggaccggacgggctacgaagcatttttcaaaaacttcggccttgatctgaagtacggtgtgattcagaattacggagcgaataaggacgagctgcaggatctgctgctgttccattcctccactgaggagacgctgaccacgctgtccgaatacacttcccgtatgccggagagccagaaatatatttactatgctgccggcgccagcctgaccgccattgactccctgccccagacagaactggtaaaagccaaccacatggagattctgtattttaccgagcaggcagacgaatttttgacggaggcgctgcgcacctatggcgaaaagccgttccgcagcgtgctcaacgacgatctgggcctggagaacaaggaagctgaggagagcggcgaaggcgaccacagcgctgtgctggactttgtcaaggaaactctgggagatcagatcaaagaggcgcggctgtccaagaagctggtcaaccaccctgtgtgcctgacggccgaaggcggcgtcagctttgaaatggaaaaatacatgcaggccgttcagccggagatgggcgtcaaggcggagcgcgttctggagctgaacgcgtcccacagcgctttcaaggcgctggaagcggcgctggatgccggcgacaaggacaaggcagccgattatgtccgcatcttttttacccaggcccagctgattgcgggtctgccgctggaaaacccgtcggagtatgccgacctggtatgcaaactgatgaagtgatacagagcgggacttgccgcgcggaagctgcggactgctttggatgaaatgaaaagaaggggggcaaaagcccccttctttgttttttgggatggtgcggcggacttataaaaaatcgtgctgcgctccgccgtcgctgcccagctcttccagtacacaaacgatggcttcgatgcgctggaaacactctgcatcggagagtgtgggatcggagatgatttccttgatctgccggagcgcctgaaaacagcgcagttccaccagctgcgctggattttgctgcagcgtgggaaaggaaatctgcatgggatattgcgaaagaagtttcgtaagaagttcctgataaaatgtttcttctatgagtgctgtcatatttctcacctctaacggatattttactatcgaatgatagtaaaataaacatcattgttcggtagtacataaagtagggcatgaggtgaatgcttttatgtactatccgcgactgaaagatctgcgtgaggacaacgacctgaaacagaaagagatcgctgcatttctgggaattgaccagcgggtatacagcaattatgagaccgggagacgtgaaattccggtgcatttgctgttgaaactggcagaatactaccataccagtacggactatattctggggctgacggatgatccatacacggagcgctccaaataaagcggatttcttttttgaaaaaaatgaaaaaggctcttgacaaacgacaggtggtttagtatactaaagcacacaaagcaacaaaccaaacctttgagaaagagaagtaagcagagccatgggatgtaaagcgagccttgggcggtggaagcaaggcctgaacattctgctgaatgggcttttgagggcggcttgaaccgggactgttcccgcagtagatgccgacgggttcccacccgttatccatcgggacacatatgatggtatgtggtgcgagcggacgccgcgaggcgtcaatttgggtggtatcgcagaagcgaagcggcttttgtcccatggttggggcggaggctgtttttcttttatccgaaagggctgccggcaacagcatttctccatctgccatcccaaatttctgtttaaaggagaaaaaaccatgaaaaagaacacgatgaaaaagttaacggctctggcctgcgccggcgcaatgtccctgtccctggcggcctgcggaaacggcggcaattcggatccctcctcttccggcgaggccggcggcgcggaaggcgtgaagattggcattctgcaatatgcccagcatccttcgctggataactgttatgaaggtgtgctgcaggggctggccgaggccggctacacggatggggaaaacagcgtgagtattgagttccagaatgccaacggcagtacttccgacgccgacctgatggcaaagaccatggtgtccaccggctgcgatatgatcattgccgttgccacgcctgccgctatgagcgcttatgctgcagccaaagatgcggacgtgcccgtaatttacgctgcggcttccgatcccatcggttctggtcttgccaaagatcttaatgctccggaaaccggcgcttcgggcaccaaagacgcgctgaatctggagggccagatgaaaatgatccgtgcgtttttacctgaggcggacaccatcggtatcctgtataccaccagcgaacccaattccgtggcgcatctgaaaacgttccaggagctggcgccggactatgggtttaccatcgaagcggtgggcatcaccaatgaatccgaagtggcttccggtgcggcgactctggtggccaaaggcgtggactgtgtgaacaatttcaccgacaacaatgtggtcaacaacctttccacgctgctccatgccaccgacgaggccggcatccccgtgttcggttcggaggaggagcaggtgcgcaacggctgcgtggcttcggaatcgctggattatgtggctctgggcgcggaaaccggcgcgatggcggccgctgtgctcagcggcgaggcagatattatgacgctgcccgtttccgtggtggccgaatccacaccggtctattccgcggccaactgcgccaagttcggcatcacgctgccggagggatacagctccgccgccaatctcgatgaggcggaataaaacggaaatttgtacatttgcctgccgggaaaggcgcctttcccggcagttctcccttttctccgcaagggcggaaaaaggcaaacaggaggtagaacgatatggacgtcatcctttccctgctccaaaacgtcctggaggaaggcttcatctacggcattgtagccatgggtgtgtatattacctataaaatactggatttcccggatctgtcggtggacggcacctttccgttaggctgcgccgtcacggcagcgatgatcgtggccggcgtcaatccctggctggcctgcattgcctcttttgtggccggcgcactggctggctgcgttacggggctgctccatgtgcggctgcgcgttaccgatctgctttcgggcattattgtgatgacggcctgctggtccgtgaatctgattattttgggggccaaccagcccaatcctcttgcgggcaattcgctgctgcagttttacaatcagcccaccatttttacgtctttccccatgacgctgctgcccgatgcactgtaccgctgccgggtgctgatcctggccgctgtgctggccattgtggtcaaagtgctgatggatgcgtttttgcgcaccaagggcggtatgctgctgcgggcggcgggggacaatccccagttcgtcacgtctttgggccgtgaccaggggaatatgaaaattctgggccttgccatcggcaacggctgcacggctctggccggctccattctggcccagcaggccgaaagcgccacggtgtccatcggcaccggtatggtggtacaggcgctggcctctgtcatcatcggcgccagcgtttttggacgcatccgccgtctcaagcccacttcggcggtgctgctgggcaccatcctctacaaggcggtgctgctgatcgccatgctgtggctgccggcggtgttcctgaagctgaccatggcggcgctgtttgtggcggcgctgctgaccgaccgcattggaaagaagaaggggggcgttgttcatggctgaggaaaccaaacgcggcggtgcgccgcaggaagcgctgctggaactgcgccatatccgcaaggtgttcaacgccggcaccgtcagcgaaatggaagtctttcatgatttctccctgaccattcacaagggtgaatttatttccgtggtgggttccaacggatcgggcaaaaccaccacgctgaacctgctttgcggctccctgatgccggatgcggggcagattcttctccatggaacagacattacaaaaatgccggagtacaaacgtgcggcgttttttggccgagtgtttcaggatccggccaagggcacctgtccaaccatgaccatcttggagaatatgtctttggcggataataaaggcaggccctttggtttgggccgcggcgtgaaccggaaaaagctggacgagtacaaacagcagctggaactgctgcacctggggctggaggataagatcgacctgcctgtaggggtgctctccggcggtcagcgtcaggcgctggcgctgctgatctccaccatgacgcccatcgaactgctggtgctggacgagcacaccgctgccctggaccccaaaagcagcgaaaacgtcatggaactgacggaccgtatcgtgcgtgaaaagcagctctcggccattatggttacccacaatctgcgttttgccgtggaatatggcacccgtctgctgatgatggacaaagg

SEQ ID NO: 1554 - DNA, 32759 bp, Unknown
  16S sequences of unknown bacteria
agagttcaagacatccaacaaagggaaaacatcatttttatatctgtcaaaacggctcgcggaaattttgccgtataaacggtgaaaaccccgataacatcggggttttcacgggctgcatctattttgtagcccttttatggtgcgggtgacaggacttgaacctgcacgccggggcgccagctcctaaggctggtgcgtctgccaattccgccacacccgcatacgataaacgatattttaccccaaaatgcgagaaaagtcaagaaaaatattgaatatttcggaataaagggttataatttattaacacacataaattcctttcgtaatatgtattgtagcttgcgaaaggtgtgtgattatatgatatatcagcgcaaatttctttctgctttttggcgtgtattcattacgcttttactgatttgcgcacttattgcttcggttttctttatgcgaatgagaccggttataattcaatatgccgaaagcgtggcgcaaacagcaatgtacaatgccgcaaatgaagcggttttggaaattttaggcgaaaacggcattacatatgatgacattgtggtgctttcccgcggtgaaaacggcagcgttaccagtgcggaaattgatattgtgaaaataaatacgctgaaaagcgcaatatctggcagactttcgcgcaaggttgacgaaaaagagtattacgaggttaaaatacccgtgggtacatttttttcaagcgtatatacaaacgctttgggaccgaagctgcgctttaaaatgcagcttacggcaacggcggtagtcaatttttcccacgagttcaaatctgttggtataaatcaggttttgcatataataatgatagacatgagcatttcgggcagctttgtgatgataggttacagaggcggcgtgaccgccgcgacctcggcaatagccgcacagaccgtgatttcgggtgcggtaccgggggcgtatacgaacgttatagaaagcgaaaacgataatacggcgggacttattaacgattacggcgcggttatcgatgattaaacggaaacggagaaacggaaaatggatgtaaaggcagcggaagaaagaataaaatatttaagcgatacgcttaaataccacaacaaaaagtactatattgaagacgcgccggaaattgaagattttgagtacgacgcactgctgcgcgagcttgaagatttagagaaggaatacccgcaatttaaaaaagaggactcccctaccgttaccgtgggcggcgcggcactcaagctttttgccgaggtgacgcatgccgtaaaaatggaaagcttgcaggatgttttcagctttgacgagcttagagcatttgccgaaaaaatagataccgcgagaaccgcattttcggtagagccgaaaattgacgggctttcggtatcgcttgaatataaggacggacttttcttccgcggctccacacgcggcgacggtgtaacgggcgaagacgtgaccgctaatttaatgcagataaaaagcatacccaaagccatacgctttgacggcgagcttgaggtgcgtggtgaggtgtatatgccgaaggaaagctttgaaaagctgatagaacggcaggagcttatgagcgaggcgcccgcgaaaaatcccagaaacgcggcggcgggctctttaaggcagaaaaacccgaaaatagttaaagagcgcggacttgatatatttgttttcaatattcagcgaataacaggcaaggaatttacatcgcacattgaaacacttgattttgtaaaatttctcggttttcatacattaccgacatataagcgttgcgataatatagaggacgtcatttcggaaattaagcgcataggcgactcgcgcggcggcttgccctatgatattgacggcgcggttgtaaaggtggatagccttgagtaccgcaaagagctgggcagcactgcaaaatacccgaaatgggctgtggcgtttaaatacccgcccgaggaaaaggaaacggtgcttaaaagcattgaaataaacgtagggcgcacaggtgcgctgacgcctaccgccgtatttgacccgatacagcttgcgggcactacggtaagccgcgcaacgctgcacaacgaggactttataaattccaagggcataggcataggcgataccatagtagtgcgcaaagcgggggatattattcccgaggtgctgagcgtcgttaaaaagtgcgataattcatcggtctacaaaatgcccgataaatgcccctcctgcggctctcccgtaacgcgcgaggagggcgaggcggttctgcgctgcaccaatgccgattgccccgcgcagcttttgcgccacctgatacactttacctcgcgcgacgcaatggatattgagggcttaggtcccgcggtgcttgagcagctgctcggtgccgggcttattcacagcatagacgatatttattccattgattatgaagaggttaaaaagcttgagcgcataggcgaaaagagcgtagaaaaccttaaaaacgcgattgagaaatcaaaggaaaatgacgcggcaaagctggtttttgctttcggaatacgccatataggcagcaaggcggcggcgcttttaaccgagcatttcggcagcattgaggcaatagcggcggctactgcagaggaaatagagcagattgacggcataggcagcgttttggctgactcggcggcggagtttttctcgctgcccgaaaccgcagttatgcttgaaagtcttaaaaaaagcggcgttaatatgaagtccttaaaagaggtaaaggataaccgctttacgggaatgacctttgtgcttaccggcactctgcctacctacacaagaaacgaggctgccgaaataattgaatcgttcggcggtaaaacctcctcctctgtttctaaaaaaacctcgttcgtccttgcgggcgacgaggcgggcagtaagcttgacaaagcaaataagcttggcattagggttataaacgaggatgaatttcgggaaatgatactatgaaaatctccgaagacttggtttacgaaatattatccgcggtatcggaaattcccgagggcaaagttgcaacctatgggcagatagccgcgcttattggcagagagcgaaacgcgcggcttgtgggcaaggtattaagcgttgcgggctattacggtgattacccgtgccacagggtagtaaacgccgcgggcagaaccgcgccgcacttcttcgagcagtgcgccttgcttgaagatgagggcgttgagtttaaagaaaacggcacggttgatatgaaaaaatacaaatgggaatgttgagcgccctattggcagcccgaaaacatttcaaaatgattttttcggtaggtcagtaatccttccttttgcatttttgaaagctcggcgctcagcgcgctgcggtctgtaccgaggtaatcggcaagctgacggcggtcgtaaggaatatcaaacgtataagaacctgttgttttaatacactccgaaaaataagacataagccgcgcgcggatggtttttggtgtgatgttaagcatacgcgaggaaagctttaaatttttagaagcgcaaactgtaagcaaattttttaaaagcttcagctgcgcttcgttttttatgccgtcagttttaagcagcgcctgaatgttaataaaaagaatttcacttttttcatatgcggtgacgtgctgcagcattaaagagccgggaacgcaggcatacgcctcggcaaatgcgccgcccttttccacgcctgaaattacgctgttgttgccccaggcgtcgctcagctctattatcaccttacccgaaagcacaatacctatttcccttacaggctcgccctcgtaaagcacggtctcgcccttttcgaatatgtgttttcgagtattttgcgggcttaaaagctcccgcacctcattttcggtaagcccgcggaaaagcgggattttatttaataaatcatacaataccgtaaacctctataactccgcttttatggtaaagcgagggggtaactcttactgaatagcccctgccgttatccgccgtccattcaacgggcttacttctaggcacggcagaaacgccgagcagcatcataatagcgccgccgtgcattataacggcgctttcggtaagcccgctttcaatcatatcaagcacgattttattaaagcctacgcaaatgcgctttataaacccggagttatcctcacctccgggcggggctgacagcctgccggatgtccacggtataaaattcgggttgctttcaagctcggcggcggttttattctcaaacgagccgaaatcatattcctttaattcctcaaccgtaaaaggttcaaaatcggggtagagcacggcacccgtctggcggcagcgcagcatggggcttgaataaagcctttcaatttcgggataatcaatatcgtcctttaacaggcgcaattcgttcagcccctcgggggcgagcggtaaatcggttttgcagcctatgtaccgtccgtcataattcgcgtcggtagctccatggcgtataagatgaattttaagcgttctcattatatattctccaataattcggttattatgctgttggaaaccggcatgcccctgtcggttatcgcaaccgcgtcttcggttatttttacaagccctatacttttcaggcgttccgccgcttttataaagctatcaggcaggtcagacccgaaccgcctgcggtattcggcaaaatttatcccgcgcgacaaccgcaagcggagcataatgtattcggctgcgtctccgccgtcgccgtcgggcacaggcggctccctgtttaaaaaggctttaatgcttcgggggtagaaaaatcgctttccgtcaataaacgagtgcgccgccgcgcctatgcctaaatattcgtcgcaattccaatatttaaggttatggcggctttcataccccgggcggcagaaatttgatatttcataatgcaaatatcccttactttcgaggtattcgcatatatacatatattgctctgccgtttcatcgtcatcgggcagcgccagcgtagctttgtttttataaaacagggtgttttcctctattttcagtatatatacggatatatgctccggctcaagccccacggtaaaatcaaggctttttttaagactttctgtatttgagccgggcaagccacacattaaatcgagcgaaatatttttaaagcccatatcccgcgccgctttaaccgtttcggcggtgtcctttacggtgtgcgttcgcccgagcagcaaaagctcatcatcactcccgctttgcgcgcctaccgacagcctgtttacccccgccgttttgcaggcggaaagaaattcggcggagttgcccgtggggtttaactcggcagttatctcggcattatcggtaatacaaaaagaggagcgcgccgcccttaaaaggggaacaattctgttccccaaaagcgacggcgttcctccgccgaagtagacagtatcaacagggcggcagagtttaccgccccaatttttaaaggattcacaaagcccttttacatattcctccgtaagctcgtttgtaacgcaggcggaataaaaatcgcagtatgcgcattttttcgcgcaaaagggtatgtggatataaagacctatggggttatcagtcaagaatttcacccatgcagctgccgggaactgcagcggcatttgcctcgtcggtatctatgtgcatagccagcttatatttggggctgacgcgagccacaacatcaccgaaaacaagcgcgcgaccctcggtcgggattttaacgctaacaatctgcttgtccttaatgccgtatttctcggcgtcctcgggggtcatatgtatatggcgctttgcggcaataacgccctcggtcagctcaatttcacctgcggggcctaccagcttacatacacccgagcctttaatatcgcccgattctcttatgggcgcggtaacgcctatggagcgtgcgtctgtaagagacagctcaacctgtgtttcggggcgggtcggacctaatatcgacgctttaagctgtgatttcggacctactatagtaaccttttcctcgcacgcaaactgacccggctgcgaaagatcctttttcggggtgagcttgtgacccttgccgaaaagtatttcaagtgcctcgtctgttacgtgaacgtggcgcgcggatatttcaaccaaaacttcttttgccattttataagaactcctttttttaatctaatttaattttaccatatttaaaaaagttttcaagtgccaaaatgcaaaaatcagttaagcagcgctctgtcgtttgcaaattcctcgccgctcaatttgctgaaggcctcaagcaggtattcaaccgtaagctttttcttttcttcgcccgaaacatcgagtattatttttccgttgttcatcataataagccggttgccgtgggctattgcgtcgcgcatattgtgggttaccatcatggcggtaagcccctcttcggctataaacttatccgaaagctccagcacctttgcggcggttttcgggtcgagcgccgcggtgtgctcgtcaagcagcaagagcttgggttttttcattaccgccattaaaagcgtaagcgcctggcgctgaccgcccgaaagcagccccacttttgccgagagacggttttcaagccctaaatcaagctcggaaagcatttttttgaactgctcgcgctcgtgcttgtttatcgcccatttaagcccgcgcctttgacccctgcgggctgcaagcgccatattttcctctatccacatatcagccgcagtgcccatcatagggtcctgaaaaactctgcccagatattttgcgcgcttgtgctcgggcagctttgtaacgtcggtgccgtcaattattatagcgccgctgtccaccaggtacacgcccgctatcatattaagcatggtggattttcccgcgccgtttccgcctataacggtaacaaaatcaccgtcgttaagggttaaattaagcccgttgagcgcctttttctcgtttattgtgccggggttaaaggttttataaacatttttaatttcaagcatcggcttttacctcctctgcgggtttcacgcgtttttcggcaattttgcctttccagtagggcaccccgaggaagagcgccacaaccgccgccgtaagcattttaaggtcgtttgcggggagaccgagccacaaaacaaaggaaataactatatagtaaattacgccgcccaaaaccgcgccgaaaagtttaagggcaaagtttttaaatatcttgccgaataccacatcgcctattattatagcggcaagacctattactatagcgccgcgccccatattaacatcggcaaagccctggtactgcgcaagcagcccgcccgagagcgccacaagaccgtttgatacaacaaagcctattatcttgtttgtggcggtatttattccgtttgcccgcgccattgcctgattgcagcccgtggctctcagcgaatgacccagttctgtgccgaagaaccaataaagcagcgcgattattacaacaacgaatatgccgcagactataagtgatttatttatgttcctgagagaaaccaaaagtatttttctgtatttcatagccgaaagcggctgattcgccttgccgctcataatgcgaaggtttaccgaataaagggctatttgcgtaagtattccggcaagaattgcaggtatgccgaatttagtgtgcagaacgcccgttacaaagcccgccgcacagcccgcaagtaatgataaaagcatggcaagatatatgttcattccgcccgcggtacatacaaccagcaccgcgccgccagtgccgaacgagccgtctaccgtaaggtcggcaaggtcaagtattttataggtgataaacacgcctaccgccataataccccatattgcgccctgcgccaccgcgcccggcaaagaactgagaaatgatagcattttttaattcctttcaaaaccgcaataagcgatagggtataatacgccctatcgccatagcttaatttttttatttactgaattgctgtgtaatcgctcggaacggttatgccgagcttatcgcagcgctccttaatatactccttaaccggggcggaatcaaaagcgatatccatatcggcgggttttttcccgtttacaagtatatcgtatgccatttcgcccgcttttttgcctatgctgtagtagtcgattgaaagggttgcaatgccgcagccgttgcaaatgcccttttcacccgctataaccggaatttttgcaggctctgcaatgttgtttattatctgcacgtttgaagccatcgtgttatcggtaggaacataaagtgcatcaacctcggcgcaggcggtggttacaacctgagctatatcgtttgaatcggcgctggtgtattccttggtttcgatgccgagctttttaagatatttagtaatttcggttgcctgatattttgagtttgcctcacctgagcaataaagtatgcccacctttttagcgttcggcagcagttccttgaacatttccgcctgcttatcaagcggcgctaaatcagatgtgccggttgcgttaatgcctgtcttgcctgtccaatcctttaaatcaatttcaagggcggttgcataatcggttattgaggtgcccacaatcggaatactctctgttcccgaaacagcagcctgcaaggcgcctgtggcgtttgcaaatataaggtcaaccttgcttgatacaaactggtttactattgtggtgcaggtggttgattcgccggcggcgttctgctccttaaattcaaccttatcgcccaatttttcggtaagagcgtctttaaagcccttggtcgcagcgtcaagcgcttcatgctgcgccaactggcaaatgcctacggtatatttatccttttcctttttttctccgcagcccgcgaacgaaacgcagagggcggcagcgagtgtaagtgctgttgccgcagataatatttttttgattttcatatcaatctatctcctttgaatgatattatatcgctttaaagcgataaagtcaagcgcttttttaaatataatgcaaaaacagcggtaataagcggatttctactgtcggtagagtgattttcggcagctctacaaatgtattttttgcaatagagtaaataaattcacatatagcttgaaaaaataccgccgaaagcgttataatagatacagataacgcaacgtaaaggagactctgctatgattacgatttttacagatacatcggcaaacctgccgatttcgcttatacgcaaatataatatttcacttttgcccttttcttataccgtgaacggtaaagatctgccgtatgccgacgaatgggaaacgggcggtaaaaaattttatgacgcaatgcgagagggcgccgaaattaaaacctcaatgataaaccccgatattataaattccggtttcagaaaaagtctcgaaaacggggacgacgtattatatataggtatgtcgggcgggataagcggaactgcccacagcgccgcaatggttgccgaagaattgcgcgaggagtttcccgagcgcttaatagccacaatagatacctacgccgcctcgctcggcgaggggatgctcgttatacgcgccgccgaaatgcgtgacagcggaatttcttttaaggatattgaagcctgcattttagatgaacgcaataccatgtgccagtattttacggttgacgatttaaaataccttaaaaaaggcggaagaataagcggcactgccgcaacaataggcacactgctcaacataaagccgattttaaagggcgatgaaacggggcatattatatcctgcggaaaggcacgcggcaaaaaagcggcgcttacaacccttgccgaaaaatacggtgcgcttgccgccgataaaaaggcggatataggcattgcccatgccgacgcgcccgaggacgcggaagcgcttgttgccctgcttaaaaagcaaggctttaagggcaaggtacttaacgcttgctatgagcctgtaaccggttcgcacgtaggccccggcacggtggcgcttttcttcccgggaacggagaagtaatgcaatcgcggctgctgccccaattctgcggctctgcctgttaaaagataatctgctatagctgtaaaagcttatgcacccgagggttaaactgtaaacccccgggtgcatattttatttcaaagtaaaaatcaaagccgtattttactggcgctgttgaccgccgcgcaggtgttttcacttcatagggaatcttaaaaagaactctgcaaagccctttaaattaaaggggacaatggggtaaaggtaatttctgcccgaaagggtcttaacggaaagcatacatattataataaacacaagcccgcctataaatccccacagcccgaaaattccgcttaaaataagcagtaaaaggcgctctaatttcatagcatagcccatttcaaagcttgggagtgaaaagcccgctattgcggtaaacgccgtaatgagtatagcctctcccgaaaaccagcccgcctttaccgcaaattccgaaagcaaaagtccacctaccacgcctaatgaatttgaaagcgcatctggcgtattaaggcttgcaagcctgagcccatccaccgcaaattcaagaattaaaagctgggcaagcattggcacctcgcccgctttttcgggaatgagcacgccgagccaatcgggcacggcggcgggatttttaacaatcagcaaataaagcggggttataaccacgttaagcagggccacgagcatacgaattattctgatatagcttgccacaacgggcagaaaatagtagtcgtcggtctcgcggaaaaagtccgaaaaggatatgggaattatcataaccgcgggggaattatcggctataagggcaattctgccgtccaacacgcaggcagaggcataatcggggcgttcggtaaatttaaacttggggaacgggttgaaaaaagcatttttctgtaaactttccgccagcgcctcctgcgtcattgaaattccgcccgcctgtatttctgtcagtctctgccgcaaaatttcaagcacgcgcttatccgccttgccgtcaatataggctatggaaatatcaagctttgtttccctgcctatctgcatatattccatacgcaggcggctgtcgcgtattctgcggcggagcattgccgtgttcataacaagggtttccacaaagccgtcgcgcgggccgcgcagcgacctgtccttttgcggctcttccaccccgcgcattgggtaggtgcgcgtatctaccaaaagcgcgcctcgtatgccctcaattatgagcaccgaaggccccgaaagcactgcggttacaacctcgcgggcggtatatgccgcgtcggtttcaacatagggcagcttattctcggcaaagcggctcatatcgtcaattcccgctatttcttcgggggtttgcttgtataaaaattcaagtatcttttcgtaaacctcgtcctttataaatccgtctataaagtagagcgccgcgcgccgtccgcctattttaagcgggcgttttataatatcaaagcttttatcgggcttaagttcattgtcaatttccgcaatccattcgtcgaaatctttcaaaaaaaaatcacccttccgtcggtttatttttcccgacggaagggtgatttatgtgttacttatgctgtgccgaatttttaattaaaaaatcgactttaagtattcaatgctggtcttagcgcactcaagcggggttttacccatgctgggctgatcctgctcaactactacccactttgcattaacttccttgcaggcttcaagtattgccgggaagttctgaagacccgagcctaccggacggaactcaaaggtgcccgaggcttcctttttgctgctttcgtcattgccgataagcgcgtacatattgccgcccttagtacctgcaaaatcctttaaatggacgatttcgattctgccgttatacttgcggacaaagtcagccggattttcgccgcccacatttacccagcaggtatcaagctgagttgataaaagctcgggtgaaatcgccttatagagcaggtcaagcttatactcgccgtcaaccttttcaaattcaaaatcgtggttgtggtagcaaagcttcataccgtgcttatttgcaagctcgccgaactttttaacattctcataaaactcggcgtttttctcgccgcccgcaagatattccgcgtttatccacggaataacaatatacttgcagcctatttcggcgtatgtcttaaaggtttcgtcgccctttttaagctcatcatagggaacgtgtgcggaaatgggggtaacgccggcatcagcgcacattttctttacttcctcggcggtgtgaccgaaaaggccggcaaattcaacgccgtcatacccgaaggacttaacctttttaagagtgccggcaaaatctgcctccatatcgtctcttaccgaataaagctgtaaagcaataggaaaattatacataacaatttactccttaacaaattgaaagttaatccggtttattttaattaaacttccggaatttcaatttctacttcgtggccgcaatcgcttgaacgctgaataccgtcaagtatagcctggttgtagataatctggctggtcggaacaggagcctcgccgccggtgataaccgcattgaggaaggagcggatcttgcgatcaaacagatcaggtgtagcgggcaacagcggtacaacggtctcaacaggctcgcctgcaacgtcatgataaatagtcataggcttattgaaagagccgttccagcaatcagttgacggaatacggagagagccctttgtacccataataatggtgtctccgggagtgtcaaggtgcatataccacgcaatacggaagtcaagaattatgccgccctcaagacggatataagcggaagcgaaatcgtcaacgctgaacttcttagcgcactcgggcttgcctacctgagcataagcctcgggggtggtgccgaaataatcggtagcggtaccggtaacggttaagggcttcgggttgccgagagcgttcataaccaggtcgattgaatagcagccgatatcgccgagagcgccgagacccgctttatcgttctcgataaaggtctctgaccagcttaccggaataccgtgtctgcgaccgccgcctgtctgaacatagtaaattctgccgagctcgcccgactgaactatcttcttgatcatctgcatattagcgtcaaaacggggctggaagcctacggaaactatcttgccgctcttcttttcagcctcgcggatagcgatagcctcttcaagagtaacagtcatcggtttttcaagaagaaccggaagaccgtgctcaagcgcgtaaattgtgcattccgcatgggtgcggttgtaggtgcaaacgcttaccgcgtcaaggttcatggtgtcaatcatttccttgtaatcggtgaacgccttagcctctacctcgttatccttgaaaaacttttcagcctttccgggtattaagtcggcgccggctactacctcaacatcgggctgctttttgtagcttgcaatgtgtgagcctgcaattccgcccgtaccgattataccgatacgcagcttgcggtcacttttaacctcgccctgagcgttctgattgcttgtgaaattgttcatgtcaagtgccattttttattcctccaaaaaatgttatattcaggcttaagccgaatttatattacaaactgacgcatatagcggcagcttaatgcaacggaatccataacgcgctgctttgagccttcaaaggctttatcctcaacctcaatgcaagcatagccgtcatagcctatatcggtaagggctgaaacatattttccccagtcaacatcgccgagtcccggcagcttcgggctcataaaatcaagcggataccccattatgcccacgtcgtcaagtttatctttaaacagcttaatatccttaaagtgaacgtggaatattttatccttgaattcataaagcggctttatgtaatctatatgctgccaaataaagtggctcgggtcgtagtttatgccgaaattatcgctgggcaaaagctcaaacatcttgcgccaaagtctcggggtggtaaacaggttctgcccgccgggccactggtctgcgccgaaaagcatggggcagttttcaattgcaaccttaacgcccttttcctcggcaagctttataatcggcggccatatttccttaaataattcaaggttttcctccaccgttttagtctggtctctgcctataaaggtagtaaccatattaacgcccaaaagcgcgctcatatttattacctttttaaggtgagcaatgtttgcctcgcgtttttgcaggtcgccgtccatagtgttgggataaaatgcgagcgaggaaatttcaataccctttttcgcgcagaaatcctttatataagcgatatactcaggtgatgtattatccacgtcaatgtgacttacacccgcatatcttctttccgccttgccctgcggccagcaggcaacctccatacattcgcagccgttttgaacggcattttcaacggcttcttcaaaggtaaagccgtcgtaaattgcgcttacaatgcctaatttcataaaatgcactcctttaccgtatatttaatgtttgcgctttgttttattaagtccatacagatatgaacattgtgcgtaagtgccgataccgtgcggtaatcgccgtaaaattcttctctgctttcaatgtaatcggcaaatttaattgcctcgtcgcccattatctcatcgcgggcaggcatttccgaaaaaattgtttcggtgccgccctttacaagtgaaatatcaccgtattgcgaaacagagccgatttttaaaacgccgctgtcccccactatttcggattttacggcggattgccccgccttgctgtaagtcagcactgcggtaaacccgtcatattcaaaaattgcggagcccgatttatccgcaccgttttcaaaaaacgaggcgcaggctttaatgtttttcggcataccgaacatatcaaccgccgcatacacgcagtaaacgcctaaatccataagcgttcccgcgcagagcgacatatcgaaaatattcatatgttcgcccgccataaaagcgtcatatctgcttgagcgctggcaaaaatttattcttgcaaccgaaatatttccgatttgcgaaagccccttaagcaacatatcccgccctttatagtgacggctcataatcgcctcggcgtaaataagcccgcttttatcggcaagggacaaaagctcatcatattccgccgcatttgttacaataggcttttcgcagaaaacatgtttaccgttttgcaaaaaaagcttgctttgcgcaaagtggcaggagttcggcgaggctatatacacagcattagtcgcgctgtccttcgccaaagcgtttatatcggtgcaaaagccctcaaagccctgcttttcggcaaatgctctgcccttttcggcggtacgcgaataaacggtatgaaatttgaaacgtcctgttttacgcgcggcggataaaaacttttcggtaattccgctcgtgcctattacagaaaggttaagcattaaatattaacctcaatacgctgctttttatcggacgactcaaacgccgcttccataacctgcataacgcgacgaacctcgcagtgtttaatggcaggctctgctttattatcaagcacggcgcagaaattgcggtaaaaatcgtgtacgttgcttacagggcgctcaacctcatacatatcaagggtaatttcatcacgcggtgccatggttttggtaattcccgcggcggtctgcacgggcagaacctctttttcgttccacgccttcatgcgcgcaacctgtgcttttttctgccagtcctcaataattgcgctgccgtttttgcactgcaaataaaagcgcggcattgcaataaagttatatgtaccaacctcaatataggcggtttttccgctttcaaaataaagggtcagcttaaagccgtcgtcaacctcgtcggtcgtaatattggtaaccgtgcagtaaacgcttactattttttcctttataatctgcaaaatctggtcgataaggtgcacgccccagtcgagtatcataccgccgccgtagggcttgtggcagcgccagtcgctcggtattccgcgcgagccgtgtattctcgattcaatgtttataagttcgcctatctcgcccgaatttacaatctgcttcattgcaagaaagtcaacgtcccaccgtctgttctggtgaacggtgaagaattttcccgatttatcggcggcggcaatcatttcatcaagcgccgcaaccgacatttcaaccggcttttcgcaaataacgtttttgcccttttcaagcgcctttataacaagctccttgtggcaatcgttcggcacggctattacaaccgcgtcaaccgccgtatctgccagtacttcatcgtaagaagcgtaagcatgtattccgtttttctcggcaagctcagcttttttcgggtcaatatcgtaaatgccggtaagcgcggcaacgtcgctcgcaagtatctgccttgtgtgccagccgccctgaccgccgtagcctataaccgcaaaattctttttcataaagggtatcattcctcgatttttttaatattggggcaatcaatttccttgcgataatcgttgtaagcccaatgaattgcatttttaataacgcgaattatctgcgggttgtggtaagtcgggaaggtttcatgccccggctggaaatagaaaatctttccgtaaccgcgcctgtagcagcagcctgcgcgcaatacctcgccgccctcatagctgcctataaatataagcttatcgggctcgggtatgctgaaaggctcggcataggtttcctcgtgctctaattttatgtaacggtcaataccctcggctatcgggtgtgaggggtcgcagacccaaacatactcacggtcgccgttttcgcgccagccaagcgagcagggcgtacccataagcagcttgaacggctttgaatggtgtgcagaatgaaggaatacggcacccatgcccgaaagcactgcgttttgcacacgctttgccacctcgtccggcaccttatcgtgtgcaatatgcccccaccaaataagaacatcggtattgctgagcagctcgtcggtaatatcctcaacattatcgagcgttacggttttaaccgtaatatcatcgtctgtcaggtgctctttaagggcgttatgtattccctcgggatatattgctttgacattatcatcggttttttcatgtaaaaattcattataaacggttacgcgaatcataaaaattcccctttccttttatattctaattttacaaattaccgtagattttatcaagtaaaatatattgtattttatagacaaatattgctatgtgtggaaattatttcaaattatcgtgcaaatatatagttcttgagttgcggtgcagataaacattcagcacaagccctatacccatgtataaacagaaaagcgacgtgccgcccgcgctgaaaaacggcagagttatgcctataaccggcagaacagacgtgcacatacctatatttattaccgcctgggtgaaaatcattgcaaaaatccccacacaaataagttttccgctgtccttttttgaaagccgcgcaacctgcaggcacctgaagcagatgccgccgagcagcagaattacagccatgcagcccaaaaagccgaactcctcgcctatgcttacgaaaataaaatcgttaaagccgtagggcacaatgccgttctgcgtgaaatcgccgtttaaaaagccctgccccgcaaagccgccgtttgcaagggcggttctgccgcgccactgctggtaggtgggccattgctcgctcgggtcgcgctttgccgccgccttaaaatccaaaacgctgaaaattgcggtaagcctgtcccgctggtcgtcgttcataacaaagaaataaataatgggcgcggcaattaaaattacgggtatcatagccaggaaatacttttttgaaacgcccgccgcccaaagcataaacacaaccataaccgcaaaaacaagcgctgttccgtcatcaccctgaaagtgtataagcaaaaccggaaaagccccgtgcaggcaaacgggtattaagtatttaagcttgttaatattgggctttacggcgcttatatgcgcgctgaaggtcagtacaaagcaaattttcaaaagctctgccggctgaaaggtggtaaagcctaagtcaagccacgccttatcgtccgttccctcgggggcaaagcctataaagaatgtaagcataacgggaattacacccagtgccgccgcaagataccagtagcgcagaatttttgagtaatcaaccgccgaaattataagcgcggcaacaacacccgccgcaaagcagataaactgaataagaaacgggcggtaggtagccctgtaatgggtggcggaaaaaaccgccgcgcagccgtaaagactggtgaaaatgcagattataagcagtattttatccgattcgcggataaagtccgccatttttgccaaaaggcgtcgcaaagcgcacactcccctgtgtattttataactccattatatttgatttttccgtaatatgcaagtaattattgacaaaccggctcaataagtgtaaaataacattaggtgttacaataccgaacaccatgcagagtagacagtcgtgcgttaagtgctgccgggacggggagttgccgggcagacgaaggaattttttccgcggtacggcagtcgcatcccgctgccggctaatatgaagatgttatctccttattatcggtaaaacgggtaaataaggaggtttttttatgaaaaaaagtaacaaacagtacattctgcaaaccgtaaccgcagcgctgctaatagcgctgaaaatcgtgcttgaccgctttttatcctataatgtgtggaatcagcggtttggtttcgcctttatagcaacagcctttgccgcggcaatgctcggtgcgccgtgggctatggtagttgcgggcgtgggcgattttttgggtgctttgcttttcccgagcggcgcatattttcccgggttcaccctcaccgcagttttaaccgccgcctgcaccgcctttttcatacacaaaaacgccacctttttacgggtgacgttaagtgttataataaatcagattttcggttcggtgctgcttaattccctttggatctcgctgcttttcggtaagggctattggggacttttgcccggcagaattattcaggcgggagtaatgaccgtgctgcaaatagtgcttacatatttccttttcggcaaaaacagccctataaaaagccgtttttcaaagcttttcagcgcttaatgtaccaatgaaagaccctcgtatccattaaggggatgcgagggctttttgcatatatatttaaaattactctttatactccgtttccgataaaagcccgtaatggtctgacggatatttaccacccacggtatcccttattatctgcgaattaagcggaataacattgcctgatataaagcaataatctatatgctgccccgccgccagctttccgtagttatggtaggtagtgcttgaatccttagcggttacggcgtttacatcggtaaagtattccgaaagcctgccgtatgccggtgactcaggcgttgcattgaagtctccggttaaaattgtatactcgcccgacatatttttaacggtttctatgaataaatcggagctttttaactggcagtcgtccccaaagccataatgtgtattaagataattaaaaatttttctgttctgcttatcaaaaagccttgcccaaatacaaattctcttacatttccaatcgtcccagccgtcagactggatatgcggcgtatccgaaagccagaaatagcccttatctatacactcaaagcgttcctttttccataatatcggcgtagactctaaatttgccgaatcacgatagcggttgaatatttcgtatttttcgccgtaatccttttttataatatcgagccactcgggcgttgcttcctgaaagcctataatatcggcgttatatttatcaagaactgctttcagtctttccgccctttcttttatggaattaccgtccgggtcgttcgcacagcgaatgttaaaagatattgttatcatataaatcaccctttaataatttttcttaaatttgccaccctgcacgcacgcataaaggcaagcgtaaggtatttttaagtaggcataatttagttttccgcataataaaatttcctcataactaattattccttgagcatttttccgcgtcaattgcaagcacaagcattaaggcgcaaagcgcgtcgctcgggtttgcaacgtctataacgtatgtatcggtccagttgaaaatttcctttgaaacggtggctacaaccgagccgcccgcaccgtataccgtgtaatcccattccataaacccgccgtctatatgccagccgttaaaatcaatgttgaacgacggcttgaaaaaggtgaattcctttttaatgcagccaatatagctgttgcccatatacagctcgaatttcggcagaaaggtgaaaaccctttcctttaccgtgccgagctctgcgccctcagggctgaaaattttaaggcagtgcccccacgaaagctgaccctttactatgtaaagcgtgttgcccgcttcgtcgtaaatatcgtagctgtcaaaccaggaaaaaaagcgctgtttaaaaagcattttcataatatcactctccgatatttataggtacaccgtttacttcaatttcttcatcggcgcggataagtatgtatttcacaccgtcaataacgcgggtctccacaagctcgctgcgctcggggtttatttttatgcttatatccgctcccgtaagctctaagcgctttgtttccacaagattttgcgggttaagccgcgctttttcgccgaagctttcatcaaaccccgccttaaaggtttctattttttcatccgccatatcggcagaacgcagaatatcgcaaatatcgtcacgcgaaacggcaagcggctcgcgctcccggctttccttatgctcggtaatcataccgcctatttcatcctgaatatttttaattatttcaaggttgttttcgtcgttcgttacgccgtttaacagggaattaaaggtctcgcgctgctcggcggcgggcattggcggttcagctttgaaaaggcggtctattatttccgagttgttcgccgcggaatccttagtgtaaaaaagcgcattgtaaatattcgccgcgcggtcatcaaacgcggggaacataaagccgagcaggggggcggttataaccgaatttgcaacaatgtttttaaatgtgttatcaaaggcggcaaagcttaattgcggctttgtcattttcacagggaaaactccgcacaaaaaatatttgaacagctcggttgagtcctcgtcctttttgccgtcctcgcggtaggtaaaaacatcgtaattatccgctgcggcaagtataaggtatgcgccctcaaccctcacggtttctattatatctgaaaacagagcttttaattccggctcatcacaaagcgcagaatcgcgcagttttaataagcgtttgtgttcctcgccgcccagcacctgctcgtttgaaaactcaatatctataagatttctgtcaagtccgcccgaaagcagctttttaagcagcgcgagcattgactctgtttcatcctgcgttaaagcggcaagcggctgattaaattctgcaacaatttcgcggttttcattaacataacagccgtgcacacctataatatttgttttttgcgggttaaaacgccgtcttatttcggcaacctctttttcgttcaagctatttcctcttttcatttttgcggtaaaattattatatcaaaagcatattctgttttcaataaatacttgtcataaaaatatgtatttcggcatatgttttaccaaaagacagtttgactgccgcgagttaaaagcatatggaggaaaaattatgacaaacgtgagcatctacaaggatattgccgcgcgtaccggcggagatatttatatcggcattgtgggtccggtacgcacgggtaaatctacctttataaaacagtttatggataagctcgtgctgccgaacatttcgggggattaccagaaggagagggcaaacgacgagctgccgcaatcatcctccggcagaacaataatgactaccgagccgaaattcatacccgaaaagggcgtgcagataaaggtggacgattcatccgctatgaatgtgcgccttattgactgcgtgggctacatagtgccgagcgcgctcggatatattgagggcgaccagccgcgaatggtaatgacgccgtggtttgaagaacccataccatttaatatggcggcagaaataggcacgcgcaaggttataaacgagcactcaacaataggcttggtaataactaccgacggcagcataagcgatattccgcgcagcgagtacgaggaagcggaagaacgggtaattgatgaattaaaagccataaacaagccgtttattatactgctgaactgtatgtaccccgaatcgcccgaggcgcaggaattggcgcagagattgaccgaaaaatacggcatacccgtgcagccggtaaactgcttagagcttaacgaagaggatattaagcagatattatcacgcatactttttgagttccccataaaggaaatatgcataaatttcccgcgctggataaactcgctgccgcttgaccactggctgcgcgccgagcttaccgacaccataaagaaatcagctgcaaatgtgcggcatataagggatataaaatgctttgaaacggcgtttgcaaacagccagaacgccgacggcgctgcggtgaacggcattgacctcggcacgggcagcgcggatgttatgataaaaataaacaacacgcttttctaccgcgttcttgccgagagcacgggacttaaaataaacgacgagcaggagcttatggacagcataaaggagcttgcaaaaatcaagaaggaatattcaagggtaaagggtgcgcttgacgaggtggaggctacaggctacggcattataatgccggaaattgaggacttaaagcttgaagagcctgaaattatgaagcagggcgggcgctacggcgtaaggctgcgcgcgtcggcaccgtcaattcaccttatgaaagcgaatatcaccactgaagtcagccccatagtaggcagtgaaaagcagtcggaagacttggttatgtacctgctcagcgaatttgaagaggacccggttaaaatctgggattcaaacatattcggaaaatccctgcacgagcttgtaaacgagggactgcacaccaaactttcacgtatgccggcagacgcgcgtcagcgcatacaggaaacgatagaacgcgttataaacgagggctgcaacggacttgtgtgtattatactttaaagtgaatcggataatttgcctgctatctaatatagccccttcctcaaatttggaaggggctatatgtttttctatattaaagacctaaaatcattttcctgagcgaaacaatatctccggcgtctaatttaccgtcggcgtttatatcgttttggtcggtacgctcatttttttccgcaatggcttttttaagggcaattaaatcaagaatatcaattttgccgtcctgatgaagatcacctacggcaacgccgctataatgcattgtgatattggagggaaagtaaacgtcaaacttttcaaaatctacagcggttccgtcataatatacatcaacattttgtgttttgataccatataaagcccaatagccaattttctcaatacttttaggaaaataaatctcagtcagcttttcgcaatcgctgaaagcttcttcgcctattgattttactccgtccggtattgtaattttttcaagattcatactgctgttaaatgcataatcacctatttccctaaccatctcaagagcagtatcaggaaaagtatattctgttcccgaataagcgggcatcagccttataaatttggtttgctctttgttaaaaagctctgaatttgtcggcatataaaaataatcggaatttccaccgtatataatgtggaatgtttttaatgaaatacagccgttaaaggcactgggacttatataatttgtgcctgatgtaacgcttattttttcaatagatgagcaattttcaaatgcataatcatctattgtaacaatggtattcggcacattaagccagttgccgtttgtagcacgcaacttttcacaacccgaaaaagcatatttgcctatcctgttaatgttgcttgaaataacaaaattggcggttttattttgctgcattgtaaccttgctgagttcgctgcaaccgctgaacaaataatcaggtatttccccttctgaagtcccgtcaatagcatataaattagtaggtaaacaaacctcgctgaagattgagcaataggaaaaggcaccttcgccgattgttttaatattattttccaaatcggcattggtaagcttttggcatttactgaacgcataatcacctatacttgttactgtgctcggtatcataatatgactatatacgaagtatttatctatatatttaatttctgagaaccgataaaaggcataatttcctatacgggttatgccgctttcaattttcactgcttctatttttgttcgatacttataccaaggcgatacattatcaccatagtcttcaaaatcaggtataaccgcagtttcgttaatcggtgagattgtaagaacgttacccatatagctaacatattcaaccgaccatttaatttcaccacattcgccgctatcagcgatttctgttgttgccgcagccgctgcaaacggcaggcagcaaaccgctatgcttattgccgataacaccgataaaagcttttttacaccgtaagtcagtttcatttgcaaaactcccttcgcttttcttaaattatacagtataaaaaagccgcatatattaaaatttccgacccgtcatatgacagatcggaaattttttattgcaaaaaagactagacaatacaatcaggttacaatgcttcccatagcggaaaatttgtccgattattttgtctcgtcatttgaaatacggcagtattcctgcactcctcgacttcataaacgaaaaaattttctcgctatgggtcaaagattttgtaagaaaacggcactgtttagcggcgcggcgcgacgcgcgaggaatactgtcgtattgtgagcggagggcaacaatgccgataacggcggcgtttcttcaaaaaagcattgtaccctgattgtattgtctaatcaacagatttcattgattccaccatatccacctttttaaggcgcggggtaagcgctaaattgaccgccacggtgaatacaaccgttataaccgccgcaaacacaaaggatttcgggtaaatcgtccgcccgaacattacggattccatttcggcggtataaaccacaaaacggcagaggaacacgcccagtaccagaccgaccgccgtgcctataaggcttaaaagataggtttccctgcaaacgtaggagtttacctcacggtcgaaaaagcctaaaacctttattgtggcaatttccttaattctctcgcttatgtttatattcgtaaggttgtaaagcaccacaaacgcaagcgttcccgcagagattataagcaccagcacaatataatttatgcttcttatcatattatcaaagctttcaataacaaaggtggaaaaggacgcggaaacaaccccgtcggtcgctaaaatttccctcgtcataccgtcctgtttgtcggcagaaacacccgactttataagcaatgttaaatatgcgcagtcctttccgaaaagctctgaatagtattcgggtgtcatataaacatagctgttaatataattttcgcaaattccgcttatttttgcctgtgccttttcgccgtttttggttttaagggtcacggtatcgccctttttaatgccgtgagacgtggcgaatttttcggttattatcactccgccgttttgcagcgcgagcttttccccgctcttccgctcgcgcagcttcacataatcggcaaaatcctcggttttctcgggcacataaaagttaatttcaagctcctttccgtcctgcaaaacatagcctgtttcggaatgaatctctgtaaagctatcggtatttttgcggaaatattcaagcgtattatcatcggcggtatcagagagcagcacggtcaggtcgtactgttgaatgtcctcatattgcttaggtacaatatcgcctatcgcgtctttcagcccaaatcccgtaagcagcagcgccgtacagcccgaaatacctataacggtcataaacaggcgctttttgtatctgaacaggttgcgcgccgtcaccttgtgggtaaatttcatacgccgccatataaagcccacgcgctcaagcagtattctttttccgcttttgggggctttaggcagcataagcgcagcggggttttcgcgcaaagcggcaattaccgcccataaagtcgccgccaaaatacagataacggcggcaatcagtgcccctaaggatatgggcgcgttaaagctcaaatgaatttcgggcagacggtacattattctgtaaacatttataataaccgtggggaaaaggtaaagccccagcgccagcccgaaaaacccgcccgtaaccgccgcagcgcccgcgtaaagcaggtatttcgcggcaatggcgcaggaggaaaagcccagggctttaagcgtgcctatctcggtgcgctcctcgtctaccattcgggtcatggtggtaagcgccacaagcgccgccaccgcaaagaagaacacgggaaaaacctttgctattgaatttaccttttcggcgttcgcctttagggatacaaagcttacgttgctttcgcggtcaagtatataccattcgggctttttcactcggttctcggcggcggaaattattttatcttcaagccccattgcagcagccgccttgccctcgggcgcggcaagcgcagcatccgccgcaatttttttaagctcgtcatagcgcgcgttttctcttgcttcggctgtttttttcaaggcttcctttccgtcgtcgcgtaaatcctcatattcgccgtaaaaagcgttaagctcctttgcacctttaagcgtcaggaaaatatcggtgtaataatcggtgctaaaggtatcgtactcggtgtacagaaccaccgaaattctgccgtttgcaatatcggtgctttccttttctatggacatatacatcgggctttcaaccacgcccacaaccgtcagttcgtctgtggagagaacatcggcattttcggcgtgatacaccgtgccaagctcaggctgcgctaaaaacgggtttggcacaagtgctaagcactcgcccgccttttcggggtatctgccgcttttaagctcggttttgtttacctcgcctttgttttttatgctgtcgctgtcgtcagcatatatccgcgcggcggtgccgtccccgccgtcctttttaataagtatatctgcggtcttgcaaagcgccgcagccgctacgctgccgtcagctttcaccgcctctaagtcgctctcggtcagcccgcccgtcgatttaatgtttatatcccaaaaatcgtttttatcgtaataatcgtctatcgtggtgtaaaaatcgggcgtggtggataaaagccctgccagaaagcccacgcccagcgcggttatggcgaaaatcgcggcaaaacgccccaagctgccgcctatctcccgccttatgtgcttgaaatatgttcttttcactaccactcaatcctttcggcgggcagcggttcgggattaacggagttttccgtaaccttgccgtttttaatttttataaccctgtccgccatggcgcatatagcttgattgtgggttattattataaccgttgttccggttgagcggcaggtgtcgtgtaaaagctttaaaattgccttgcccgtgttgtaatcaagcgcgcccgtcggctcgtcgcacagcagaattttcgggtttttcgcaagcgcgcgcgcaattgatacccgctgctgctccccgcccgatagctgcgcggggaagttattcattctgccctcaagcccaacgcttttaagcacctcggcggcgtccagcggctcgcggcatatttcggatgctaattccacattttcaagcgccgtgaggttctgcaccaaattataaaactgaaaaacaaaccccacgtcatagcggcggtactcggtaaggcggcgggtgccgtattcgcttaccttttcaccgtctaaaattatatcgccgctgtcgcacctgtccatgccgcccagcatattaagcacggtggtctttcccgcgccgctcggtcccacaattaccacaagctcgcccttttcggcggtaaagcttatgccgtccgacgcgcgggttatgttatcgccgtttttataaaatttacaaacgttatcaaagcatatataactcaaagcttaaaacatcctttcctttattttacaaaaagattttaacacattccgccgccgattttgagtacagattgtgaattttcgggttttcgcaaaaaaacacttgattttatacttgtaatattgtataataacccttgtcaattttgccggtgtgatggaattggcagacgtagtggactcaaaatctacttcgccgtttcataccaccgttccgtaaacccttgattttacaaggttttttgaaaactgaatatgtaacttgcttttaatgtccctccacgatgtccctccgatttctcggacaggacatcgggagatgacttaaaaatataaatgccggtgtgtcggaattggcagacgagacagactcaaaatctgttatccgcaagggtgtgtgggttcgagtcccaccaccggcaccagaccttaacagctcgtaaacccttgatttatcggggtttgcgggcttttctttatgctctgctccggttatgtaacgcccctccaacaacagaaaattcgccgttttgcagctcattttcaggagggacattggagggacatgagcgattatttggagggatatacacccaaaatcgcattggcagacgcaacctttgaggcgaaattcaagtgcgtataaatgtttgaagtggtcgaaatgtcgctgtgtcctaaccactcctgaatttctttcaagctgacaccgtttgcatacaaaaggcttgcgcagctatgccgcaaatcgtggaaacgaatcttccgcataccgttcttttcaagcaccagcgggaaatgctgggtgatatagccgggttttacaagctctccgatctcgttgacatagatataatcggtgtattgccggcaatacgacctgccgcacagctttcggtttagctcctgctccgctttcaggcggtacagtacttcctcaaacggtggcacaaggggcaggctgcgatagcttgctttggtctttgtccgatccttttggataatcttgcttttgccgtcaatggtcgcctgcgttactgtgtgccgtatggtgattgttttcttcttgaaatcaatcgcatcccatttcaagcctacagcctcgctgcggcgcagtccgtaaaatgcgccgaggataacgccaagctctatggggtcgccctttaccacctcaaaaagacggtttagctcatcttcctcataggcgctgccgacaaacttttcctttttcggccgttcaatgcgatccgccgggttcgtgtcaatcaaaccaagtttgaaagcgtgctgcaacgcctttcggatatttgcgtggcggtgtatcaccgtgtttgcggaaacgccccgcaccgtcagttcataggtgtaatagtcctgaatgtgctttggctttatctcccgtaagagcaggccggggtggtgttcctcaaagtatgggataattttgctcttaattcccatagaatacgccccgtaggtcgtttcctccacattcttttttatcatttccagccagtcgagcagaaatgttgtaaagagtatggaatcggtggaaaccttgcctgtactgcgttctaatgctcttgcctccaactctgcttctttggctgaacgggcttctatgagcattttttcggcacgctttttgttgccctttacagggagccccgtggattttgacggcgtgtgccgtttaccgtattcatccacatagttgagtacgatatgatagtacccgtttttctctcgcagatgtcctgctaccataataaaacctcctttgaatggtacagcgtagattcatctgccattgacatttatattgtagcagaaagaatcccacaggccaaatgtgcaaacaaggttttacgcattagatttatctatcagttccaagtattccagaatgttgagcttcgggattcgatagcggcggccgacaatgaaacttctaatttccccagaccgcaaaagcctgtaagcggttttgtcgcaaataccgccgagcatttcacgcatctgctcaacattgactacatcgggataatcggcaaatagcagtttgtaggctgtttgtgattccataggcagcctcctatctgtttttcgggataatctcgtagtcgtaccctgtacgctgattacagtaggtacaggtgtctttttcggtttgctgcgggtcgatccggcgtaaagaataagcgcccgaaccgtagaaattgtcggcacaagcgctgcaaagacaaagaattaactttttcggtatgctctcaatcagaccgatactgacggcaagagcatgattgataccgcggatatgcttatcggacagatgaccgataaagtcacccaaacggcgtttatcaacggttcgcagttgttcaagcaaaacaatagagggcagttctaaaccgtcctctgcgttgatgtagtaatgggtaggcaacttcggctttgcgtccgttttgcttgtgacagaagcaatgataacggtgggactgtgcttgtttccgacattgttttggataatgacaacgggacgataaccctcttgttccgagccgatcccttgtcccaagtcagcgtaatacatatcacctcgtagatatgtttgattcataatgtttgacctcctttgaatttaaggcgaatattcgcctatgtaggaaatcaaacagcggcacagaattaaggtcaggaagatacaaacattctccgtttcagcagacccgtcccgccgtatgatttcatatttcaaaaacgatcctatttgtcctcgacaccccggatcgttatgggaagtcatcaaacggctggcggctcaccagctccacgggaatctcacccccggtaggttctctatcggctgctctcattgcctgcgacggctcacacacgaaaaatgctgctcgctcggactgtgactgaacaggagtatcattagccctattgcttatcatcgccataccgggagcctcccgatacttatagccggctgtttatcgctccttgccggaaatcagaaagccaaagaccgtataatcaaaataggtgtaatctcgttgcttctgttttccgcaaatcgtggcgcagccgctaatgtggcttatgctcatcacaatagcaataggaatgtgtttgatgaatgggtattcagttgtaaaagagcaaacccattcaccgcacaaaacggaaaacaggcagagagttttcgtacctctccacctgtttcctcacttaaagcctaaaacacagggactatttcaaaatttttttcaaattattcagagcggcataaatcgaatcctgcaccgtctgatatttgcatccctccatttctgcaatttgggagtatgtaagtccattgaaataatacagtatgagcctgcgccgttgtgtttcgggcagtttgtttatagcgttgtgcaacgcctcataccgcatattgcgaagaaccgcatcctcaaccgattccgggagaacaaacgcccggtcatatagagtagcttcggtaagctctgaatgctcgtaatgccgatccacttcattaagaaatgaaagatcgtccagttcaaagcaattcagaagctcaaacagttctttatttatcagcaattcccgcagtacaccttgtccgtcccgaaaggaaagataatgcttgtcctgccgtttggaaagtgtataggggttgtctttgtcttttctgcgttttggacgcttctcgtccatagtcgtttcctcc

SEQ ID NO: 1555 - DNA, 2754 bp, Unknown
  16S sequences of unknown bacteria
gatatagagagtcagatgtatacaccggtcgatcagattcaggaatttttaaataaagaccggagcaagccgtttatctgctgcgagtacacacatgcgatgggtaattcctgcggtgcaatgcacaaatatacagatctgacagatactgagccgtcgtatcagggcggatttatatgggactacatcgatcagtcaatcacgaagaaggaccgctatggcgaggcattccaggcatatggcggagactttaaggagcgtccgaccgattacaatttcagcggcaacggcatcgtctacggaggcgaccggaaggaatctccgaagatgcaggaggtaaaattcaactatcagaatatcacggcggtggtagaccgtgattccgtgcgcgtaatcaataaaaatctgtttgtgaatacggatgcattcgactgtgtggtaacggttgaccgtgatggcgtaccggtgcggaaggctatgcttgagacgcatacggcgccgctttccgaggagacctatgcacttttgcttccggaggagacacgcagtggtgagtatactgtgacagtgtccttccagctgaaggaggatacaatatgggcaaaacgcggtcatgaggtagccttcggacagggtgtttaccggataggcgatacagactggaaacagccggatgcaccgtttgaggtggtacgttctactcacaactttggcgtgaggggagagaattttgatgtgatgttctcctatctgaacggaggcctggtatcataccgctatggtggtgtggaaatgattgagatgattccgaagccaaacttctggcgtgcaccaaacgacaatgactgcggcaacctgatgccgatgcgctatgcacagtggaagatcgcatccatgtatttgtcacacaaatatccgaccggcggaccgtacccggcttccaaggaaccggaaatcgaagtgacaaaggaatgggcacgcatcacatttacttactgcatgccgacgataccggcaagcgagtgccggctttcctatcaggtctatggagacggaacgatccagacgaccctttcctatgatccggtgaaggagcttggcgatatgccggagtttggcgtgatgttcaagtttgatgcagattacaaccaggtgaagtggtatggcatgggaccgtctgagacgtatgtagaccgttgccacggcgcaaagctcggcatttatgaaaatacggttgcagagaatatggcacattatctcgttccgcaggagtgcggcaacaaggtccgctgggcgactgtcacagactacaagggacgtggcatgcgctttgagggtgatgcgatggaattttctgctctgccgtacactccgcatgagatggaaaatgcaatgcatccatttgaacttccgcgtgtgcattacacggttgtgcgggtagcacagcagcagatgggcattgcaggtgatgacagctggggcgcaaagacacaggaagagtacctgctggatgtaacggccaagaaagaatttacgttccggttccgtggcatctgagcacgcgttttctgcctgacagaggcttttaggtgcgatctgcgcacgaagaacagaaaacggaatggacagaaaagccgggcaggagcatgacgcttccgcccggctttttaaccgaatcaagcaagttagatattctgtttttactgaccgctcatgccggatcccatctggctctggctgttgccggacatctgacgctcctgattctcgatcattttccgaaccatttctccgccgacggatccattctgcttggatgtcaggtttccgttgtagccgtcagagagcggaacgcccagctcacttgctacctcgaatttaaaacgatccatagcgctttttgcttccggtactgctgttttgttagatgaacgatttaccatgtgaaacgcctcctttgtcttttctttttttttcattcggttttgtcttgcagctttgcttttgtttgctgcactcctattatgtgcaaactgccagaaactaaacaggaaaagtctggaaaaatggtaggaaaagaagaatttatataaggatagcattatcaataaaaaagagaaaaaaacaattgattttttggaaatttttgctataatgaaaatgagatttcaggaaaaacggaaaggttggtaagaagaaatgaatatcggttttatcgcccacaacagcaaaaaaactttgatggagaatttctgtcttgcttataaatatattttatcgaagcatcatttatatgcgacagggattaccggcagaagaattgaagaagtaacgaatctgaaggtttataagtttctccccggcagcgtaggcggggataagcagtttatggatatgatcgagcggaactgtatggatatggtcattttcttttacaatccgttggagaccagcccgaatacggcagatatcctgtcgatttcccggtgctgtgaccagtacaatatcccgatcgcgacgaatattgcgacagcagagtccctgatcctcggccttgccagaggtgatctggactggcggctgaatatccggtcgaatgatatgggttgaatatcgtaggaatgatcaaaggctgatatacttccgggaggatccggatgcatatcagcctttttaaccgaattaagctgcgaagcagcattcggttatgacatatcataaggaggggcccgcttgcgggaagattccttgtga

SEQ ID NO: 1556 - DNA, 2503 bp, Unknown
  16S sequences of unknown bacteria
tgctctgagtttgctggagaacctgcagcgggaacagctggggccgtttgaacaagcacgtgcattacgtgatctgttgaacctttggaattgcacgcaggaggcgggtgcacgcaggctgggtattgcgcagcctacactggccaataagctgcgcctcttgactttgacgcaggaacagcaggatatctgtaccgaagcaaacctgacggaacgccatgcacgggcggtgcttcggctgccgacttcagagctacgcacaaaggcgcttcgcacagcagcagagcggggttataatgtacagcagaccgaggcgttggtggagcgggtcctttctcacaaatcaaaaccgaagcgcagtgttatggtgcgggatgtgcgtatttttgtaaataccatagaccgtgccgtaaagatgatgacgggaagcggtattccggcaacggctgaaaagcgtgaacaggcggattacatagagtatgtggtgcgaattccgacacaccggcccgtcaattgaatatttttaagattaagccggccgtcttaccgtacaagagcctctcacagtcgtgctcctgtggattttgtaaagtttgtatacggccctttaaaattgcgttctccttcttctccatccaaacgccgggcggatgttccacgtggaacatccgcccggcgtttttatatggattgttccacgtggaacaaatgttttgcaggaaaaggaaaatgcatatgttccacgtggaacattttgcggaaaaggccttttaaagccccccaagctgtgttatactaaaacacagcggtgtaagcagaaaaagctgcctttaaaatcatagtgttgaatgtatacagaagaccggagggaaaaccgttgggaaaagtgatcgcagtcgccaatcaaaaaggcggggtgggaaaaaccacaacagccgtaaatctggcgtccagtgttgcggcgcagggcaagcatgttctgattgttgacctggacccgcaaggcaatactaccagcggcttcggcgtgacaaagcgcagcgtggaaaccagcgtgtatcagcttttaacgggggaggcaccggcctctgcgggcattcagcacacaaaataccgtgtggacctgattgcctccaatatccaattgtccggtgcaggcctggaattggtaaatatggaacgtcgggaatcccgtctgcgggaggccttgacaccggtcctgaatcaatacgattttatttttatcgactgtcccccttccctggacctgctcactctcaacgggctgtgcgcctgcgatacggtattggtccccatacagtgtgaattttttgcgctggaaggtctgtcggagctgatgaacaccatccgaaatgtcaaaaagatgtataacccttacattgagatagaaggcgtactgctgacgatgtacgacggaagactgaatttgacgcttcaggtcgtgcaggaagtgaaaaaatactttggtaataaggtttataagacaacgattccacgcaatgtacggctttcagaagcgcccagcttcggcgcgcccatcaattactacgacggcgcgtccaaaggtgcagaagcatacgcttatcttgcggcggaattcatcaaaaacaataagaaaggcggtgcgtgacgcatggcaaaaaaaggaggcctcggcagaggtcttgacatcctgtttcaggatacaggcgcgggcggcggcgatgaaggcgtcagcacgctgcgtcttgcggaaatagagccggacaaaaatcagccgcgcaaagcgtttgacgatacggcattgtccgagcttgcggccagtattacagagcacggcgttttgcagcccatcgtggtgcgtccgtcccccgcagggggatatatcattgtagcgggcgaacgccgctggcgtgctgcgcgcctggcgggcctgacggagatccctgcattgatcaaggatatctcggacacacaggccatggagattgctctcattgaaaatcttcagcgcgaggacctggaccccgtggaagaggctttgggataccgtcagctcatggaacggtgcagctatacgcaggaagcggccgcagcacggctttccaaaagccgcagcgcggtggcaaacagtcttcgccttctgaacctgccggaaaaagcgctgggatatctgcgcgcgggcaagctgtctgccgggcatgcgaaagctgtgctctcgctggaaagccgcgaagcgcagcagcaggcggcagacatcatcgtcaaagaagggctgaatgtacgccaggcagaagcgctctgcaaaaaaatggcgaaaaaaccccgtcccaagcgggaactcaccctccctcccctgccctgtgaggtggaattgagcctgaaagaggctctgggtactgaagtacatgtgcagtacaaagaaggcaaaggcagcctgaatgtgagtttctattccgacgaacagcttagggcgtttgcgaatctcttgggaaaatatgaa

SEQ ID NO: 1557 - DNA, 16381 bp, Unknown
  16S sequences of unknown bacteria
gtctgcatctgctgcgatattccggcatttctgcccggaatggggaaatccattatgagaatcctgttggaagtgtctctgtggaggtgcagcaggtggaatccattgcatccatggaagttggtggggaaaaagatgtcggagaaaattccgtttccgacagttatcttttgagcccgatgcaaggtggcagtatttctgaacacgtcaacgattatctttttcagggcgtctattttctggtggaaagcggtgtgatcagcaacgatcttttgctgcattatcagaaagcggcaagtcagatgcagattgaatactgttccatcacggatgacagcgatccttttttctccatgtcgcttctgtgcatttgtcttgcgctggaggacggggaagcatacgggctggaacaggatacccgtttttctgtggtgctggatgaggagaccggcgtagtctacgccctttccatacagggtgagccagatctggtgctaacgcagtggccataccgtttttctatcttggcagacctgatcggtgtttcctgtacggaatataaggaaatacccgcttccggggcagagtaccccaatgctcgttttaatttcggcggatattcctattgcctggagcaagcggcagaggcggaaggcggcgcgtttttaaattttaatctggatagcgactgattatacagaaaaggctgttcccggagctgtggggctcgtggggacagccttttgattttgcttcatcggcacaggaaggaaaaatatacgggacaacagctgtttcaaggcacaaaaaaggatgcacctactgcgcggctgcccggctagtagcagcttttgcagaaggagcatccttcccttatagagatagtataacagaattcgtgcgccgctgcaagtcctgcttagagcgtatccacgcgatccagcgaaacgtccagtgccccgcccacggcagaggcataagcggcgcgcagatcggtggtcagcgtttcacccaagtcagtgtttgccataaccagcatggcagtatcgccatatgcaccagcggctaccgcgttcgcagtgacacaaatccatttgttttgattgatgccgtcaaacatactctgggcaacggaagcggcatctttagcgctgttggcgcgcaccacgaccagagaataggcctgagagccgatcaaggcctcagaataataggcttccttgagttttgaggcatcggtcagccccagatagtaactgatttggtcactgttgctcaagtccactgcggtagggtcgctcagattcaaatccacgctgtggttggcataaatggcgttgatcagctccggaagagttccggaatacgttttggtttcatcctgagagccgctgccggtattgtttccgcttccgccgttgctgggcttgttgtcgtccggcttggaatccggtttcggctcctgctcgtcgtctgtcggcggcgttgtctctccgttaccctcctcttcgtcggtagaaggctgctgatcctcgatgctgctgtcctcgccgagcacatcttcgtatgtgctgtcttcgctggaagaaggctgtttgttggcattgccgccgcaggcggtcatgctcagcataagagcgagagccagggtgagagcaaatagttttttcatgatgttcgatcctccatgtttggtcgtattaccgctgtgtcagcggaagtcaatgggttgatggcttacacgaatatctgttatatttatctgcatcagggcagggattggtataatttttgatgccgttcatacccctggggccgataggtgacagaggatatgcgcggtccggaaacgccatatttggggtgaaacccgaacaggttaacgtactgcgcaagatcgtcctcttcagccgccatagcatccagcagttccaacgtagcttttacatcgtcgatggcgcggtgggtgttctggccttgcagaccataggtttcaatggcgttgcacagcttgtgaggataatcatgccggtctttatacacagtcatggcgtcaagcagtttgacaccctgcaggatgtttgcctgtttttgacgggcaagaaaatagtagagaaaacacaaatcaaactgggcattatatgctaccaacaacgtgttggggtggacaagcagcgcggaaaaagcagccgcagcgtctcttttggaaacaccttcggcctgcagcatactgtcagtaattccggtcagattctggataaaaggcgggatcgtccggccgggcgacaggcggatcagaagatccaactcctctgcggtttccgtttgtccctcgctgggaacggcgcgcagggcagccaactcaatgatctcgtcctgcctgtgttcaatgccggtagtttccgtatccaaaagaacgatattttcaaattgctgaaacaatgcgcttttcatgtctgttcctgctccgtttcctcataagatgcaatgacggaaagaaaggcggctccataacgggcggcctttttctcgcccacgccgctgagagaaagaaattcctctgcgctgtggggcctccgcgcggccatcgctgtcagcacagcgttggaaaaaacaatataaggcggaatgtgttcttcctgcgcgattcgggcgcgctcggattttaaagccaggagcaaggccggggaaacctctcccatttccggtgcgggggagatgggcgtactgcgctgcggcgcaatctcaaagcgcacaaacatggttacccgcgcgttttcaaacagtactgcccggctgcgctctgtgggttccagcgtctgatgggcactttgaatctgcagataaccctgccggaccaattcgtcaataaacgtacggatctgggcacgggaatactgccggagcaggccataggtggaaagcttatccagggaaaggctttgaacgcgctgttcccggctgcctgacagggtacgaaccaccagagtgtatccaacataatagcccagctgcttgtggatccgcaggacacaggaaaggatcatttgcgcttgggtagtaatatcctgttggcggaaggtgctgcagcagataccgcagttgccgcactgctgggcatggggctggccgaaatagtcaaggatcacgccgcgcaggcagcgggaagaggtacagtagccgatcatggcttccaggcgcctgagatcctgctcctgaatcctgcggcggctctccggatccaatgtttcgttttcgctgctgctctgcagcagcattttggctgtcagaatatcggcgggggagtagagaagaatacagtcggccggctcgccgtcccgcccggcgcggcccgcttcttggtaataagcttcgatgcttttgggcatgttgtagtggatcacataggatacattggatttgtcgatccccataccgaaagcgttggtggctaccatgacgctggcgcggtcatattggaagtcgtcctgattctgctgccgctcagcatcttccagccctgcgtggtagcggacggcaggaaggccatgcgccttgagatcggcgcagacccgctccaccgtggcacgggtggcgcaatatacgatgccgcttttgccgctgcgtccggcaatcagacggcgcagctcgctactgcgtttttgaggctgaagcacgtcgaaaaagagatttggccggtcaaatccggtgatcatacaaagcggatcctgcagtcccaaaatctgtgcgatatctttgcgcactgcttccgtggcggtggcggtaaaggcggccagcacgggacgacggggaagctgggcgagaaattcactgattttcaagtaactgggccggaaatcctgcccccattgagaaatgcagtgcgcctcatctacggccagcagggaaagatccagctgccggcacagggcaacgaacccctcgccggtcagtcgttccggggcgacatagacaattttataagatcctcggcgcagattgcggtatacggcagacatctgggcctcggacagagagctgttaatataagctgccgctacgccgctgtctgtcagcgctgctacttgatccttcatcagggatatcagcggggaaacaaccagcgttacaccgcgcagcaacagtgcggggatctggtagcacagagactttccgccgccggtgggcataatggccaaggcgtcgcggccggccagcaaggcgtcaatcacgttttcctgtccgccgcgaaaggattcatggccaaaatattgttttaggagatccagtttatccatgatgcagctcccgcttgatcggtgttcttctatattataccgtttttcgcgccgtttggcaaggctcattggggacagatacaccttggtgtcccggaggcataaaaattcccggcaacggcgagacgctgccgggacaaagcaaaaaagggacttacaggtaaaattgatggcatccgatggtagtatagtaggcccggttgtcggcgatccatgtaccctgcgacaggctggggttgaaaaagtaaaggcttttccccgctgtgttaacaccctgcagcgccaattttgccgcttgcacagaggtttccgtcggctcgttgtaaacggtgccgttgcttaccggttcgaactgtaccgcgtgcttgcggtcgaaaattacctcgtggatggtgtttggaaactcgtcggaatccacgcggttgagcaccacattgcccacggccacttggccggccagggattccccgccagcttcggcgcagataatacgggagagccagtacaaattctcaccgctccacttgtctgccgcgccgccagaggtgagggaaacgtggttcccgccgttccactcgacactgtaatcaagaaaagcgcccagggtgcgcaggggaagatacagtcgctcatcctgggacggaacggagacagacagcgtttggccgttgaccgtcagcgtctgtctggaagggtcgaccgacacgatattcccatctttttgcgctgcggcaacgccgtgggcgctgtcccactgtacggtccagcccaattccgtcagaaaatgccgcatgggtatgtaggtggtgctgttctgcatcagaacagggccatcgtagcttgaaccgtccaccagaatatgcatttgcccggcctgcgcgggcagaagcagcatactgaaaagcagtgtgccgctcaacaacgcacccaatcgttttgtgtgtttctgttttgtcatccaaaacctcctttccgttttccagtataaaaggaaactgccgccaggggcaagtcacaatctcttccatggtttccagaccctggaaaccatgccgcggcgcagagaaaagcagaagattgacactgtgtcagaatatggtataatcataatactgacacgctgtcggaaaaattgaaggaagggggcacgaagatgccgaaaggctcggtggagctgacgcaggcgcggaaagatgagatcattgatgcctgcgccgggctgtatgagcatatgagtttcagggatatcaccatcaaggaaatcggccgggccacatcgtttacccgcacgtcgatctacaattattatcagaccaaagaggagatctttctggcgctgctgcagcgggagtatgccgtctgggaacaggatctgtgcgccgtggcggcagaggaggccctgagccgcgcgcagctggcgcaggccttggcggcgtctctggccaagcgcccgcagatgcttaagctgctggccatgaacctgtacgacatcgaggaaaacagccgtatggaacgtctggtggactttaagcgagtgtacggtgcgtccatccgcgcagtggaagcgtgtctcgcgcgccttgtgccgccgatggaccgggcggagcaggaaacgtttttatattcgttttttccctttgtttatgggatatatccgtatgcggtggcaacggaaaaacagagcggggccatggtgcaggcgcaggtgccgatgacgctgcgtccggtttgcgagatcgcgttgacgggaatcaaaaaattattgggagtgtgagaacaatggggatgcgtatttgtgtgctgacaggaagccctcatctgaaagggacctccaacactctggcggaggaatggatgcgcggcgcacaagcagcgggccacacggtggaacgctgtgactgcgcccggctgaacctgcacccctgcctgggctgcggacactgtggtatggacggttcctgcgtgcaccgggatgacggggatggtgtgctggaaacgcttttacaggcagacatggtgttgtttgtaacgccaatctattatttcggcatgagcgcacagctgaaaaccatgattgaccggttttatgcgcgtaacgctgcactcgcggaaaagcacatgaaagctgcagtaatcgctacggcctgggacgataatgaaactgtgatgaaagcttttgctgcccatatggaagcgctgtttgactatcttcagtttgaacgctgcggaatgcttttggcccggggggctggcacggtggaaatgatgccgcaacgctatcggcagaaagcctacgacatgggcagacggctttgaaacggcggtgggacataaaaatatctgaaggaggacgtaacgatgagtaaaaaaatgctggtggcttatttttcctgcagcggcgtgacaaaaaagtatccgttgccctggcggacagtgtgggagcagacctatatgaaattgcgccccgggagccgtattccgctgcggatctgaactggatggaccggaagagccggagtacgctggaaatgaacgatccgaaggccaggcccgccattgccgcggcggtgcccaatatggcggagtatgacgtggtatttgtggggttccctatctggtggtatgtggcgccgcgcatcattgaaacgtttttggaaagttacgatttttccggaaaaatcgtggtgccgttctgcacttccggaggaagcggcctaggcggatgcgacagcaagcttcatgccaactgttccaccgccacggcctggaggcctggtcgcctgtggaacggcgctgtcacagcggacgccctgcgaatctgggtggacagtctgaaattgtgactgaagcagaaccggaatatcgtattgtccccggcggaattccgtttccgccggggacgatgtgttgcggcggaaaaataaaagaattttaaagagaaaaaagaccaaatcgtggtacaatagggaaaatcaggtctgcatttcggtgcaggaggagacgtacggcgaaaagaatcggaaaagaggaaacagcagtggacgaacagcggcatggaaaagcaggcgaactgcctttgacggcgaaggaaaaagccggactgtgtatcggtgcggatttctggcatgtgcgcggcgtgccccgtctgggcctgaaaggtattatggtggccgacggcccccacggcctgcgcaagcaggtggcaaaccatgacagtgcccgccccagcgacagcgtgcctgcggtctgtttcccgacggccagcgccgtggcctgcacctttgacgaagagcttgcctatgcgatgggccgggccatgggggaggagtgccgccgagaaggcgtgtcggtgctgctgggaccgggggtgaatctcaaacgcagtccgctgggcgggcgtaattttgaatatttcagcgaggatccctatctggcaggaaaactggccgcagccatgatccggggcattcaaagcaccggtgtgggtgcgtcgctgaaacattttgcggtgaacagccaggagacggagcgcttgacggtggatgaagtggtggatgagcgcgcgctgcgggaggtatatctgcggccttttgagattgctgtgcaggaggggaaaccctggacggttatggcggcttacaatcggctgaacggaacctactgctgtgaaaacaaagagttgctggatcttttgcgccgggagtggggctttgacggcctggtgatgtccgactggggggcggtgaacgacattcagcgcgccatggatgccggcatggatctggagatgcctggcatctccaacggccaccgggaagtgctggcggtcggaaggacaccggcccttgaccggggcgcggagaaggttttgcagctgctgggccgggcggaacagggtgcgcagcgtccctatgcatgcgattttgccgcccatcacgcgctggcagagaccatcgccgcctctgcagcggtgctgctgaagaacgacggacttttgcccggacggcggggacagcgggcggcggtcatcggcgcgctggcaggggagccccgctgccagggaagcggcagcagccggatccatccctggcggctggacagcccttgggaggcgctgtgcaaggaattgcccgacgcggtttatgtgccgggctatgatctggcggcggaggagtcgcaaagcgaacaaattgcccaggcgctggaagcggttcgcgggaaagacatcgtgtatctctttgccgggctgcccgagtcctgggaatgcgagggatttgaccggacgcatctgcgcctgccggcggggcaggaagcgctgattgaggcggtgtgccgggagaaccctcgtacggtggtgatcctgctttccggcggggcgctggagctgccctgggcagaccggccgggggcgattttgctggcacatctgggtggcgaggcagttggaacagccgtggcgaagctgctgctgggcgatctttcccccagtggaaaattggcggaaacctttccgctgtctttggctgatactcctccggcaggatgttatccggcccggcacgtggctcagcatcgggaaagtctctatgtgggctaccgctattatgatgctgcgggaaaagctgtgcgctatccctttggtcatggactgagctatgcccgttttgcgtacagcggcctttccgtgcagcatgcaggagagcagctcgtggtgcgctgccgcattgaaaatgtagggagcatgacggcggccgaaacggtacagctgtatctggctccgccgcgcaaagtggcgtttgctccgccgcagatcctgacggggtttgcccggcgtacccttgcgccgggagaggcggcggaaattaccttcactcttacgcggcgggatgtttcctattacagtcccgccgggaagtgttggaaggtggagggcggtgtttatgaactgcgcttgggcgcatccagccgagatatccgcctgcgcgcggcaatcgaatggccgggggacgatgtttgcccggcggatgcggcgaattgggcggcctgtccccactatgccaaggtggacggcgtttttccaaaagaggaatttgagcgtcttttgggttggtcggttccatgctaccggccgccgcagaaaggagagtatacgctcaataccatgccggaagagctggcatcctgccgcgctggacgcgcgctgctttgcggtattcggtgttttctgcgttggcgctgccggagggatgtgcgcagagaggcgcgggcctgggcgctggtgacccaaagtccattgcgtcaagcggtgcagggcggcgttccgctgtggctgatccggctgttgctgcggctgtgcaacgggcggcgccgcgcggtacagaagaaataaaagacctgcgtcctgcttgctatttctgcgctggcgcagtataataatccaataagataatctggcccgcagaaggtttgccttcccgcggcgccgggaagaaagggcggggagtgtgcagtgaaacgggtcatttgttcgccgggaagctatcttcagggccagggtgagctgagccggctggcggagtattatcagacgctggggcggcagggtgcgtatctgattgtgagccggtcggcctatgcagtttggaaagatcgtatcgacggcggattccgctccgcggggattccttatgaagtgcatctttttggcggggaatgctgtcagagcgagatcgacaaacaccttcgccaaatagggaactgtgacgtggtgctcggtgttggcggcggcaaggtgttggacacggcaaaagcggcggcgcactttgcccgtaaaccggtgattattgccccgacgattgcctccacggacgctccctgcagccgggtcgcggtgctttatacggagcagggcgccttttcccattacctttccctctcatccaatcccaacatggtggtggtggatacgctggcagtggctcaggctccggtgcggtttctgatggcaggggtaggcgatgcgctggcgacctgttatgaagcggaggctgcggcacgctccggcgcagtgaccatggccggcggatgcagcacccgggctgccctggctttggcgcagctgtgccgggacacgttgctgcagtatggacggcaagccaaggcggacgcggaacgaggcacagtgaccgatgcggtggagaatgtggttgagagcaatacgtatctgagcggcgtcgggtttgaaagcgggggccttgccgccgcccatgccattcacaatggcctgaccgtgctgggagagacgcataaactgctccatggggagaaagtggccttcgggactcttgtgcagctggtgctggagcgccgtgatgccgaggatattttgaaaatcatcgcgttttgccgcgattgcgggctgccgactaccctggaggagcttggcctggcccatgccggagacgaacggctgatgcaggccgcctctgccagctgcgcgccggaggaaaccatgggcaacatgccgttcccggtcacgccggaggatgtgctctcggcaatgaagcgggccgatcagattgcgcagctggctggtatgctgaaacgcggctgagggcggaagcgttttcggcagcgatccaaggcgcttcaacgaggtatagaaatataaaaagatgcagtatgttcagcatactgcatcttttttgcgccgctgctgcggcctgtgctgtgttcttttgcatatatggaaaaaatcccgctcctaagagcgggatcagcgaagcttgtttgtatttgtcatcagatcgctctggtaactttaccggaacgcagacaccgggtacaaacatatacatggcggggcgtaccgtttacaattgcctttacgcgcttcacattgggcttccaaggacgattggagcgtctgtgggagtgagacacctgaataccgaacgtaacacccttatcgcaaaactcgcacttagccatccgttgcacctccttgctgggaaccttgatttgccgcataaaaaatccatatgcagacagcttttatatattagcacaacccgtttggaaaagcaagcattttttcatcaaaaattttgtttttttacaaaaaaactggaaaacaaaaaaagtgcctctgctgcggggagaaaaggttgcgccaaacgggagggtttgatatagtgaatctaagcaattctgctgttttgagggaggggtattatgaaagtattaaactttggctctttgaatgtagattatgtatatcaggtggatcatatcatgcttcccggtgaaactcagagttctacgcagcgcaatgtgtttgccggagggaagggattaaaccagtcggtggcgctggccaaagctgggctgcccacctatcatgccggccaagtgggcaatgacgccgacggcgagatgctgctgcaggttctgaagcgcaacggcgtggactgttccctggtcaatcggatcgacgggccatgcggccacacttttattcaggtggacaaagatgcgcagaactgtatcctgctttttggcggcgccaatcgttgcatcgatgctgtttaccggaaagaggtgttttcccatttttccgccggagatgtgatcgtgctgcagaatgagatcaacgatctggatcaggtgatcgacgaggcctatgaaaaaggtatgatgatcgtgttgaatccgtcgccgtttgacgcttacctggatcgctgcgattggaataaagtcgatgtgttctttatcaatgaagtagagggcgcgcagatcagcggaaaagagacggcggaagatatcctcgcatggttccgggagcaccatccaaaagcacttgtggtgctgacgctgggcggcgccggttcctgctgcatgaaggatggtcaggtataccggcaggaggttattcccgtgacagcagtggacaccacggctgcgggggatacattcaccggattttttatgcgggcttacttgggcgggcaaacgattccggaggcgctggcgttggcggcccgggcatcctctgttacagtatctcggcctggtgcagccgaatccattcccgctatggcagagctggacggctgaacagggtaaactattgcacggcgcacagggagggaggctttcctgtgcgccttttcctgcttgcgcatgggcagagaatcgggtatactatagctgtcgatttattatttgtatttgatgcgtttgtttcttcgtccgttcccggcggccaagagacaacacggaaaaggggagcatatatatggcacagcagcgcagtgtgaaactgtccaggattgttgatgaattttccttggagattctgcataagggcagcgattatgacagcgcattgctgacgatcgtggacgtgaaccgtccggggcttcagtatgcggggttttttgaatatttcgatccccgccgccttcaggtggaaggtaaggcggaacatacttatctgtcgtctttgctgccggaggagcgcaggaagagctattccaatctgttttcctatgaaattccggcgctggttctgtcccgcgatatggaaccttctgcagagtgtctggaaacagcgcgtgaatatgagcgcactttgctgcgcacgcctgagaccacagttgtgttcaccagccagatgatcgatgcgctaaaccgttatttggccccctgcattacccgccacggcgtactgatggagatttacggcgagggtgtgctgattatgggcgattccggcgtcggcaagagcgaaacggccatcgagcttgtcaagcgcggtcaccggctgattgccgacgatgcggtggaaatcagccgtgtttccgatgtgctgaccggtacggcgccggagctgatccgccattatatcgaactgcgcggcattggcgtggtggatgtgcgccgtctgttcggcatgagcgcggtcaaggtggaatcccagattgatctggtggtgaatctggaacaatggaaagagggctttgcctatgaccggctggggctggacgatcagactgtttcgattttgggtgtccagctgcccacgttgaccattccggtgcagcccggacgaaacctggcggtgattatcgaagtcgccgctatgaacaatcgtcataaaaaaatgggatacaatgcggcgctggaactgacgacacagctcagtcagcatatggagcagcaaaacggtaagggagagtaatggggcaatgtcgaagaaatacgtcggaatcgatatcggtggtacgaatttaaaagccggcgtggtggatgaaacgggtacattgttgtctgcggcaaaaacgccattgcagtttactacgcctgaggcgtttgtcgaaacattggccggcctctcccggcaggcggcagaagcggccgggattggggcggaggagatttgtgccgtgggcatgggagtgccaggcgaggtggacacggagcacggtacgatcctgtatacttgtaatatccccctcgctgatctgcctgtcggtgcgctgttccgccggtatctggatgtgccggtttatttggaaaacgacgccaactgcgcagccttggcagaatattgggccggtgcgggaaagggatgccacagtctgatcgtggttacattgggcaccggcgtcggcgcgggcatcgtgcttggcgggaagctgctgcgaggaatcaacggaacggcgggggaggcaggccatatggtggtggagccggatggcgtgccctgtcgctgcggccgccggggctgctgggagcaatatgcttcggccaatgcgctcaagcgcataacgcgggaagccatggaacgctgtccggacagcgcactttgggtacactgtgcaggaaagctggagcagatcagcggccggagtgcctttcaggtggctcgggaatgcggtgatgaaacggcgcaggcagtatgccggagctatgtgcgctatctggcgctgggagtggtcaatctgatcaacctgttccagccggacgtgttgtgcattggcggcggtgtcagtaatgaagaagatgaagcgttgctgcacccgctgcagcgcatcgtgcaacaggaacgtttcgggcatgatccgcgccgcacggccaaagtggttaaggcggagctgggcaatgacgctgggctgattggcgcggcgctgctgggcaggatggaaaccaaataaggatggagtgtttttatggcttgggtcgaatcctttgatgcatttgtacgaacacacctgcctgctttgcgggtggagcaggatgccaaaatggcacattatacgtcgttccgtattggcggcggcgcgcggcgtatggcatttcctcgcacagaagaagatgtggagcggctactgtccttttgcagggaacatgaggtgccttgccttgtcatcggaaaaggtacgaatctgctgatttccgatcagggactggatcagctggtattgaatatgctggaaatgaatgcgatccgcgtagaaggcacgcgggtgtatgtccaggctggtgcgctgctctcccacgttgccgtcgcagctcagaaggctggctgtgctggtttggcgtttgcccacggcattcctggaagtctgggcggcgctgtggccatgaatgccggagcatacggcggtgaaatgcagcaggtagtggaatcggtcactgcactgttccccgacggtctgcgcacgctgcgcggcgaagcgctgcgctttggataccggcacagtgtgtttacggaggagaagggagtcgttctcgctgcggtgctttccctgcaaaaaggggacagtacggaaatccgtgccgaaatggacgatttgatggcccggcgaagagccagtcagccgttggagtatcccagtgccggcagtacttttaagcggccggaaggttattttgctggaacgatgatcgaccaatgcgggttgaaaggcgccgctgtgggtggtgcggaggtttccgaaaaacatgctggattcatcatcaataaagatcatgccacctttgaggatgtggtgacgctgatcggtgtggtgcaggatactgtgttccgggaatttggcgtggaactggagcctgaagtgaaaattatcagctgagcatgtacaatgcccttttatgagcgataagagagtgagaaacactatgaaatttttgattgtatccgggatgtccggtgcgggaaaaagcaaagccgcctccattttggaagatttcggcttttattgtgtggataatatgcccgtggcgttgatccccaattttgcagaaatttgtatggctaaccagggaaaatacgaaaaggtggcactggtgacggacgtgcgcggcggagagaccttcgacaaactgtttgaatcgctgggaaaactggagcagatgggctgtccctatgaaatcctgtttgtggaagccagcccggaaaccattatccaccgttataaagaaacgcgccgcatgcatccgctgggcaacggtttcaccaccattgaagaggctgtgcgttacgagcgccaggtgctcaaaacagtgcgggagcgggcgaattatattattgataccacggcactgtccacggcgaaactgcgtgatacgctgcgcaatctgtttgccagcgaagaaccggccgcaaagatggcggtgaatgtcatttcctttggctacaaatacgggatcccgattgaggcggatctggtgctggacgtgcgttttctgcccaatcctttttacattgacgagctgcggcacaagtgtgggatggataaagaagtctatgattttgtgtttcagtttcagcagacgcaggattttatgaaatatctggaacggctgattgctttccttcttccgctatataacgaagaagggaaaagtgcattggtcatcgccgtgggctgcacaggcggccagcaccgcagtgtagcggtcacgcgggcattagcggagtttatccgccgcaaagggtatcaggcgacagagagccaccgggatatgacacgggcctgaacgggttccgggagatgtggggaggcatagcatacgat

SEQ ID NO: 1558 - DNA, 2888 bp, Unknown
  16S sequences of unknown bacteria
ctattgaggcagacggctatctctacattgactgtctctgggtatccggttccatgaagggacacggatactcaaatgatctgctggaggcgtgcatccgtgatgccaaggcgcaggggaagaaaggtatttgcattctgtgcgcggagggcaggaagcgggaatttcttgctgacccgaaattccttgcctacaaagggttccgtgtggcagacatatccgactgcgggatcaatctcatgtacctttccattgaaccgactgcacagatgccgaagttccgggaatgcgcgaagcatccggcgattgaagataacggttttgttctgtattacaccgatcagtgtccctacacctattattgggtaccaagggtgcaggaggtggcgaaggaacatggtatcccgttcaaggccatccatatcactgacaaagaatctgcacagaatgtacccgcaccggtcacgacctatgccctgttccgggacggtcagtttctgacacagagtattcagtcggataaaaaattcctggcgctggcgggcttgtaaaactgattgtagcgaaatgcaagcatgcgatgccgtcgaaaagatagcaggaggcaataaccattgcaatacgaaaaagaaattatcttaaaggacggcgcgaaatgccttcttcgcggagcgggtgaagctgatgccgccgaagtgctccgcacttttgatctcacgcatgcagaaacggactattttctgacctatccggaggaaaattcgttcaccgtccaagaggaagcaaaatttttgaaggcgcgcagcgaaagcaaaaatgccatcgaaattgcggcgttcgttgacgccaggattgccggaacagcgggcattgatccgattgatgacaaggaaaagattcgccatcgtgcggacttcggcatcgccattgaaaaagcctactgggggcgcggcatcgggaaggctcttacgcttgcgtgcatcgaatgcgcgaagcaagcgggatacctgcaaatagagctggaggtcgtagcagagaacgcatctgctgtccggctgtatgaatcggtcggatttcaggaatatggtcgcaatccaagaggtttccgtgcaagaagcggctggcaaacgcttgttcttatgaggcttgaactcgattcttaagcacccctcggtttcataaccccgtcggtgcctttcgcagaaaggcggattatacctatgaacctgccattggaagaccatttgtacttttccatccaatccctacttgtatcgtgtccattttaagaatgtactgtgcgacacgcccaatgcgatggcggcggctctggctgagagctggccgctttcccatttttgacgcacatcttcatatgactctggcaagggcagcggcctccgcccgaacttcacgccccgggccttggccgccgcaattccttccgcctgtcgcttgcggatcatctcccgctctgtctgcgccacataggatagaatttgcagcaccaagtcggcgatgaaggtacccgtcaagtcttggccctgggcccgcgtatccagcagaggcatgtccagaacaacgatgtccacccgcttttccttggtgatgactcgccactgctccagaatctccccatagttgcggcccagccggtcaatactctgaatgaccagcagatcgccggggtgcagcttttttacgagacgcttgtatcggggacggtcaaagtcttttccggactgcttgtccatgtaaatgttcttttccacgatcccaaacgccgtcagcgcaatcatttgacgctgctcgttctgttcctttgacgagaccctcgcatagccatagttcataatccgacctccaatccattgaataaatagattgtaagccagccgtcaaaatttcccgattaacccttttgagataattataacccaaaagagttaatcttttcaagtgcattcggatatgctttctctataaaaggagagagtgctatgaatatcggagaggctgtcaaagagagaattgtagagttatgccgggagcgagatatttccatcaacaaactgtgcaacatgagcggtgtcacgcaatcgactgtcaataatattgtcagcggacgcaacaacagtgcaacgatttcaaccatcaaaaagctatgcgatggcttgggtatcacgattcaggagttttttgcgtcaaatctgtttaccgagttggagcaggagatcgaataatatgggcggcgactgctacgatgcagccgccgcctgacgttatctctcccaatgctcttttttcttggactgattctgtgagactgttctctgttctttctgccgccgcataatgagctgtcgcacttgccgttcttctgtgtcctctccaagcagacgcgatgcttcctgcttggcgctgagcagcataataagagatggcttctcatgtatggcgtcctctaactgctgttctactgacttttcctgcgtgggacggatagcctgccgtgctttgtatagctccaacgggtcaatgtccgcagcttgcgatttcagatctgcgtactcagccagcaccttatccaactcggcagagtatttttgctcctgcgcctccagctttttcaggccagcctccataatagcaatatccttacggaacgcctctgcgcctgcatcctccgcatactcaaatttttgcaaaaggagcgcctttccggaacgcagttcttccaaatcttctgtcagttcggtaatgcggacagccagctccttgtgccgtttcacatggtatattggcaattcctttttctcagcaaccagcgatttgcgctccttgctcttttccttgatttgctgcaccagaccggtgtaacgctccag

SEQ ID NO: 1559 - DNA, 13489 bp, Unknown
  16S sequences of unknown bacteria
caaaaaacattttgtgaatttatttaattttaccgcttatcgcctgtccacaaaggagcaagcaaatcctttttggcaccgtcaccggtaagtcggtgaatttccatatcggcaggcagggcgttaagacaatccccaagcaaggcggcatattcttccaaagtcattgtggggtaattgcattttaaatagtcctcacccatttttgtgccttttaaataatgcaaaagttgcagttttattccgtctgcaccgctttcggcaacaaaacgagcactttgtaccatatcatctcgactttcccaagggaaccccaaaataatatgagctaccacatgtatattgtgttcttttaacagttttacccgtttttcaaaatcctcggcggtataacaacaatttattttttttaaaatttccgggtttgaagattgcaaccccagctccaccgtgacaggttttattttattaagcctgtccagcatttgtataacatcttcacctaagcaatcacaccttgtggcaatggcaagttccacgatttccggcatagaggcggcttcggtaaaaattttttcaagcctttttacatctccgtaagtattggtataagattgaaaataagcaataaactttttaccgccttttttctcaacaagcctttttgcctgttctatttgttgtgcaatcggcaaaaatccgctttgtgcaaaatccccggaacctttctcactgcaaaatatgcagcctcccaccccttttgtaccgtcacggttggggcaggtgcacccggcggaaagagaaattttatacaccttctcaccgtatttttctttccaaacgtcgcctatttttaagtattccatattttcaccataaccgttaatattctgtgttttaaaaaatcacattaaatatttatcctaaaaccattgtttaatatcagtatattataagggaaatttcctgtcaacagggcaacttgtgaatattcaaatgacgatattatacaataggttatttactctgtgatatacacaaagagcaatcagaaaatctccgattgctctttttttcatattttatttttcttaaaatccaatgccaagcttccgcctacaaatcctataagcagtacaagcgggaacaccgcccccaaatacattgcgtaggttcctatgccaaaggcggaaatttccatataggaaattataaacactctaaaaagacccataagcaaaaatcccagcaaaacaaaagcggttatctgtttttgataagtttgagttttaaatttaataaatgtttttataccgccgtaaatgccgattatcaacaaaggcaccgttattaagcgataaatccaaataacccctatcataattttaaaaatcaaaatttggaaatccgtataataagaataaggttgattttccgccgcagcataattgcaatcctcatgcaaatagccctgccaaacttccatatcctgccggcttatacggcttatatcgtattcataaggcaacattccccgccaggtgaccacactttttgtgctgtttaacacttcggttattaccggggaaatatattcggcttttaaaggaggagtgacagatgaccttggttttaaacttccctctgttttatcccgtaagtcttttacttctttttcgatttgccgccaaagttcttcggctttttgcgggctgtcataatagcccatctcctgtgcggcaagtctcaacgcccaataaaatgaaccggaacggtaatcttccgcctgtgggttccaatatgccttgcggcacactgccccttctctgtcaagatattccctaaactgtcggaaagtcgggcattcctcatacatcaattctcttacatcttccggcacggcaacaatttcattccagttttcctggggcagtcttgtcatttgcccataccgaccggcaaatgaaccgctgttaaagtctgtaagtttaaaaactccgtaatatttgtaattcattcccataacggataatacacagcaaaggcatatcacataaggtataaacatttgtactattcgtaaaaccttattttcaaggcctttgtcagttagtatatatacaatacatattattaaggctgtaaatccaaaaggcaaaagccagtatccgtcctcacggctgatgtaagataaaccaagccccacccctgcaataagataaaagggcaacccttttaaaggcttttctttaagccttaaagccgcccctgccagagccacaaaaaacagtgtgcaaagtatcgggtacagtgcatcacgatatactctaagtgaatattgggcgtaagttgacggtgagtataatatcgccaggaataaaaccaccctttgccattgttttttcagcacaggcttaaacgcccacgctgccacaatggcagcggacagccacattattccattggcaaccaaatagggaatacctatcttatttataaacgccaaatacaccgcaaaaaaaggatattttgacaatgtaagataattataatccccaagccattggcctgccgagatactctgtgcccatttaaaatacaaatcgtcatcaatgggggcatatccagggtaaataaacatcatttgtttatatgacacaaacaatctgaatacaaccgccactgcaattaaaaacagcagaatttttttaaattttttattttcagacatcaaacaatcttccaaaaattattttgttattttcttgatattctctatcacatactctcttcggctgaaaaccaagctgagaataagcgacagatattttaaagcaatggcaaacagcaggaacataccgaaaaagccgaaagaaacaaccaacattgtggtagtccagcctgcaacgggatttgccgaaacaaaaaccgccaccgtgtaaattccggcgcacaaaagcacaacggccataagtgcgcttaatcccacgcttattttatagcccacatcggtaaataaaatcaagctgtttaaagccaaattctttttaaccgggtactgggcgtcatttctttttgcattttccaaaggtttgtaaacatagtcggtagcaggcaaaccgcaggatgcgtaaaccgccttgcggtaaaccgtgcgcacacctatggattttacacggttaatccccctgcggcttattattgaaaagcgctgggttttaatcttgtagttcatgttcgagaatttattaaacatcttgtaaaacattctcgaagataatttagacgccccctccggcacaccgaatacaatgtcataacctgtaaggctctttctgtaaacttccataatcgccgccggctcatagtccataaggcaggaatcaaattcaaaaacaaagtcacctattgaaataagataaccggcaaccattgcgttttccaccccttgaaagaaacttgtatcaatcattgtaaggctttttacgctgttttcatcacaaaattcttcaaccgcctttgcggtattatctgtggaagtatcatttacacagataatttcatatttttcaaaattagttttcaacaattcgtttaaagatgtcaaaaacttttttacgctgttttcctcgttgtagagatacacaacggcggaaacaaaatttttctccttattcaagctcaccgtcaagcacctcctttaagtcgtaaacggtatttattttgccggacaacacacttacaaatgttggttttttattaaatacttttataagtgttgggcggctgtcgtctatttcgctcattttcaaaataggtttcattgaaaagagggagccataatattcaaatttatactcgtctttcaaatattttctggcaagctgtgacatatacccccaagcggattccggcttgtgtgggcagttattacagttgcccaaatgcccgggactgcaataatcttcaatccccttttgacattcaaatgtaggcagcttgtcataacaagttacatgtggggtaaaagtaacgcttgtaagtgagtgataccctgtctttccgaaaggcataatagaaaagaaaggtccgtccattacggttataccggtattttttagtttttcgtcaacggtgcaaagaataatttcgcacaactcgtattttatcgggaatgtttcaaaccctgccatgctgtttatttggtttacactggcataagtggaattaagcacataacctgcggaaaaactttccccgtcttttaaggtcagcacatattcttcccctgtgttttctattttggtgataaaactgttatatcttacagtgatattttccagcttttctatatcattcaaaagcagatctcgcagtatccgccagtcataggtatattcctttgttaaaaatgtgccgtcgcacattccctctttaaagtattttgtgttggaaatccgctcgcagggtatatcggtgtcatggcagaatttttcaaactgctctttgtttgtccatgaaaaattcgcacttgtggcatagatttttgtaaaatcttcctttatgctttccggatagtcccgacaaaatctgtcaaagtagtttcggctttttgacgctgtggaaatacttctgggatagtgatatcccatgtgaactctcgcctggtttatgtatgtccgccttgcaaagggcacatcatcacattccaaaacaagaattttttcaccctttttgccgcagtacacagcactgtaaaggccgtaaagccctgcgccgattataattttatcgtatttcatattttcggattataccttcctgccgcattttcaactaaaattctcataagccgagaatttccctttatggggcttatttttgtgggtatctttccgctgtttgggtacgcccttgtaacaggcacctcacaggttttaagtcttaactgtgatgcccttgtggaaaggtaagccagcagttcatacccccggaatatattcctgaaaggctgtaccatcggatgagtcaaatatctcttggagtaagccctgaaattatttgttgtgtcggtaaatttttcatgggcggttaaagagataaccggcgcatgaatgaattttaccgccatatggcgtacaagaggcgtgtttatagcctgtccgccgggtataaatcttgacccttggacaaaatcatatccctcatcaagtttctttataaattctttaacatcctctatactgtccttgttgttgccgtcaatggtgattataccctcataaccacggcttaaagcccaataaaaacccattctcagctgggcgccctgcttgcccggtcctttttttatcaagagagtattaacccctaagctttgcaacatatcgtcgtcggtgccaccgtctgtggaacctccgtcacaaattataatatctgcaagggtgtgcaccttgttcattcttgctcttaaaagctctaatttgatgttttctttttcgtttatgattggaatacacacacaatactttgtctttttttcggcatattctttacattcaaaatccggcacgccccgaatatttttatataacattaaaaagcccccttaacatacaaaacagcgtctttaactttttgaatatcatcctgctttttcatttctattgatatatatccttcataatctatcttgcctaaaacctttttaagggttgtatattccccacagggttttatatactccaaattaggataagaaatatgtatgtgatttaccaaagttttataagtttttacaagatgggggttttctttattgtaaatcattgtgcccatatcaatattaacttttaaacctttgctgtcaacttttttaacaaattcacagcaatcttttgtgtaatttaaaaagtttgtattgtaaataaccgggtttggttctaaggctatgtttgttccgtggtcaaaggcaaaatcccctatttgtttaaaaaattcgagggcaatatcggtatttgctccctgtggaacattgcggtttttcgggcagccgaaaacaaggttttttatccccatgctctcggcaaataaaacggcttttttggtgtagtcggttaaaaaccgtctgtcctcatctgtgctgaatatattttgccctatgccgtaccatatactctgcatactgcttaccgttaaaccgtatttatttttaagcatataggagtaaagatgggcctcctccaagcgatcgtatgggttttcaaaaattcttgtaggggctatttctataccttccacaccgttttcttttaaaaaggagtacatctccccgtcatattctttttcccatgctatattagatattgaatacttcataaccttatctgttctccgtatagttttcaacaaattgttttatatccgttaaacaaaactctttattcaaaatatatccgtcttttccgccgaatagatttgaatattttgtccttaaatcatatacagggggcttgtcggtaatgtgatttacaaattcttcccctgtaagccggcggtatatttggcttattgtaaccggctcaaccgccaaattcaaaatttttatattgttatccaaggcaagctgtatatcgccgtttaacctgtttaaattatagtattggaaaagccctctgctgtcggtgaaattcaaagcagaaaaacctactgttttaaaaatttctttaagccgatctcggtcaatatcggtttttacccgccaaaatccgtctcctctgtcgatatagtactcctttaaatccggccttttctccaaaagctcccgaattttgccgtcagtcaataacgcaggtatgtagtttatataatcgtaaagaaaattctttttcaagccctttccgtaaaggcctggcaaacgaataacaaggctgtcaaaactgtcactcaccttgttttcaagccaaagtcggtctttgccgtaccgccgcaagccctgggtttccataatccgatcttcatccttgccgttcggttctttgtaaacatcaacggaagatataagaacaacctttttaggatttattttttttatgttttcaaaggcgttttttacgatttcaaaatctctttccgggtatttatttgcaataaatttttgccgaggcactccggaataaaccaaaatatcagggcatgttccaaatgcctcccctatgttttttgaattataaagtccctcaaattctccgttcaaatttaaatttgaacctacaaaacccgtatatccaactaatgatctcatattgtttttctctttgtcacttgtattttctttattatactattattttatactatcgtcaattttatagatagctgtatatatttctaaattgtaaattttataaatatattttttattcccatcaaatttattctttataacttttaaaatataattatttattttgattttaacaaaaccactttttataattttacaatttgtaatattataatatgatattatatataatttattttccttttcccaacctattatgaccgtgaaaagttttcttcctattttctcaaatatagatttctcgcttatcttttattatattacaataagtatagctatacaatatttcaacaatttgtatatagtatttataataaaaaataggcggaaagctccgcctatttaattattaagttttaaagatttaattaaagttcgctcttttcaatctttgtcttgccgcccatataaggaacaagaacttcaggaattgtaatagaaccgtccgggttctggtagttttccaaaatagctgcggttgttctgcctactgcaaggcctgaaccgttaagagtgtgcaaaagttcaactttgcctgtctctttgtttctgtatcttgtctgcattcttctccgctggaagtctgtcatatttgaacatgaagaaatttccttgtaagaattgtaagaaggcatccaaacttcaacgtcatatgtcttggctgaaccgaagcccatatcgcctgtgcaaagaacaataactctgtgaggcaagcccaaaagctgcaagcattcctctgcgtcgtgtgtaaggctttcaagctctgcccatgactgatccgggcgggcaaatttaaccatttcaactttgttaaattcgtgctgtctgataaggcctcttgtgtctctgcctgctgaacctgcctcggctctgaaacaagctgtgtaagcacagaacttctgcggaagcttgtcgccgtccaaaatttcgcctctgtaatagttagttacaggaacttcagctgtcggaacaaggtaccaacctgatttatcaagatcggctgaatctccgtcgcctcttgaaaccttgtacatatcttccttaaacttaggaagctgtgatgtgcctctcatagaatcgccgtttacaatgaaaggaggcaacatttctgtatagccctgttttgttgtgtgcaaatcaagatagaagttgatgattgctctttcaaggtgagcgccttcgcctttatagaagtggaaacgagcgcctgttacctttgcggctctgtccgggtcaagaatgtcaaggtctttacccaaatcccagtgtgccttaggttcaaaaccctcttttgcaaaatctctcggtgtaccccatcttctctgttcaacatttgctgtttcatccgggccaatcggaactgacggatccggagtgttaggcattgcaagcaaaatttcttcctgctttgcttcaagctctgtaagctgagcgtcatattcctttatttcatcggcaatctttttaagttctgccttcaatttttcggcttcttcctttttgccctctttcataagctgaggaatagcctttgattcgttattctgctgtgctttcaagccgtctcttttgccggcaacttctcttctttcttcgtcaactttcaaaacagctttaacttcttctgtgtagtctttgctctgtcttgaattgattgaggcaatgatagcctccggattttctcttattcttttaatatcaatcattttaaaatactccttatttcttttcaagtaaatcagccaattccataagctgttcctggctgttaaatgtgatgtttaaacttcccttgccgtctttaaatgtaattttaacaggtgttccgtggatttccgttaaggcaatttccaattcctttataatttgcggaactttggatggcttttcctgtttcggccgcttttgcatagcctttgccataagctcgcactgtcttaccgacagccctttttcccgtgtcacattggcaagttctgtttgttggtttttatcttcaagtgataaaatcaccttggcatgacccaaacttatcttgttttcttttataagacccaaaacatcatcgggcaaattgagaatacgcaaactgtttgcaatgctcgatcgtggtattgacagctttttgctgatttcgtcttgtgtaagattaaaactttccataaggctcttatatcccagagccacttcaacagcgtccaaatcttcacgctgtaagttttcgataagtgcgatttcttttgcgctttgggatgaaacatcttttacgattgcaggtatatcatacaatcctgccattctccgtgcacgaaaacgcctttcgccggcaataatagtatatcgtccgttgccgcttggcataaggacaataggctgtaacacaccgtgttcaactatggattgacttaattgttcaagactttgggtctcaaaagtttttctcggctggtgagggtcaacatctatatctgataacttaatattggatgccgaggcatccgatatctgctgttcgcttgtaaggaacaacgaatctaagcccctgccgagaccggtgtttttctttgccatggtcaccatcctttcccggtaaattttaaaattcaccgtttctataatatattataatactacttttagtagctattaacaagtggaaaaatgtaaaatcattgatttacacaaataatcatttcacaaatctatgtttttaacaaagcaaaatcatttgccgtgtctcaatacctctaaggcaagctccgcataactctgggaaccctttgagttagggtcgtagtaatttacaggctgaccgtaactgggcgcctcggacaatttaacatttctcggtattgtagtcttataaaccttattggggaagtattttttcacttcatccacaacctgcaatgtcaaattaagccttgcatcgtacattgtaagcaaaactccctcaatttctatatatttattgtagtgttgcttaacaagacgaatggtattcataagttccgacaagccttcaagggcataaaattcacactgaataggtacaagtacggaatctgccgcacttaatgcgttaattgtaagcaaatcaagtgacggagggcaatctataaatatataatcgtatttatcatttaccttatttaaagcactgcgcagcttagagtgtctgttttccatatttacaagttcaattccggcaccggacaattttatagacgatggcagaatatcaactttgtaccgagttttaacaatacaaaggtttatatcgtcatcatccattaaaagagaataaacagaatgttccaatccccttttggatattccatagccggaggtagtatttccctgtggatccaaatcgcacaaaagcacttttttgccaagccgccctatgctccgccgcaaattaacagctgttgtggttttacctacgccgcctttttgattggctaccgctataatttttgccatatttgcctccttttcacaccgacagcccaataaatgacgcagctgcgatatttacttatattctaccacacagataagcaaatttaaagtataaagtttaaattttattgttccacatggaacatttcaaattttttatctgtaatgtaataattctcataatttatcgactataacatacacagttttaaataaaacctcctaatattacctatttattcaatatttttaacggtcactgtcaaacacagctttattttgcgatattcttttatttaaaaattaaaaaatatatgttaaattttatttaggaggtgccacatatgcttaaccttaaaggcgaaaacaaaataacttacatacccttagaacaaattgtaccctgcccctatcaaccaagaaaaacaatgaatcgggcggcgatttccgcattaagtgaaaatatcaaagaaaacggaattttacagccccttactgccacaaaaatatccgggggcaaatatcagcttatagccggccatcgcagacttttacgggcagatatggcaggttttacaaaagtgcctgtaattgttttagaaaaaaccgaagaagaagttgcggttttagcagttatagaaaatttacagcgagaagatttgaatttttttgaacaggctgccgcaattcaatctttaatggaaagacttaatctgacgcaggcacaagtaggcgaaaaactctctttaagtcagccggctgtggctaataagctaagaattctacaacttaaccgggaggaacgccgtattttacttgaaaataatttaaccgaacgccatgcaagggctatactaagattaaaacctgatgcaagacttaaagcaataacacatatagcaaaacaaaatctaaatgtaaaacaaacagacaagtatatttcatctcttttaaaaaacaaatcacaaaaatcacaaaaaacaattatacatattaaagatattaaaatgttcacaaacacaataaaaaaagccgtaaaagttatgcaaacagcaggaatacaagcaaattttaccaaaaacgaggatgatttaaccattacatactttataaccgtacctaaaagcgtgtagaaaatatcttttgtgtaataaactgttccacgtggaacaaaaaaatcggcgagaacatctcgccgattatatttttttaatttaaagcgtcttgtttgtccgctattctcaaaaatacaaatccaagagcaaagaacacagcaaggcaggcaaccgcaaagtttatagagcctcccgccaatttcacaacggctatcaccgccgatcccaaaaatgaagctcccttggagaatatgtcataaattccgaaatattccccggaattttccggcggtatgatttttgaataataagagcgtgacaaagactgtatagaaccttggaaacaacctactccgaaagccaaaacagcaaagtggaataatgtttttaaggtaagcgcataaaggcaaatacagaaatatccacagatacaagcggatataagttggacggtagaatactttttagacagttttacaaagaaaagtgaacctacgaatgctacaacttgggttgcaagcaaaaatacaacctgtccaacagtattaagatttaagtcagtaccgatatttatgcagttatctataattgttcctacaccgtctatataaagaaaaaaagctatcaaaaagaacaaaacctttttatcttccgttgcaattttctttaatgtagaaaatatttttgaaaatgtctgcttaacggtgattttatcccgttctacatagtttttctgcttgtaatttttaagcaaaggcagcgtaactacaagccaccaaagggctgtaacgccaaatcctataaattttgatatattatccggcaaaatccccaccatatccgggcctaaaacataggcgataagggcaacggtaaaaggaatacaagagcctatatatccccaggcataaccataagaggaaaccttatccattctatcctcgcttgttatatctcccagcatagaatcgtaaatagttaaagaagcactgtaacacaccttgctaacaacaaataaaacaaggaataaaatccaattagaggcaaaccccgtagaaacgcaccctattattcccaaaaacacacaggaagtaaagaaaattttctttttgtccctatggtcggatagagtgccgactatgggtccgattaaagcaactataatcgtaaccacagaaatggccatagaataaaaagccgtggcttcatcggaacttatatgccctgccccggtgcctatggcaacccctttaaaccaaataggaataagggaacaggatagcattataaacgccgaatttcccacatcatacaaaacccaggaaaattcctccggcgttaaatctttgaatactttcgtattatttaaagctgcaagtaaagatttcattttatttctctcttaaatttagaatttagacatttttcaaaaattgtccatattacttatacagttaaattgtaacaaatttatgtaaatttaaaaatttattttccgtaaaattttttcaaaattcattttgagatattatttatacaaaat

SEQ ID NO: 1560 - DNA, 6843 bp, Unknown
  16S sequences of unknown bacteria
cgatctggtgatagagcatctgaatcgcgctggagggggtgattccgagctgctgcaggatctgctctgcgttttgctttagccctggatcgatccgggcgtagacggcggatttgtttgccatattgcatcacactccttttctcattttatagtatacacaaaaacgcttgcaaattcaagcaattgcaagtgaatttcaaagttttcctttcatgtgacagcgcggcgtaccctgcggcgggggggaaaattttggggggcggggagaaaagacggattcggggttgtatatgaatgaatattgtgataatatgtatacgtggcgcagtatcctagtcagaagtcccggttctgaggaagggcctaaaaatcctttaaagggcatatcgatgaagtccctggtgtttgcttgttacgcccagtttcgggtggatgctgggggttaagaattttgggcaaccacaatggcatgtggcgactgacccaattttcgtggagacctgttactttgcgacggccgctgcgtagttggctctgccaccttccggtcgcgtacggaataggatcaacctgcaaggcggtgcatagaatcgtgtgctgtgtgcagtgtagcctgccttgcgtgggggcgatgggataggggagcgatgcatacttgcccatggccatgggaaaaggtgatatccccttgaaaccgcacctgcaaaagaggctaggaatcgggaacgatgttgtggaaagcacctaggctgtctttcgggggcagataagggattgcagtgcgtactaagtggcaatcgggtctctgctgcggcgacgcgcagacggcgggatgaaacggaaacggccgttccggtgacgggcgggttccgccggggaaatcctacccgacctaagacgcaggattaatcttatctgccgccacattttttgaaatttgaagcatgcgcaggcattgcaactgcacagggaggaacggcttttggaagcgcaaccggccaaacgggagaaaaagcaaaaaaagcagcccaagcgctggagatggtgcgtgacgattgtcctggtgacagtctgcatctcggcggcgttttcgtttatctccagcgtgctgctggaaaacagcgggatgctggcggcgtttttgctgctgttttttatcgtcgcgctgggcattttgtttgatatggtcggcgtggcggtgacagcggcagatgaaaagccgtttcacgccatggcggcgaagaaggtccccggggcgggcaaggccatttggctgctgcgcaatgccgataaggtcgcctcgttctgcaatgatgtcgtgggggatatctgcggcattatttccggtgcagcttcggccgtcatcgcggggcagatcatcgccgagatcgcccagacggggcgggggaatgtcgtgcagctggcgatgtccggcctggtggcggggatgaccgtcggcggcaaggcggcggggaagtccatcgccatgcggtgcagcacaaacatcgtctttctgacggcgcgcgtgctggggctgttctcccggaaaaagaaataaatgccgcatgtgcggctgatgatagatttataaggaaatcattatgcagatactagagcatatcaattcccgggaggacctgctggccgtcccgtgggagcaggaggcgcagctctgtcaggagatccggcagtggctggtgcagaatgtggccaagaccggcggacatctggcgtccaatctgggcatcgtggagctgcaggtggccattgaaaaggaatttgacacgcggcgggatcgcctcgtgtttgacgtggggcatcagtcctatgtccataaaattttgacggggcggcgggacgccatgaccggtctgcggacgctggacggcatctccggcttcccgaagcccgacgagagcgagacagacgccttcgtggcggggcacgcgtccaacgccgtctccgtcgccctgggtatggcccgggcaagaacactgcagggggcggattacaatgtcatcgccctactgggcgacggcgcgatgaccggtggcctcttttacgaggggatgaacgacgccggggccagcaaggagccgctgatcgtcattttgaatgacaatgagatgtcgattgcgaaaaatgtcggcggcattgcggggcatttgaagctgattcgctgcaggccgggctatttcaagcttaagcggaattaccgccgcctgacgaaggccctgcccggcgggcagcatctttacaacgtgacccatcggctcaaggaccggctcaagcgccgtctggtcggcgtgacgatcttcgaggagatggggtttcagtatatgggcccggtggacgggcatgatatcacgcggctgatctatatgctgcggcgggccaaggagatgcaagggccggtgctgctgcatgtcctgacaaaaaagggcaagggctatgccccggcggaggagaatccggccttgttccacggcatcgggcagtttgatccggttaccggcgtgcccagcacggatgacggcggaccggtgttctcggatgtgtttggcaagacgctctgcagcttggcccagactgagccgcggctttgcgctatcacggcggccatgtgctatggcacggggctggagggctttgcccggcagttcccgaagcggtattttgatgtcggcattgccgaggggcatgccgtctgcctggcggggggccttgccaagcaggggatgatccccgtcgtggcggtgtattcgacatttttgcagcgggcgtatgatatgctgctgcaggatgtggcgatgcagcggctccacgtcgtcttcgctgtcgaccgggcggggctggtcggcccggacggggagacgcaccagggcattttcgacgcggcgtatctgcggacggtccctgggatgacggtgttgtgccccgccaatgggcgagagctggagcggatgctgagccaggccatctgtcagatggacgggccggtggccgtgcgctacccccggggcggcgacggcgcgtataccggcgtgtgcctggacccggtcctgcggccggggcgggacgtgacgatcatcgcctacgggacaatgatcaacgaggccctgcaggcggcgcagctgctggaggcgcgtggcattcgcgcggccgtcttgaagctgaacgctatcgcgccgctggatttggaacaggttttggatcaggcccgagagacggggctggtgatcgttgccgaggaggccattgacgccgggtgcgtcgggcaggccattgcagcggcgctggcggcggaacatttcccctgccgggtgctgcgggtgaacttgggcgaccggtttattcagcatgggacggttcccgcgcttaggcagcgctgcggcattgatgcgacgggcattgcaacaaaggtcgaggaggcgctgcatggcgaagaataaagaacggctggatatcctgctggtgcagcggggcctggcggagacccgggccagggcgcaggcgatcattatgagcggcaatgtctatgtcgcggggcagagggccgataaggcgggccttgctgtggcgccggaggcggagatcaccatccacggcagccagtgcccttacgtcagccggggcgggctgaagcttgcaaaggcgctgcgggagttttgcattgacccgacgggctacacctgcagcgactccggcgcgtccaccggcggctttaccgactgcctgctccagcacggggcgaagaaggtcttcgccatcgacgtgggctatgggcagctggcctggaaaatccgggaggaccccagggtcgtctgcatggagcggacgaatatccgctatgtcacgccggaggatttgggagaggcgctggacctttcggtcatcgacgtctcgtttatctccctgcatatcgttttgccggcggtgcagaagcttctcaagccggaggggcaggtgctgtgtctcatcaagccccagtttgaggcggggcgggagaaggttggcaaaaagggtgtcgtgcgggacccagcggtccatgtggaggtcctggaggactttttggcgctggcccgaggcctgggctttaccgtccgggcgctgacgtattctccggtcaaggggccggagggcaacattgaatttttggcgcatttgagccaggcggcggggccggactgcggctgccagccggaggaactggtgcgccaggcgcacgcggcgctgtaaggatacaaagtgtatgaaaaacattgtcatggcatcgaatccctatcgggataagaattttgagacggcccgcaaggcgcagaagattttgcgctcggtcggtatccacgcaaagctttgcctggcctttgaggcggataagaattttgactgcccagcggggctgcagcttgcaagtctgccggaggagctgccgggcgcggagctgcttctgtgcttcggcggcgacgggacgatcctccacgcggccaaggcggcggcggaggcgggcatcccggctctgggcatcaacatcggcaccatgggctttatggcggagctggagagcaacgagatgcacctgctgcgcaagctgcgcgacgaccgctatacgacggaggcgcggatgatgctccaggtcgaggtcatccggggcggcgaggtcgtctggcaggagctggcgctgaacgacgcggtcatcgccaagggggccgtcgcccggatcatccagctgaccgtcgtctgcgacggggtggatgtgatgcaggtcatcggcgacgggctgatcctgggcacgcccaccgggtcgacggcgtattccatgtccgccggggggcccatcgtggagccgacggcgcataatattctaattacccccatctgtgctcacgatatgatgacgcggccgtttgtgacctcgtctaagcggaccatcagcgcccgcatcggcaaggtggggcggcggaacgcatacctctctatcgacggcggcaaggccttcaagctgagcaccggcgataccattcaggtcacccgggcggcgcgggacgcgcagctggtgaagctgaaagagcagagcttttttgaagtggtcaaccaaaaattcgggacagataagaggcgatttttatgaagatcaaacggcaggcaaaaattatggagatcatctccgcaatggacatcgagacccaggagcagctgctggaagagctgcaaaagagcgggtttaaaagcacccaggcgacgatctcccgggatatcaaggagctgcgcattgtgaaggagctgacgtccatgggcacctatcggtatgcgacgtcgaacaaggaggtcggcgggacgttttccgcccgcctcaatacgatcttccgcgagtgcgtgacaagctttgactatgcgcagaatatggtcgtcatcaagacgctgccggggctggcctccgcggcgtgctcggccatcgacgcgatgaatatgtccgtcgtcgtcggctccctggcgggggacgatacggcgttcctcgttatgcgggacaataacgcggcggcggccttctgcgcggagatcaagaagctggtatcgtaaggcccggggcagggggaaatcagatgctttcactgctgcatattgaaaatatcgccgtcatcgaggcggcggatatcgcctttgaccgggggttcaacgtcctgaccggcgagacgggggcgggcaagtccatcgtcatcgacgcgatcaatgcgatcctgggcgagcggacgtaccgggatgtcatccgcaccggggcaaataaggcgacagtccgggcggtctttaccggagtcccggagcttgcttggttttccgagttcgaggtgccgtatggcgatgagctgctggtgcagcggcagatcttcctggacgggaagaatgtctgccgcgtcaacggcctgccggtgacggtggcgacgctcaagaagctggggctgcagctggtgcaaattcatggccagcacgacagccagcagctctttgacgaggcaagccatcttgcctgtctggacagcttcgcgggcaatgacgaagagcgggcggcgtaccggaaggaatatgacgcctaccttgccatccggcaggagatggcgcagctgcagatggacgagggcgagaagctccgcctgacggacgcactgcgccaccagatcgaggagctgacccgggcgaagctgcagcccggcgaatacgacgccctgcgggcgcggcaaagcgtcctgcaaaatgccgagaaattagaggcggggctggagacagccattggctgcctgtacggcgacgagtcctccaacggggccgaggcgatgctgagccagacggcggcggcgctgggccaggtggcgcggtttgacgacgcgctggcggcgctctcccagcgggcgaaggagctcatgtacgaggtgcaggacctatcggaaaatgtccgcgcccggcggcagggcctttcctacagtgaggcggagctggagcaggcggagagccgcattgcccagctgcagcggcttttccgcaaatacggggccgacgaggcggggctgctgaccctgtgcgaaagcgcgcagcagcggctggaccagatcgaattctcggacgaccgcctgcaggcgcttgcccaggacctggaagcccagaaggcgcggctgctggccgccgccaaggcgctgcgggcgacgcggcggacggcgggggcgcggttatcggaccgcatcgtcgaggagctgcggcagctggatatgccccgggtgcagtttgtctgccagtttgaaaaggcacagcccagcgagacggggatggatgtggtgcggtttttgatgt

SEQ ID NO: 1561 - DNA, 11302 bp, Unknown
  16S sequences of unknown bacteria
ccgctgacggatgccatatcggagtctgccttcaggccgaagtggtcggcaaagtcgtcaaagctcatttccgcatcgaccagataggaatcggctgctatttttgtgattggcgtttcctcctcgtcgtgctcatcccaaatttcgccgaccagctcttccagaatatcctccatcgtcacgattccgcaggtgccgccgtattcatcgacgacgacggcgacgtgtgtcttagcctgctggagctttttcagcaggagactgatggattccatctccagcgcatagactggcggcaggatgatctcccgcaagggcttttccgtcacgccgcagccgacataaaagtccttttgatggatggtgccaaggatattgtcaatagagccctgatagatcagcagacgagagtattttgtctctgtgaacagggcagcgacctcctctttggtggccgtgaccgggagcgccgccaggtccgtccgatggatcaggatgtccgacgcgcgctgctcggagaagtcgatggcgtttttcagcagctcaccctcgtttttgtcaatgccaccgtcctgctggacttctttcaccagcatcagcagctcctcgtgggacattttgttttctgcgctgagatggaataccttggccagcagctttttccagagggaaaagagggcgttcagcggggtaaagatccaaattaggatctgcagcatcggggcggagaacatggcgtactgttccgcacagtccttggcgatgctcttcggcgagatctcgccgaaaatcagcacgacgacggtgacgacgaccgtggagatcgaagcgccgatctctccgtaatgcttgacaaacagcaccgtgccgatggacgcggtggcgatatttacaatgttattgccgatcaggatcgtggaaagcagccggtcatagtgcgatagcagcttgcagaccagggctgcttttttgttccccttttctgcaagggttttcagtctggtcttatttgcggaggaaaacgccgtctccgtcgccgaaaaataggccgagagaaccaggcagaccgccataatgatcaaacaagtggtagtagacaaggtaagtaaactccttttctgtcatccgtaatcatgagaaatgtacgtcgccgcgcccgctatagacgcaaaaaagcatgtccgccctgcatctcgcagcgcagatatgctttcaaaatcagatggcagttcggctttctactaggacaatcgctgccgtcagaatccatgtgcttcattcctttcgcgtgaaattagctatattatagcaaaaatattgggttcgtcaagaaataagctggaaaactcctgttaagaatgtaccccaccgcctgctgcgctgcggcgggggcgctagcgtatgggggatgcgggggagcagggcctgcagggctttgccgatctcggctctatgaggatcgcgctccgggcgatctaccggggcaggcggcttgggcttggttgctgcgggcgtaagctgcctgtgggtttcgagtggtcatgtgtcagaagaggtattgatgatggctgaggtgttgtagccaacgcccagctcgaaaaataggccaatcaacccgctgcgcgatggttttcctgcaatatgatggcgctgctataaggggtcggctggactttgtcgcagcggatgccgatcttgctgccgacgcgcagttgggcgcgggggatcggctggccgtggtggtcgagatagacggtgtcgccgtcggtggaaaattgcagcggcgtctgattggcgctgccgcaggagagcggcgcgattttgatcgtggcttcggagatctccagaaccgtccccaaatagacattgcccgctgtcctcgccgcttcgtgctggcagccggaaagatacaggcacagcgccagaagcaggaataaaatggcgtgcttcatgcaatctcacctctttcgtgttacggtcgtttgcgtctttgcttacttagacgaaacgcaatggaaaatggttccaaaaatttaaaaaatcggcatttttaagaaattactccgtcactgtgacgatgtagccgccgagattatctgccgagcagtcggcggcgccgcccgctgggggcgatgcggcggcgtagacggcgtatgcgattgcctggcaggtaaagcgcagcggcgcggattcggatgccttttcccgcagcagctggaggtattcctccaggcaaaggccgttttcctgcatataccaggcgtgggggacgccgacatagcgaaaatgccaggcttcataggcgatgcctgtcacgtcccgcttgttctcggggtagcggcggatgaagccgtattcccaggcgtgctcgaccagccagacgtagtcgccggtaccggtgaaatcagccgttgcgccggagtcctccaggtagagggcaaagtcgacggcaaggccagtgtggtgctcgctgcagccgggctgggcgaggtagctggcggcgtagtcgctgccgtggttttgcaccgccgcgtcatagagctgctgctggtcgtcctgcgtccggtagcctgcgacgatgttgatattgctgcagccggtggcggcttcaaaatccgccatccagtcgttcagcggcgtcatgacccggcggcagacagaaagggcggtgtccttgacgtaatagctgctgttcttttcttcgtagacgctgacgaggtcctccgccgtctctggatcgtaggacgtgtcggcgttcaccaggatcaaatcgccctgggcgttgcccacgggcgcggtgtccggcggggcggcgtcgtcctctgccgaaaaggcgtcacgctccgacagggcatccatggcacgggtccagagggccaggctgctgctgatggccagcgccgccagcaggacgatgcccaggggatggaaatgccgggcgggccttcttcttgtacgttttttcatgcgatgcacctcctgtaactgtcttacagtatcggtgcgcagcgcagcgaagcggcaaaaaaccagcatcaaagcggcaaattattttgattttttcagcaattgaaaaacaggacgtcgccgctgaaattcaggctgatcggggcgctttcgccattggcatcggtgtagcgcagcgtggcgacgttaaagccaaagtcggggtccacgccctccggcaggatgtccgtggcttcgacggtgaagctgccgctgcctgctgtttgctccagggcctggcagagctgatccagggcatcctccaggccgtccaccgctacattttccagcagggccattgcgccgtcgtctccgccgtagaggaagaacatcaggatggccccggtgctatcgtccagatagcaatttgcggtgaaatgccactcctggatggtaaattctgcgtcataccgccagccgcagaggaactgctcgtcaaagacggtgatgaccggctctgtcatgatgttttgcagctcctgcgcgccgaaggcctgcgtgaggaacgtcgccgcggtctgctgggcttcctgcatcgtcatgctgtgcccggcctggaaggtgaactcttcggtgtagctgttgattgccagatagcgtgcggccaaggagagctgctgcaccgcgttcaggctgacggagctggattccagttgcttgggcttttcccgctgccgggcctccagctgccagatgagccgtggggcaaacagaccgacggcgatggcggccgccgccaggcaaagggcgatggcgcaatatcgttttttcataaacgcgccccctttaacaaaacagtgacacaggtcccgccgccctcgcggctggcaaaggtgatggaaccgtcgtgcagcgcggcgatcttctggcacagggcaagccccaggccgacgccgccctgggcccgggcccgggatttatcgacccggtaaaacgcctccgtcagatgtgccagcgcttccggcggcatcccgcgcccgttgtcgagaatgcggatgcgcaggagttcttcctgccagtcggcggcaagatagatattgccgccgtgctccagggccttgcgggcgttgtcgagcagattgacgagcaacgactgcaccaggtccggctccaggcggcacaggccgggcttgacgctgtattggagctggatgttctcttttttatagatcggctgcagatggcggcacagggcagcgatgagcttggcgggctctgtgggaacgaagtccggcgtctgatttttcaggaccaacaggtccagcagcttgagggagagggactccagccgcttgccctcggagaagatataattcgccgcgtccatggcctcctgctggggcagggcctgggaccgcagcaggtccgcgtagccgatgatcgaggtcatcggcgtttttaattcgtgggcgaagctgcccataaagcgctcctgccgctccatggactgctgcagctccgtaatattctcctccagctgcgccgccatggcgttaaaatcccggcagagctggccgacctcgtcgcccgtcctggggcggacgcggcagctaaggtccccggcggcaagacgccgggatgcggcggagagcttgccaaggggcttggtcaggacatagctgattccccagctgagggcgccgcccagggccatgacggcaagaaagacataggtatagacccgcagcatcctacgctgggtctcgtaaatatccgtgatgtgatatgcgatatccagctgcagcgtctcgtcgctggtcgagagcaggccgctgatctggagatagacgtccgtctggccagaatcatccgtatcctgcaggatctgcgtggcgcagtgatccggctccggcgtgagggctgtcaagagctcggtgctgccatcctgcaggatcgtctcctgcccggcgcgcaggcggacgcagtcccaattctgctcaccctccaggctgcgcagggtggtgcagagggtatcgtaatccttctgcatgctgctggcggtaacgagctgcagcgcccggagattggcgctgtagttttccaggctggccgactctgcctgcagcagggcggtgcgcagactcagggtgatgagcgcgccgccgcctgcgccgaagaccagggccaaaagccaaagcatgcaaagggtcattttcaggcgaaatttcatcggttcctcccgggcgtcacacttccagccgatagccgaccttgttcacggcccgcagcttcgtctcccagccgacctttttccgcagccgctggacatgcagatcgacggtcttgctgccgtaggggaagtcctccttccagacccgctcatagatcgtctcccgatagagggcgacgccggggttccgggcaaagaggaggagcaggtcatattccttcttcgtcagtgcgatgggcgcgccgttccgggtgacctgcatggcctgctggtcgatgtgcaggccgccgatgtccagggtgtcgctggtcttatggtagcgccgcaggacgacatccacccgggccagcagctccaggacctcaaagggcttgacgatataatcctctgcccccatgcgcaggccccggacccggtcgtcgaccgcgtttttggctgtgaggaagatgaccggcgtcccggtggggcgtatatattccaggagcgaaaagccgtcgacgccgggcagcatgatatccagcagtacgaggtcaaaccgctcccgctccaaaacatctgcagccgccagcccgtcgtagacgcactggcagtgatagcccgcccgtcgcaggctcaagcggatcagctcggcaatgggcttttcatcctccacaattaaaatgcgaatcatctggcgcacctcctggtcgcagcataccaacaaacagcatcaaaacggcatcatagaacgaagttttttcgaatgccggagagcagatcgtttctcagcgccagtttaccatatttgcccgcccgaggcaatcccgggcatagcgggcggggcgggcgcataggcttgtcacgggtgaaagcaatgcaatattacgcagaacgggaactgtatcatatctgcccgccgccgctggccgagcgcctgcaggcgctgcctgcggcggagcgggaacggcttgaggaggtgcggctgcgcctgggctacccggcggccatgctgtcgcggggccgggagacgccgctgtccggcgcgggcgggccgctgttggtgacgagtcagctgctgcggcagctgctggaccgggtgacggattactcggcctatgcggcggcggattacctgcgggcggggtttatcaccgccgctgggggccaccgggtcggcttctgcggccaggccattttagaggcggggcggatgcggacgctgcaggcgttttcctcagcgtccatccgcgtggcccggcgggtgccagattacgcggcgcagctggcagcctggctgcacagcgcgccggactcgacgctgatcgccggaccgcccggggcggggaagacaagcctgcttcgggagctgacgcggctggtctcagatgaactggggcagcgggtcagcctggtggacgagcggtttgagatcgccgcctgccaggcggggcgggcgctgtttcctgtcgggcggcagacggatatcctctctggctgccccaaggtgcaggccatgggattgctgctgcggacgatgtctccccagtggatgattgtcgacgagatcacggacccggcggatatcgccgtgatgcggcaggctgggtactgcggcgtccggctggcggcgacggtccatgccgccgagcggcgggatctggaggagcggccgctgtaccggtcgctcctccaggcaggcatttttcggacactgctgaccatcgggccggaccggcgcgtcagcatggcgccgctgtgacggcccggcttttgggcgcggcttgcgtgctggtgggcgcggcaggggcaggctttttgcgcgcggcgcattgggcgggggaggcggcgctgctggcatccttttgccaggcgctggcgcggatggcaggggagatccgctgcaatcagacgcgcctgccgcccctgtgctgccagctggcgcgggagctgaccggcccggcccggacgatttttttagaagtcgcccaggggctggaagcgggggcgcgtccggcggaggagctgtgggacgcggcgctgctgcgccacggctgcccggcggcggcgcggcagatctggcatgatcttgccctgaccttcggccgctacgatccggaccgccaggcggacgccattgacgcggcgctggcccagatgcagctgcttgcccggcaggcggcctccgcccgggccgagcggggcagacagtgccgggtctttggcatctgcggcggcgcggcgctggcaattttactgctgtaggcggaagcgatgcggaaaccatgcaaaggagaaggcgcgggggatggaaattgaccttgtttttaaaattgctgccgtggggatcatcgtctcgatcctcaatcaggtgctggtgcgctccgggcgggaggagcaggcgacgcttacgaccctggcggggcttgtcgtcgtgctggtcatccttgtggagcggatcgcggcgctgtttgacctggtccagcgcctgtttggcttctgatgaccggctattttgtcaaagccgccgccatggcgctggccgtcgcggtcctggcaggccttctcaaggggcggcaggcgagcctggcggcggcgttgacgctgggcggctgcgcggcgcttgtctattttgcggcgctgctgctgcagccggtgcggagcttttgcagcgagcttgcgcaaacggcgggggtcgcggaagcgtatctgcgcccggtgctcaagtgcaccggcatcgcaattttgaccgagctgtgcgctgccctctgccgggacgctgggcagtcggccctggccaatgccgtcgagctctgcggcagcgcactggtcatcgtgctgtctctgccgcttttgacggcgctgctggcgctgctgcggtcctggatgggggggtgaggatgcgcaggtggctttttgcactgctctgctgcctggccctgacgggcagcgctttggcggcggagccggattggttcacagaatcggacctgaccggcagcttggacgcccaggcccaggcgctgctggatggtgtcacgctggatgcggcggatttttccggcggcctgcgccagcttggggcaaatagtctcccccaggggcggacgttcctgcgggacgcgctgcgcaccggcgggcagatcctcgccattgtcctgctctgcgcgctgctgtgcgacctggaggagggccgggcggggcgcgccatcgggctggccggggcattggcgatgggcgtgctgggggcgcagctcctgcagacaatgggcacggccagctccggggccctggcccagctgcagagctatacggacgttctcctcccggccctttccatggcgacggcctcctgcggcggttttaccgccgcggcgacgctgcaggcggggacggtggcgtttttggcgctgctctgccgcctgatcctgcatcttttacagccgctggccctggtctacctggccctggcctgcgcggaggcggcgatgggggacgagaccctggcaaagctgcggggcctggtcggctggatcattggtgccagcttgaaggctgtgctctttgccttcacggcgtacctggccatctccggggcaatttcaggcagcgccgacgcgacggcggtcaaggcggcgaagctgacgctctcgggcgtcgtccccgtcgtcggcagtatgctctcggacgcgtcggagacgccggtcgtcagcgccggggtgctgcgcaattccatcggcgtgttcgggatgctggcggtcctggcactgtgcgccgcgccgtttttgcagacggggctgacgtatcttgtcctgaagctgacggcggcggtcgcgggcgtctttgacgccgggcacctgaccaagctggcagacgcaattgccggtgcggcggggtacctcaccgcgatgacgggcagctgcgcgctgatgctgctcatcagcctcgtcagctatatcaaggtggtggtgtgatgcaggcgctggggaattatttgctgcgcatcgtcgccgcggcgctgctgctgggcgcggcggggcagctggtccggggcaagcggggcaagcagatgctgcgcctgtgcggcgggctgtgcatggcactggtcgtcctggcgccgctgcccggccttgcatcgctggcggggtcaaattcgctttcggacgcgctgctggagtctcagcctgcggcggaaaatcttgcccaagtgcgtgaggagctgggcaagctcatatctcagcagacggaagcatatatattggacaaagcccgcagcctgggcgcgtccgtcacagtgaaggtctcattggaaccactgggggactattacctgcgccccagcgccgtgacgatctgcggtgcggtgacaccggcacagcagcaggcgctggcccagtggctgcaggaggatctggcgctgacaggggggcaggtcacatgggaggaataaaggagaaaagcgcaggcgcgcttgcaaggcttggaaagtacaaatacgcgctgctggtcctgctgctgggcgtcgtgctgctgctcctgcccagcggcggcaaggcggaaaaggcggagacacccgccgcgcaggacgctggccagcaggagatggccgaggatgctgccgcgctgcaggcccagctgggcaagctgctctcgcagatccagggggcaggggaggtggaggtcattctgaccctgcggaccggcacccagtatgtctaccagacggatgtgacccaggaggagcgcagcggggaggacgacccgcagagcagcgtcacccgcgagaccgtcctggcggccagcggcagcgggcagcagcaggccgtcgtgacccagacgatctatccgacgtaccggggcgcggtcgtcatcagtcagggggcggatcagccccaggtcaagctggatcttgtctgcgccgtctccagtctgacggggctgagcgcggataagatcaccgtcgtcaaaatgaaggagcaataggaggaaattttatgaaagcttggaaaaagaacgcggtcattgcaacggtgctggtcctggtctgcgcggggatctacctgaactgggcctacgccgggcacgacgagacccaggacctgacggagacgctgaacgccgaccaggtcctgggggacaccaccatggtcatcgcccaatcagacgacgccctgcagacggcggcgaccgaggggctggacgagacggccggtgcggcggattactttgccgccatgcgcctgagccgccaggaggccagagacagcgccgtgacgactctgcaggagaccatcgcctacgctggggacgacaccgcggcgacgtctgccagttcggacacgctggatgagctaatggccgtcagcctccaggaggcgcagatcgagagcttaattatcgccaaggggtacaccgattgcgttgcttacatgaccgacgacggcatcaacgtcgccgtcgccgcaccggccgaggggctgcaggatgcggatgtcgccctgcttgccgatgtcgtcaccgggcagtcggactatcagctggcggatatccatatcatcgaagtaaagtaacgaagcctggggtaacatgcccgcgccgcggcagcttggggggaggccccggctgccgcggcacattttgtggttgggcgcgagaaaaaggttgacaaggtcctgtaaagtgatatataataaataaaaatatgatacattgtatcaccctccgtgcgctgctgcgctgcgtggcgcgcggataaaagaaacccggtgagaatccggggcttaccccgtagctgtatttgcagttgcgcggctttgcgccgaaaggcggccattgtgggcgggagctcatgagaaggtgggaagccgcgcggggcgtttttggcaggtcctctgccgcgcccggctgcatgagccagaagacttggtgatgcgtgagcgcctttgagcgcaacttgggcacggaaacaacggccgtggcagaattgtattctgccacggcctttttgcacagcagccgcccagctgcagaaatccccggttccgagctgggaatgatatagtccccttagagtagacactcgaaatagcaaaaaattcgagactacaataaggggactattattatgccaagaaagagacaaaagaacaa

SEQ ID NO: 1562 - DNA, 5650 bp, Unknown
  16S sequences of unknown bacteria
agtgatgcttttccagaaattcctgcaggatcagttcctgttttgcctgtgcgctgcgatgctccatacaattccgccggtggtatttacttttcatatcataccataaaaaagggtatgttgtgataataaagatgaaaacagaaaagcaaaaaaggaaatgcaacaccatgaaacgactgatggcaatgcttctggcggctgcaatggcctgttccatgactgcctgcagctgctcggatggtcagaagagcactgcagagggagagaacggcgaaatgatagtccgcgtgggtgacttcctgggtgagaccttcctctatccggtcaagattgccaatgcaaagggtttctttaaagaggagtttggcaaggacaacatcaccatttccattgagtacctgggttcgggcgctgttatgactgaggccctgactgctggtgagctggagatgtccttcctgggcggtcagccggcattcagcggtatttccaacggaaacggcgtcaagataatctcgatggctacttcttcgtctaccgacccctgtctgctggttgcggctgattcggacatcacagatgtttcgcagctcaagggcaagaacctggcagtaaacatcggcaccgacaaccactaccagctggttgagatgctggctctgggcggcctgaccgaggacgacatcaacctgtataacctcaaggacgccgaggcctatgccgcactgacctccggtgagattgactgcatgcagagcattgctcccaatacctatcagtttgtggcaaacggcgatgcccggattctggctactatggaccagactgagggacgcaataaccaggttctggttgtcagccctgattttgccgaggagcatggcgatatcattgtacggttcctgaaggttctgcagcgtgctgtggactactataaggagaatcccgaagagtgcaaggatatactggtggagtatgtaggtgacaatgtgaaccgtgacctgatggatgaatacatggacaagtatgactgctcgctgcatctgaatgctgaggacaaggcatatctggagcgtcagtacaacttcctgtatgagcatgatatgctctctggtccggtagatctggaaactatctatgatgacagcttcctcattgaagcatttggcacaaccgaagcgcactgactatcctgatatttgagcgacaacggctgcggtatgtactttgctgcggccgttgctgtatgtcggattgtattctctgcgcgtcatgaaaggagatttcatgggtatcattgattttcgcatgcgtcccctgtatggcggatatctgtccatggctgaggcgggaaccaccgataagttcctcaccggactgcgctgtcagatcactccttcgatccgggagtgttccattgagctgctggtaaaggagatggacgaggccgggattgaaaaggctgttatccccggacgacagtcccccggaacctttgtggacaaccaggaactgtgtgacctggcaaagcagtggcccggacggttcattccgttcccgctctatgatccgttgcgtcccaaggagagcctggaggaagtccgccgcatcctgatggacggccctggcggcggtgtcaccattgagcccggtttcggcaataccctgcggtttgatgacccgggatatttcccgctctaccgctggctggaggataacggcatcccgctgatgctcaccttcagcggttccattacccccaccattgactgcacactccccggacggctggatctggtggcacagacccatcccaacctgaagattgtagtcggacatgccggctggccctggagcaaggagctcatctgcatgggattcttccgccgcaacatctatctggcgccggatctctattccatggcttcggtgcccggcagtgaggactaccgtctggcagcggccggaatgctgcaggaccggttcctgttcggttcctcttatccgctggttccgctgggtgaggctgtggacaatgtccgtgcctggaagctggaccctgcatgtgagcagagagtcctccatgatacagcggcagaactgctgagctggaaattctaatcgaccgaaggagttgtgatcttgtggaaaaaaataaggctatgctggcaggcaaccgtgcgtaccagctcttcctggcggtgattgctccgctgactgttttgctgatctgggcactcggttccaatctgggactgatccgtgccagtattctgccgtcgccccagcgggtgctgtcgaccctcatttcgctctgcaccagcggtcagatggcagaggacctgagcatcagtatgctgcgtgttctgcgcggtttcggcctgggtgctgtctgcggcatcatcattggttcgctgatgggcttctccaagactgccaataaggtcctgggttcgctggtcagcattctgcgtccggttcccatgctggcctgggtgccgctgtttatcctgtggctgggcatcggggaaagctccaagactgctgttatcttcatcggcagcttctggtcggttctgctcaacaccatccatggcatccagagcactgaccccaagctcctggaggttgcctatatcctgaagaagagcaagtgggagactatcaccagtgtctacctgccttcggctctgccgtcggtctttaccggtctgcggctgggtatgggttccgcctggacctgcgtggtcggtgctgaaatgatcgccgcttccagtggtatcggctatatgatcagctatgcccgggaactggcacagcctgccaaggtatttgccggcattatcgtgatcggcgctatcggtcttttgatcgatcaggtactcctgcggctgcagcgggtactgctgaaatggtcctatgtggacgagaagtaaggaggaccgatatgtctgacgagagaaaaacacaggttctggtggacggcgtccgcagaaccttccagatttccggcagtgaactggtggtactggaccgtattgacctggacatcaaagagggcgaattcatcagtatcgtaggcgccagcggctgcggcaagagtacactgctcaagctgattgtcggtctggaccatcctacctcgggccagatcaaggtgggcgaacgggttgtaaccgagccctccctggactgcggcatcatttttcaggaggccagactctatccctggctgactgtgtggaagaatgtggaattcggcatcacccgcaagctcggtgcagctgagcgccgggaactgatccagcagcacattgacctggtgggtctgcatggattcgaaaatgccctgcccaagcagctctccggtggtatgcagcagcgtgtgagcattgcccgtgctctggtgaaccgcccggatgtactgctgctggatgagcctttcggcgcgctggatgccctgacccggatcaacatgcagcgggaagtcctgcgcatttgggaagctgagaaaaagaccatgatcctggtaacccatgatattgatgaggccatctatctcagtgaccggatcgttgtgctgtccagccgtcccggacgggtccatgacatcatcaatgtggatctgccccgcccgagagagcgcagcggtgaggagtttatccgcatccgtaccaagatccatgagtacttcttccagaatgccatcggcggcagcgaactggctgaataatattgcttttctgtgtaaaagcccggacctttcgataagaaaggcccgggctttttgtattctccggggagcgggggatcagacgatgttggagaggacaaactgctccgactcccagatgtggatcagcatccgccggactgtgttggcctcagccgcaaaggaggggatctccccatagcgcaggtatcccggcagcttggcaatggacagggtgacctggtccagatccccatgccgcacaaaggcaaggatgctgtgttcattttcctcccagtcctgctgcagggcgctggcccgttcccaggctgcctgcatctcgccccgttccaccagctgggagataccgtcgatctctgccagcacatgatcctttacctcggtgagccggtcaaaggtccagtccccggcccagatcagccccactaccagcagaatgcagataataaaccgcttcatgtcttatccttctttacaatatggtatttccggcggcggtcacaggtcatcaggaagatgtccttctgggcaatgccctcctgttccagcgccttctgcagccataccggcgatacgccgcagtagtccagggaagcgggcagcacccggccctgatccacgatcaccaccgggggagcgtcgatgaagtcgtcccggtacagtcccagatccccgccggtggcaggacgggcggcaaaccggggatagaccgacagggaaccggtggtctccaccacggcgaacagcacttcgctggggtcaaaatacccggcagcccgcagctgttcgatgaggtcgtccaccgaaaaacgcagatcccgcagttccttctgcatgatctgtccgtcccggatcaccattttggggccgccgcagaagagccggcgggcagtgcggctgcgcatggtgagcccggagatgaacacctcaaagcagacaatggtgaggatcggcacaataccgcccgaaaggggcacatccacatcctgaatgggcagggtggcgatattggagatgagaatggtcaccaccagttcactgggctgcagttcgccgatctgccgtttgcccatgatccggagccctgcgacgatcagcagatagagcagaatggttctggccatcagtgcatacatgaaaaaactcctccttgttataggaattagcatggacaaagccgggcaggattattcccggatcacagacataaaaagtccatggctggtccatactcacagaaaaggagggaaacggttttgctgtttgataaactgaagcgggaaaagcggcatacttatgaggttccgaagcgggacccgggactggatcagccgctgagtcccacgctggaggataccctggcaaggctggcacagctcaccggacagacggcggatctgcaggtcaaccgtctggaggtggagggctacaagctggcctttgtgatgtttgaagggctggtgaactaccagaccctgatcctggggacagcctcggatctgcaccggctgctggcagggcagaaaatcccgtcctgtctggtgcccgaccggctgtgtcaggagctgttcatggcaggggacaagaaaaaactccggagctttgaagagctgatccagttcatcgcttcgggctttgccgtgctgctcatcgacggcagccccgagggggtggcgctgggggtccagggattcagcttccgctccatcggggagccggcctcggaaaataacctccggggctcccgggagggctttgcggagccgatccgcatcaatatgtccatgatccggcggcgcatgaaaacccccagcctgcgcatgaagctgctcaaggtgggggagaagagccgcaccgatgtctgtctggtctaccgcagcgactatgccgatcccgagatggtgcggcgggggg

SEQ ID NO: 1563 - DNA, 13411 bp, Unknown
  16S sequences of unknown bacteria
gtttcctcaagcttattttaacacataattttgaagtctgcgttacggcattcggctttcattgccttttgtgccttgagcgcagcgaaaggaatggtcatacacatgaaatatattctgatcgttgaagacgatcctgttctgcgtgaggggcttgccaccgttttacagaataatgcgatctcagtcaaatccgccgccgatcttgcgggagcgcgacggatccttttggaacgccaattcgatctgctcattttggatgtcaatctcccagatggaagcggaatcgatctctgtcgcgaggttacggctgtgcaggatatatctgtgatatttcttactgtccgtgatgctgaaattgacgaagtcaccgctttccgtgccggtgcgtgcgactatatcaagaaacccttttctctgacgattcttcaggaacggatcacggcagcactgcgcaaacgctcaccgaattacatatatgatgacagccgatttcattttgatttcaccgagctgaccttttcggcagacggcaagcggatcaatctcagttcaaccgaacagaagcttctcgctgtattctgcaatcacaagggacagattctcgaacggcagacgctggtcgacaaaatctggtcgtgcgattctgattacatcgacgaaaatgcgctgtcagtgacggtaaagcggcttcgggacaaactaggtgcggactgcatcggtacagtctacggtatgggctacgtctggaagggggcgaagaaatgatcatctgtggaagtctgttattggtgttttccgcggcgttttttgtgctgtggcagtattttgcgagtctatggttgattttcgagtacatattggctctgctttcggtctgcgttgtatattttgttatggagaatcggaaacagaacctgattctcgaccgatttgagcagatcctccggaacggcagcgcagattacatcgccgatgaaagactgacgccgaccgagcgcaagctgatcacctacctgaacgagcttaaaacaagagaaacaaaggtccagaacggatatcggagcatctcctctcttgttgcagacattgcccatcagactaaaacgccattgtcatcaattcttatgtacaccgaaatgagtgaaaacggtgagatcatccgggcacaggcagaaaagctgacgtttctcatggattcgctgaccaggctggcgaaatgcgagggcgggcttatcgcggagaatctttcgccgaaggaaaactccgtgaaggaacttataagacgggtaatcgaagcgaattatgccaatgctgacgagaagaatatggtaattcgctgtgacgtaccggacgggcttatggcagtattcgatctgcgctggactgcggaagctgttggaaacattctcgacaatgccgtgaaatattcaccggacggaagtgaaatcagaatctctgcctgcgcatacgatatgttcgttcgcatcgacattgccgatcagggcgttggaattccggaggatgagctctgcaatatctggaaacgattctaccgtggaaagaatgcggaatcggcttcgggtgtgggcattgggctttacttgacggcgaacattctgaacaccgaaggcggacgtgtttcggcaagctcagatgaaaacggcagtgtctttactgtttatctgcccaaaaactgaattctttcaaagctgtaagatttcgtcaaatttcagtaagattgtttttgtaaaatgaaaccatcaaagaaaggaggcagttttatgctgatcgaaaccaaaaatctcacaaaaatctacacaacaggagaaactgaggtgcgcgcgctgaacgacgtatcactgtcggttttccgaggcgaattcgtttcgatcgtcggcacaagcggcagcggaaaatcaacgctcctgcatctgctcggtggtctggacatccccacgaatggaaagatattcatcgacggaaccgacatttacaagcttgcgcccgacccattgaccgtgttccggcgccggtgcatcggatttgtgtttcagcggtataatctcatcccggatctgaatgtgtgggaaaacataactctcccactcggacttgacggaatggacgcggatgcaaacgaggttgacgagctgctccatacgctcggcattgcggacaaaaagaacgccatgccgtcgcagttatccggcggtcagcagcagagagtggcgatcgcacgcgcattgattaccaagccgcacatcattctcgccgacgagccgacgggcaatctggattcaaaaaccggcatgggcgtcatgctgacgctggcaaaactgaacgagaaattcgcgcagacgatcgttctgatcacccacaacgaggaactggcgcagatgacttcgagaagaatatggatcgaggatggcagtatcgtgagcgattcgggggtgagcgtgtgaagattataacaaagcttgccttatcccgaatcacatcaaaaaaagcgcgttccgccgtgatctgtgcggcgatcctgcttacgatggtgctgttcatgacgatcgtgagcatttcggtgaatatggtttccggctactcgctgatgatgcgaatggcttcgggaacggattatcacggttatctgcgcggcgcaacatttacactgacaggcgaagagctgcgcgacgcggcgcggcagtcaaaggatatcgcggaggctgcggtatcctcaaatattgcacagtatgcgatgagtgaagaagcgatccatacatcaagcgattttattcgtgccattgaatgtgaggaggacctacagcatttttataccgatctggtcgagggcgagtttcccgacgacgacgcagaaattcttgtaaatccgctttattttcccgatgcgaaggtaggcgacaccatagggctttactatatcagctatagaggtgagagagcctgtactgcatacgctgagttcacagtcagcggaattataaaaggtcgcgccgatgttcagatgaatgttgtgatgcggtacagcgatactctggaggaagcatacggattttcagatcagtatctgaacgtgtatttcagctttcaaaacagccgaaatcttaccggcaaatttgatgcactggtgaatgagacgcttgccggatacaagctgccggagtatgaggtttatggtgtgctcaatcaggcatatctgcaatcctcaatcagcgaagtactgaatccggcaacaatatttctgatcctgttctctgccgcggtggtgttcctctgctcatttctgcttatctacaatgtctactccatcgcgctgacgcaggatatgcaggcgttcggactgcttaacgttattggaatgacgcataaacaaatgcgccggatggtcgtgattcagtcgacgatattatttgtcgtaacacttccggtgggactgaccgcaggatatttcatcggttggaagctgctgtcaccgctgctgttttcgtcgctggcttatgagggtctgaagtttgaattcagtcctttgattccacttgcagccatacttctgacggtattcacacttctatggtcagcgaccagaccgcttgacaagctgaaattcctgacgccgatcgcaacaacagattattctccggcggctgatctgccgaagcgttatgtgcggaacaagaattatatccggaagaacgtcacgccaaatgtgtggcggatggcaaagtacacgatttcccgaaaccggaaaaagacggtgatcactgcgttgtcgatgtcgttgtcggtgattttgttcatgctgatcgcgacgctgtgcgactatatggtcgcgtataccgaatcgaatctgcaatatgctgactatattgtcaagctgaatcatacctatcgccttacaggcggatcgacagagacgactatgccatatgatgcggatggcggtatcggcatgagcgagtcttattgcgagacagtcagaaattcggtttatgcggatgaagtcttcctcatccgcacggcgatgacgcagatttccacgccgcaggctgcaagagaatcgcttggatttctaaggaacgaatataaattctttgattcctatccggaactgaaaaaagccttatccggtaagcttgacatacttgttgttggaattcccgataagctgtttggtatgatacggatctcagagaatagtagcctcggttcgggatatggattgggttatgctgtgtatgacggtggaaatacagccggaataactgacagcgaagggaacccatatgatctgttctattttatgggcggtgaatcggtgaagcttggaagcgaaaattatcagatcatcagaagcgatgtcatcagtccgactgataatatcactggatggatcgattcgagcgtttaccgcgcggtgttgtatcttcccgaaagtgagtttctcgtggaattcggtgatggtctgatctacgcgatgcttataaacgcaaaggatgattgttatgagctgttgcgttctgatcttgaaagactcagtgtgaactttactgttttcaccgatgaagcgaccgaagcgcgatatctcaaggaagctgaagaatcaggtacagctactatggaaacgctgtccttttccgccggaacagacggtcggatggatgattttgatcagatgaggcagacggtcatggcgatccggactgtcggctacagtctttcggcaatgattttcctcattggcgcgttgaacgttatcaacaccgccctgtcttccgcttccgagcggaaacgtgaattcgccatgctggaagcggtcggtatgacaaacagacaactgatgcggatgctcctgaccgaaagcctgtacagcggcagcgtggcggtgctgatcacagtatgcacaggattcccattgatcgcggtgattatcaacacggcaatggattcgctcgtttcactgaactggctgtccggcgtgatcatgatggcggtttgtattgccgtttcgactttttcgggactggcggtgttccggatgacaagatctgctgctgttgtggagcggatcaaggcggaataagcgaacaaaacggcatggatcctgacgatccatgccatttttaattggtgcgtccgacatgggcaacaacttggtggtgaaagtccactatgcgctcggtagcaggaagcattagccgaaggcaaagggtgtccatcgtgaggtggaatccgaaggaagccggatgtgggggctgagaagtgcctctgcgggcaaagttccggattgacgaacagaaatcgcataaagaggctgacttgggacggacgactctgccaaacaagaagaagtacaatgctgcccgaatcccatacagtagatgcggcagttacggaatgaaggttattattcttactcggggaggtctgcaaggtatgctccccacttctcaaaggagtaagccgtgtcgaaaggcagtggttgaacttgcagaagtcagctccaatcatagtaccgaagaggcgactaatcgccgtagagggaaggggtggacggtaaggagttgcgtgaaatcaaaggtgaatgattgtgattgaaaacagttgctccaaggagattgaatgactgagggtaggttggaaactgagagtagaggtcgagaatgtttagcagtcatcaaaggagaagccgcaaacaacaacttatcgaaacgtcgtgtacggacccgtacacacggtgttgtgggaggactgcggttagccaccgcctcctacccgatcgtaggataaggtcttagtgtccctctgtcgatgcgcggatgatgagctccggcgtgagaaggatattttctgtggtctgggtgtctgattctatcattgatatcagcttttcgacggcgatgcggctcatgagctctatgtcctgccggactgtcgtcagcggggagaggagcattttcgagaagaagaggtcgtcgtacccggcaatagcgatgtcgtccgggatgcgtaccgagcactcattcagcgctgtctcggcgcccgccgccatgaagtcgtttatcgcgatgatggcttcgatcttcctgccggaggaaatcagttcctttgtcctgatatacccttcctcataattgtatctgtcgcagacgatctgcaccgcctgaccgagatcgatgccgtgccgacagaacgcctgtctgtagccgtcgagacgttgggaggagacgggatttttgtcctgaccgataaatagcccgagcttctgtctcccattgtcgagcaggtggtcggtgacgatctccgccgcttttctgaggtcggtcatgacatacggaacttcccgacccggcagacagtttgagatgaacatatacttgacatggttcatttcgagcatcgggagatagtcagcgagcgatatgctgtggttcaccggtgcgataagcagtccctcgacgcgtcttgagaccatgcgagacaccgcctcgatctcggtctccatattctcgtaggagtcggcgaagatcgattcgtagcccgcctcgcgacagaacatcgttatcttcgacaccatgcggctgtagaaggggttgtcgatgttcgggatcacgatgccgatctcaccgctgtgccgcgccgcgagactgcgggcgctgttgttcggggagtatcccatctctcttgctcgctcgagaatgatctgtcttgtctgctcgctcatcctgccgcggttgtttatggcgttcgatacggtggcttcggtgtagccggtgctctcggcgatctctcgcagtgtgactgacattttttaactccttttgatgctcttttgtaaaattatatcatatcttagcggaaaagtaaagggggcacggatttttttttattataaaaattattcaaaaatacttgacaaaatttgccggatatgatataatgaatttataacttaagcgcttaaccataattggaatacgaaagaggtatcgatatgaaaatgaataaacggctcgcacttgtacttatgctcgctctcctcattcagacgactgcggcgtgcggcttcgacgcgaatgatggcaccacaacgaccgccgatgacagcggtgagacgaccgaggcagaggtgacgacagagtctccgaccgcgcatataccggataatgatttcgagggatatgagttcaggatgctggatataaaggctcctgccgggtggacgactatttcctatggcgatgatctctgggtggaatccgagaacggagaaatattcaatgatgcggtgtggaagaggaatcaggcggtcactgagaagtataatttcacgatatcccttgagcttgatgagatagccaatgtcgttcccagagtgaaccggctcgttgcggcgggggatcatgagtatgatcttgtattcgcacggctctatgaggcgccgcagctcgtgtataaccggtcgctgctcgatctgaacgagcttccggtgatagacttctcaaaaccgtggtgggatcagaactcagtgaaggatctgtcaatcggcgggaagctctatttcgccgccggagatatgacgacgatggataaggatgcgacatattgtgtcatctacaacaagaagctcgccgataattatcaggttcccgatctctatgatctcgtgtacaacggaaaatggacattcgatgcaatgtcagattacatgaagcgagcaacgacagaccttaacggcgatactgtcattgacaggaatgaccggtttggcatgctcggcagtcacgatgccattggcggtcttttccgctcggcgggcggtctgctcgccgataagaacaaggatgacatgatcgagctttcatttgcgagcgagcgcaatttcacgatcattgataagatatttgatatcacctacagcgatgatttcctgaatatccacctcgagaacatgacgaatcaggagttccgcgatatgtttgcggaggataaggggctgttcatctggaacactgtcgagatgctcgcttatctccgcacgaaggacgtcgaattcggcattctcccgtgcccgaaatatgaggagactcaggacagatatctcaatatgataaccgtccatcagacggggctgatgtcggttcctgtgactgagccggatcttgagcgcaccggaactatcattgaggcgctgacggcggcgtccgataatgtgcagtcggcgtattatgacgtcaacctcaacgtcaagggcgtccgcgacgaggagtcggtcgatatgctgaagctgatcttcgcgaaccgcgtctatgatgtcggagacatattcttctcggacataagctatgagttcctgtcgatacagtcgaccggctcgcgggatatagcgtccttctgggccaagaaggagaagacggtgcagaataaactcaataagctcctgaaggcgctcgagcttgagtgaagcggcgtacatacgaaaggcactgatatatgaaaaaggtttacatgatcggcaacacccactttgaccccgtatggctctggacatgggacgaggcgatgtcttcgataacggcgaccttccgctcggctctcgaccggatggaggagtatccggagttcatttactcgttctcgacgccgccggtctttgagtggataaagaagacctcgccggagatgttcgacgagataaagcggcgggtcgcggaggggcgatgggagctcgacgagggctggtgggtacagcccgactgcatgacgccgtccggtgagagccttgtgagacaggggctttacggacagagatacctgatggagaatttcggtagatattccgatactgtcttcaatatcgacagcttcggacatcccgcgactctgccgcagatacttgaaaagggccggataaagaattatgtcttctgccgaccggagggacggcatatacatctcgacgcgccgctgttcaactggaagtcggcggacgggagctctgtccttgcctacagggacgactcgccgtatatggacactgccgccgcgataaatggcgcggaggaatgcccgtatgacagcatgaaggtctacggagtgaccgaccacggcggagcgccgacgaagaagtcgatagatgagataagacagagcaaaaacgccgtgtgctcgatggtctcaggcttctttgagggaagatcgaccgactacacggtcgaaagagagctcctgaccggcgacttcggcgtatacgcgaacaataccggtataaaggctctgaaccgccgggcggaatatgcgcttctgaatgccgaaaagacagctgtcatttctgacagtgacgaccgggaaaggctgacagagtgctggcatgacgtcctgttcgaccagttccacgacattctcggtggggcgtgcataaaagaggcgtattccgacgcccgcgccctgtacggcagggctatatccaccgcgaatgagataactcactataatcttcagcgggtgacgaatcagatctcgatgccgggaaagaaccccgacaacgcatggaacatcgtcgtgtggaacctgaatgcggcggtatatgacggctatatcgaggcggaggtacagtgggcgcacgagttcccgtggtacagcggcggcatcgcgctcgaggacggcgacgggaaacggtatgagtgccagatcattcgtgagaggtcggtgatcccgggcttcagatcgaggtttctcttcaaggcgcagataccgtctgtcggatacaaggcgttcaaggtcataaagaccggtgaggaggtcgtgcggcagacgatcgatgatccatggcacatcagcaccgatattttcgatgccacactgtccgagaccggcgggatagaatcggtacgcgacaagagcggaaagctgatacaggggcagctgatgtgtccggtctgccataccgacgacggcgacacatgggcgttcaacataaagagctacggcgatccgctcgaagcgttcaaggaagaaaagctcgaggtcgtcgagaccggagagctgcggactgtcgtaaaatcgaccctttcgttccgctcgtcaaagctcgagatgtactacagcttctacaagaaggaatcatatatcgatataagataccgtgtgaactggaacgagaagcacatcgcgttcaagctctcgagcgaccttccggaaaatgagcacacggcgtcgataccctacggaagcgtcgtgcggggagagtcggcggcggatgtcccgatgggtgaatggctcaggacggacagcttcacggtactttcggatcacattttcgcgtataacgtgacggatgaagatctcggactgactgtgctcagaagtccgatctacggcgacctgcggatatcggagctcgatatggacacagactgggagataatggagcagggataaatgaaggaaaaatgcgcatatgcctttccgataccccagacgcgccgctgtcggcgatggaattcaacaatccgccggtcgtcatgtgtgaatcgaatcacgggggaaatatggcgccgtgcggcagctttcttgactgcggcgcggagagcgttatgctgactgtactcaagaaggcggaggacagcgacaaaacggtcatccgcggcgtcgaatactccggcagcgaacagaggataaaactcaggctgtgcggcagcgaatatgagaccgacgtcgcaccgcacgagatcttcactttaatgatcgacggggacagcatcaggaaggtcgatatgctcgaggaaggcattgaacagcaaggctgaaaggtgaaaaagatatgatttttgagaacaatgacacgatagtcttcgcgggagactcgatcacggacatgggaaagataaagccgtatggcgaggacggcgggctcggtcaggggctcggagagggatatgtccatatgttttccgatatgatgtccgcgacgtacccggagatcgatctcaggataataaattccggcgtcggcgggaacacgagcgcgcagctggccgatagatggcagaaggacgtgctcgatctcagaccggattttatcagcgtgtgcatcggcgttaatgacgcgataaataatgtctactgaataaccatcaacattttgcatggcagcagaaagccaaggaaccaatcgagaaaccgcaaaaaggcgtactgaatcttacggagattcagcagcagaatggacagggcaaccacatgcgcagctgtttctttcagcttcgcgagcctattaaacattttctgtaaatcccgcgaatctgtggtataatagaataaaaaaacacaggagaagcaaaatgggaagaccaagaaaatcgccgtcgatgactgtaaataccgccccggatgccccaactgcacggcatacagccccacataaaaacggaggcgagccccactttacaaaaaagacgaaaatctatggtataataacgttgcgcacgaaaatgcgacaaaacaacggaggtataccaaaatggtaaactacaaagaaattctgcggatgagtcacgaaggctacagccaacgacagctcgaatcgagtcttcactgctcccgacacacaatccgtgaggtgctgaccgtggcaaaagcgaatggaatcaagtatccacttgatgactcgttcagcaacgaacaactcgaagccatcctcttcccgaacaggtatgcatcagacaacgcctatcttacccccgatttcgcatacatccacaaggaattagccaagcctaaggtgacattgatgcttctctgggacgagtatcgccagaaagccgagactctcggcaagcgcccctacatgccaacacagttcggagacaagtaccgtacctgggcacgcgtaacgaaggcgacaatgcgtatccaccacaagcccggagacgccatggaggtcgactgggcaggtcagacattaccgatctacgactcggtgacaggtgaatcctatccggtctatctctttatagccgtcctgtcatgcagcggatacacatacgccgaagccacctccgacatgaagctcgaaaactggcttaactgccatatccatgcatacgaatacttcggcggagtaactcgtctccttatcccggacaacctcaagaccggagtcattaagaacacccgctatgaaacagtcctcaatcgaagctaccaggaactcgccgagtactatgacactgctatagttcccgccagagtcgagcatccaagggacaaaagccacgccgaaggcactgtgagattcgcgtcaacatggattctcgcggcactgcgtaatgagcattttttcactcttaccgaagcaaaggaagctgtcagcttaaagctcgaagagcttaatacccgtgaattcaagcggcgcgaaggctgccggaaaagtgcctatctcgaagaagaaaaggcatatatgaagccattacccaatcagcgttatgagcttgccacatggaatccgagcctgactgtaggttcggattatcttgtttctgacggaaagaacaagtactcagttccattcgatctgatcggcgagaaggtggatatgaggcttacaagcaacactgtcgagatcttcttccacggcagtcgtgtagcatctcatgtccggaaacaagcagctcagcgtgaaccgatcgtcaatccggatcacatgacgccggaacatcggaagtacctgaattacaataccgatgatttcatgcagtgggctgagtcagttggcgagaagaccgccaaagttgtcagccacttcctgaccttcggaaaagagcctgaacagggattcaaggcttgcgcaagccttacaaagttaggtgagaaatacggatcaaagaaactcgaatcagcttgcgatgaggtattttcgtacacatctactccgtcaatccgcctcatcagcacgatactgaagagcggtacaggggcttcaaagcaatctggttcgggacgatcatcgggcaaaggacaatttgccaaggcgcatgacggaacacaaacacatgacatcaacaattccaacgcctatggaataacccgcggtgccgcctattacagcaatctaaggaaacactgatttaaggttgttttcgcagaaaaaggcccataaatccaagacttttttctgcgaaaacccgaattattcagtgtattcataaaaggacggtgagtcgaaatgattcgtcagtccacagttgatcttctgagagagatgcgtttgggtgggatggcgtccgaacttgagcgtcagatttcagacgctgagtccttccgtgagctttcatttgaggacaggctcgctttgcttgtcgatgccgagtggaacaggagacaaaagaacaaatac

SEQ ID NO: 1564 - DNA, 17667 bp, Unknown
  16S sequences of unknown bacteria
ccgttcatcattcccgttccaacaacttacctatgagacccctccattggctttcccccattgagttcattgtccaatatgtttgacaaacctacaagcaaaaaagaagcggttgcccgctcccaatcaaatcgatttatgtgtttgtccgcccagatttccacaggccatacagagcccaggaaagcccaatgcctatcagcgtgggtggtgtcaagccataagtaatcaattccagtgctgccggtctgctttccgctggtaggccaaagattgcaagcccgtagcataacaccagataaacggcaaaaaaggaatagccccaaggggtcagccgcctttggcggcggcccagcgccagcatggagcagcagcccagcagcgtgccgatacaggcaatgacggcggcatggacggcgttgcaaagccagaccggcgtaaagcgcagcacgcttcccagcggctccgccgtcagggcgaataccgccgcgtcgatgaccacgaacaccagactcagggcaaaggcatacagcagatccggacgatgcttcctcttcatggtcattccctcaaatcagcttcatcaatctggcacggctgaaagcacaaatggcttttatatccttaatttcaccgctggcgattttttcctctagctcatccatatgcaaccagcttacctgaatgaattcgtcatcatccagatcctgactgcttttttcgatttcccgtgccaaaaacagatgcagcacttcgtcgataatgccgggcgatgggtaaatgtatccaagggagatcattttttttgcggtaaagcccgtttcctcccggagttcccgatgagcggcgtgttccctcgtttcgtttggcagcttatccagtttgcctgcaggaatttccaacgtaacctgagaaatgggatgtctgtattgccgaaccatagcacaacgattttgatcgtccagtgccagcacagctacgccgccggggtgatgcaggtgcattctgctgatttctgagccgttgggcagctgaagttcatccagccaaagctgatagggatttccctgatagaccagctgtctgccaatcattttttcaaccagattttgatcttccatcgccaagtggctcattgttcttcatcccttcatgaactttatgagcggcggggctttcaccccgccgcaagcattgttttttccgtcagggctgcacggaaatccagtagtcatatacgtcgtagtagttctcgtagtagtagtccaaatccaaggggaaggtggggatagaatcaaaagccggctggtcaatgtccagagtgggagcatcggggaagacgggataggaacccgcggttaggaagggggccaaaccttcaccagtatgatcggtttcgccgcacaggaaacggatgaacagcttggcggcgttgggatgctggcagttatcagcaatctgagcgatcatgaagctgatggctgtggtgggagtttcatcctggaatgcggagggatccacgcccagataatagccctgttggtcgcgttcacgcaactttgaagacactccatagccaagaggcggatcctgcatatcagcggcgccgccaacgttcttgacgatgttggtgttggagctttcgatgataacgccatttttggcaacacggttaatccatgcgtgggctgcagtgggctcgttagcagccagcacaatgggttcgccaaacacacgctcgtaatcggcagccatctgatcggcatactggatcatagcagtgaacaacacgatcaggtcgggttcaccggtgggatccaggaaaatgaatttgcccttccattcgtctttggtcagatcccaccaggagctgatgggcatcttatcgtaagcctgagtgttgtagttccaccagtccagttcgatcacgaagggggttacagacagataactgggatccacatcaccaaagatatcttcgggatgatagttgtgcagcaaaccttccttgatataatccatgtatacgctgccattctgttctttcagctgcagcacgtctgccgtatacacgcctgcctcatactcgcggcggaacttttccagcatttcgttgatgcccagatcgtagaagttcacggtgataccgggataggcttccataaaggatttgcccaccgtttcgtcacgaccggtgcagccgtacaggttcagcacaccgccctcggccaaagcggcctggtacagttcttccaccgtttccgttttgttcaggccgttgtcctcggcccattttgcatccgccagagcggcggtgcaggccagcagcatgcaggctgccagcagcatggcaatccattttttcattttacgttcctccctatttattttctctaaggctttcgcctttagattcgctttttaatccggcacagccattttgatcagacggcctgtttccttggcaaatacattcagcttgtcgggggcaatttttacgtgtaccacctgatccaccgcatagttgcggatccccatttctttagccaatactacggaatcatcccccatcttcaggtgaatggtagtctccgaacctgccggttgagtggcatataccgacgcggcgatggcaccgtctccattctgtgagcagataccgatcttttccgggcggatgcccaggaccacgtcgaagctgctttgagcgggcagttcatccgtcaagcaatcagcggtgaagctcatgcgcccaagagatgaagtgaccaccaggccgccatcctcgccgcgtttggcctgtccctccacaaagttgatgcgggggttgccgataaaatccgcaacgcgcagggaaatgggattttggtaaagctccatgggcgcggccacctgttccaactcgccctcaaagaaaatggcgatacgtgtggacatggtgagcgcttccacttggtcgtgggtgacatatacgatagtggtacccatttcgtggtgcaggcgcttgatttcggagcgcatatcgatgcgcagcttggcatccaagttggacaggggttcgtccagcaaaagaaccttgggttgagatacgatggctcgggcgatagccacgcgctgctgctggccgccggacagctcggaggggtaacggtcggcatactgctcaatccgcattctttccagggcatccatcacgcgacgtttggtttcttccttgggcaccttctgcacgttcagcacaaaggccacgttctggaaaaccgtcatgtgaggccaaagagcataagactggaacaccagattcatgccgcgctttccgggatcctcaaagtaaagttccttggcgtttactaccagatgaccgtccatttcaatggttccgttctggggcttttccaaaccggcaatcacgcgtaaggtagtggtcttgccacaaccactcggacccagcagggtcatgaattctccgtcattcaccgtcaggttcaaatttttcaaaacatggttggaaccgtaaaatttatcaatattcttcaaaacgatctggctcatacgttgctctccttttctacagctcagaagccctggctgatgtccgcgttaaagaacttattggcaatccagtagatcaggaataccaccaagaacatcagaatggccactacgttggaatactgctccataccgcccgacatataggaataggccatatatggcatggtttgagtcgtgggtgagatcagaatgaccagcaaatccaattccttcataatggccatgaagatcagcatgaagccgctcataaatccattcttggacaggggaaacacaattttgcggaaacgagtcaaaaaatgtgctccggaaatgtgagcagcttcctcgagttccacgctgatctgcagcatgttggcagtacctgcgcggctggagaagggcagattttttaccaccgtcaccagcaccagcaacgcaaaggtaccatacagggaaggcagcagcgtcagcgtatggccgaaaagcgtaacggtcttggctgtggagaacatggacagatacatggcgccaaaggcaatggaaggaatcagatagggaatgaacaccagctgctccaccagcttaccggatttgagatggcggccgcgggagtttacataaccgatcaactgaccgaaaatagtggcgatgaaagaagcaatgaccaccagcttgagcgaattcttcagtacctgatagaactgcggattcaccagtacgcctggctcactattaaaaatttctttcacgccctggccaatccaatagtgcagggtcaaattgctcaggctgaaatcgcccaacttgagcatcagactttgcagaatcaaaatgccgatgggcagcaccactgcgaaacccaggaaacacgccagcaggacagtgatgggtaccttgcccttttttagcgacagcacgttggagcgcccgccctttccgccgatggtggcataggacttgcgggtgcccaaggcccgctggttcaggaagatcacgatcgcggcgatggaaatcagaatcaggctgatggtataggctacggccgtctgctgttgcttaatgctgctgtagagcatggtggaaatcgtgtaatagcttaccttcatgcccaaaaaggccggtacgccaaacgtacccatggatttggaaaaaatcaggataaacgaagaaagaatggaaggaagtaccaatgggaaggtaatcttgctcagcatcatgcggcggggtgcaccgataatctcacccatctcctccagctcggagttgatagaccgaagcgctgcggacatgagcaggtaggcataggcgtaataatgaataatcagcacacagatgatagccacaggaccataagccagccattcaggcactgtaatgcccagataactcaagaagccggcggagcctccaatgcgcggcgttttgaatacgctgatccaggccatggatttacaccaggagggaatcatgtagggaatgatcactgccagggagaaaaactttttgcccggcagatcgctgcgcaccatcagccacgcaatgagaccgcctaccagaatgctccctacggaaacacaggatgcaatcagcaaagagttcagcagaggacggtaaagcatgttggccgatacggaactgttcagaatgcgctgccaataatacaatgtccagtcaccgggtgtacccttcacgcgtcgcgcttcagagggagccagttggaaggtggtcagcaccatttgcaaaagcggccacactaccagaacgctcagtgccacaatggacacaatcaccaacagattgtaaggattcgtaaaggcgtttttcagccagttcaggcatcttttcctccgggagaaagaagccgtttccaccggggcctgcgtcttcgtttgcatatgccacactccttattccgtatcatagcatagccgccgcgccgtctccatgccgttatgttgtcatcgtatggaaaaatgttgcttttttggattgatatcccgttttttaaatgtcgaatacggctttttatttttctttttatacattattttgctaaaatccatcagattgacagtgcactgtcaatcaaatcgcaacttttttccatactcaaagcaacattttcgaatgcattcgacgccggtttctgctataatggcagacaggaaaggagcgctcgcaatggcttacgaagggtacaagtattcctttaagaatcagttccgcaccatggcctccctgacggtctaccggaccggccgccagcagtgtacggccaactatacgcgcgggctggaggtacgcgatttttacctgatccactacgtcatcaagggcgcgggcacctatattctcaacggcgtttcctaccccgtgcgcgaggggcaggcgtttctgatctaccccaatatgcccatcaactacagggcggacgcggacgacccgtgggaattctgctgggtgggcttcaacggcaccgacgcgcgcattatgatgaacgccaccgcctttacgcctcagcagccggtcatcaccctgcggcgcccggatcagatgctggaactaatgctggacatttatacagcccgcggcaaccttcctcacgaaatcatctccatgacagcgcacctgtatacgctgatttcctttttgatacaggagaatatgggggcgcttccaagacgctcgcgttccagcggcgaccaggtgcagcacgcctgcgattatatcgccgcccactatgcctccggcattaccgtaaaggaagtggcggctcatctgggtatctgccgcagccaactgtaccgtattttcatgcagacggtttccatgtcaccccaaaaatatctgtcggaatttcgcattcgtcaggcctgcaatctgatgaacaaaccgcatctttccatcaaggaggttgcctattcggtcggctttgaagaccctttgtatttttctacagtattcaaagcctccgtaggccagcccccaagccagtatgccgctttgctgaaaagtcaggcggaaagtcgagaacatgaataagtggcctttgtacagcgatagggaaaggcatgtgcccacaaaagctgcacaagaagcctttggaatgctctattcaagaggctggaattgagtgcattcagggaaattgatggaaatcgttaattttatgggcattggttaaattaaaggaaccgctgattaatcacagatttgtcaattgtaatgaaatatctgtgattaatcagcggttccctagttgcaagttgatagcaagttggtgtagcccatgaaaaaagccgcccctgaagaggcggcgatacgaactcagctaaaaaccaattcatcaagtacgatttcttcaacccggtgccggatgctgttcatccgggaaatccaccccaactgatccgatactttcagctgttcattgatcccttcagcttcggccatctgggcgatcatccgtttcatgcgatcccggcagacctggtcagtttctgccaaatgctcatacaacttgccggacagaatcagacgagtgtataggccgggacgatgctcttccaggtaagctttccgcatcctgccgtagtggccgatggattgtctggaaccttcagggagatccagatcggggaaataatagtctccatgaagcgtataatgaatgccgttctcgatgatttcctttttcagatttgtcatgatgatgacctccttcgcttcgctttttgatgtgtgtttgcttctgcaccagtcaaacagcgcatctcagcagatcatctccaggtgttggtttccaccccaacctccaccccaatcagggttttatcagagtgcatgatatttactgtttttgtgttaattggctttagaattaaaccggattatacagaaatgcacactatttacagccgtctccgacttcaagtcctgtttcccgcaccaaataaccccgatcgcaaaaagcagtcggggttatttttatttcaaaatattccgaaaacggagggctccagatgaacttatcgtccatccaccatatcgccgttatcgtgtccgactatgaggccgccaagcgcttttatgttcagcagctgggctttgaggtcatccgggaaaattatcgcccggcacggcgggactggaagctggacctgcgggtgaacgagcacaccgagctggaaattttcgcagaggaaaatccacccaagcgtcccagctgcccggaggcctgcggccttcgccaccttgccttccacgtggaaaacattgaggccgaagtaaaagcgctggcggagatgggcatccagtgcgagcctatccgaaccgacgattataccggaaagaaaatgacgttcttctttgacccggatggactgccattggagctgcatgaataagaacggccgtgcgcttcggcagcggacgtgatcgactgtttggacgtaaaacgatcgttcctgccagtctttccacgtggctttgtatttttattctgaacttcgggaatgtgctgcgcaagtgggatagttcattcagtagctttaaccatgcctaatttttgacttggttgatggctgcaaatggtctttgataactccttggcaacggataaacggttttattttattatcaatttgtcaccgaacatcgtcagaaaagcgccaaataaaatacagcggaataagggcaaagtaaaaggccagcatggtttttaatccatgctggccttttcagcaagccatgaggcctgtcgccgaatggcggcctttgctacacaaaaaacagaaagttacatcagaccggcgagctatggcacctgtcgtgccatggcggtaaaactccggccaactccattttcacgagccctctgcgcgcatagcgcgcagtccggggtgcaggggcactgcccctgcttagtcctcgtcgtcttcttcggggagctcggcgttgtgccagacgttctgcacgtcgtcgttgtcttccagcatgtccagcagcttctgtaccttggtgagggtctcttcgtcaggcagagcaacggtgttctggggcaccatctgcacttcggcgctcaggaaggtcatgccgccgttttccagctgctcgcgcacagcggagaactcgttggggtcggtgtaaatttcgaaggcgtcatccagcgtcttcatgtcttccgcaccggcgtccagaacggtcatcatcatttcgtcctcgtcggtgtcggcggtgcgctccactaccagcacgcccttcttgtcgaacatgaagcccacgctgccggtcacgcccagcgtgccgtcgtacttggcgaagcagtgacgcacgtcgctggcggtacggttgcggttgtcggtgatggtctccacgatcacagccacgccgccgggagcatagccttcgtaggtgatggtttcataatccacattgcccagctcgccggaagccttctggatggaacgcttgatgttgtcgttgggcatgttgttgctcttggccttggcgataacgtcgcgcagcttggagttgctttcgggattgctgccgccttcgcgcacggcgatagcgatttcacggccgatcttggtgaagatcttgccgcgggccgcgtcggtcttgcccttcttcactgcgatattatgccatttgctgtgtccggacatgggtatcagcctttctttgttaaggtaattgcgccgccgggcggcgaatgtatttatgaacagtttattatagcacaggatataggatcggtcaaatatgggttttgagggaaagccggcaaatagcagctcttttgggaataataagaaagttccgtcttcctcctaatgccaaggaagacggaactgtggacaaaacaatgaagtccctttgaaacaggaaatcataaaactcggggcggaccgtattcttcgctctctctgtatgcgccgtccttgtacgatccgcacaccccgtcgcccatccgctttctataaaccacccgctccatttcgagcgaccaaacccgcgagccgtggcacctgtcgtgccacgacggtaaaaccgattcaagccgcatccatcctacgcccctgcgagcatagcgagcagttcgggggtcaaggggcaccgccccttgcgcgagccgtggcacctgtcgtgccacggcggtaaaatccacccaagccgcatccccctatacccctgcgagcatagcgaacagtccggggtgcaggggcactacccctgctgccgggtcatgaggaggagaacttgggcggtcatgtcgtcccggggcgtgccgccggaggccagaatggcgttgcggatgagcgcgtccgccatgcgttggggctgaatgtagacgctttcctccagcattttgcgcatctgcgcttcgtccgggaaaacgtccgagatgccgtcggagagcatcaccagaatgtccccgctgtgcagacggcactctaccgaggtggagcgcgcttcttccatgaccccaaggggcagtgaggacgcttccaattttttgacgtgatcgccgcggatcagccagctggcgcaggcccccagcttttccagcgcaacgtcgcccgtccagagatctacatccgctaagtccacggtggaaaatccctccggctgctccttctgggacagcatgatgccgttcaccgccgtgatggcctgccgccgggtgtagcccgcttccatcaaaagcagaagcagttcgagggtcttttcgcttaagtcatgggcttccttgccgtgccccatgccgtcgcagagcatgagcagcagccgcccgccgtcgcagcgccgggccgcgctggcgtcgccacaaatgccgtccccttcgccggagtcccgctgcccggcgcagaccgacgccgtgccgatggaggcgctgtacagcggcagttcttccagctcgatgtgtcccttttccgcccgggagatggaaaggggcagctgctcttcctgatccagccgacgaagaagggcctccagcggcttctgaatgggaaacatggcttccgcctgcagcgccgcctgcaggtgcccgtccacccggcgagcgtagagaagctgggcgggcacgtgcagctcgtccatggcctgccggatgacgtgcgccgcctgtaagtcgttcagactctcccccgctgcgactgtgttcagttcgctgagcgaacccagcatggctgccaaatgggtcagggtcagctcccgctcgtaacgggcgcgcttctgccggttcagccgctgctggtgcagggtcagcgcctcctgcgccgcctccgggatggattccgcccgtaaacagccctgttgacttaaggcgggcagcgcgtcctcctcgatgggttcgccctgacggcttcgttccatcatggaactcatcagcttttccgtgcgggcacgggcacgtccccagcaaagctcccggttggaacactgggcgcagagcagttcgcccagctccagcccttccgacggaaccgtctccgctacctgcggcagcgccttggcgacgctgcggatggattcctgcatccgcccgatggtctcccgaagaaaggctccgtccatgccgccggactgacggcccaggggacagagcagctcccggacttcgtccagacgggattttggcaatagcacgtagcaaagcccgcccagcgccaccgccagccagcccagggtcggctgggtcagcggggttacgaaaaacgaaagcagattgcccgcaaacgccgccgccatgcccagcggtcgtttctttttcagaaagggaacgccgcacagaagtccgcagagagacagactgaaagcaatgcggcagtcgtgaccgccgaaagccagcgccaatccgcagaacagcccaccagccgccccggcggcgcagcctgcctgcccggcagccagcagcgtgcccagcaccgccccggcctgtcccagcgaaacgccgaaaagctgaaaatagcccagcccggagatcagcagaagccccagaaagattcgcaccgccttgtcccgaaaacggggcggcgcaaagcccgttcgatccagcccatcccggaaccatgcggaaatcgccatgcacaccggcaccgccgccagcgataaaagcatggtcagcggttccccggtaaagaggctctggatcgcccgaggcatcatggccgcgccgcccagcgctgccgtttcaatgccgggccggggacgggagcgccgcagcaacaaccatagaaagaacagtcccgcatattgccaagggtcgctttccacgccccaaagcagccgcagagccagcgacagcgtcatgcccagcagggaaaacacttctggcggacggttcagccccagaagcagcgccgccgcaaagggcgaaggaatgccgaaccagcgcacgaagggcagcaggaaaaaacaggcgcaaagccccagctgccgggccgaacaggccagcgtggcatatgcccattgaaaaaaagaacgagccgaaaatctcgctttgacggaagcgggatttcttcttccagcttcggtctgcatttcgctttgcatggaaaaagcacctcctgtgcgctttgatgacgaatgatgctgaaatgagtatagacagggccggaaatgcggcctgtcgattcccggcgcgaaaaatggcagccgtgcgacggccttcgacaggttttggacgcatagaacccggcacggcttcacagcataagacggaaaagaagggagcgtgcgggtatggacggaaagaaaaagctggcgggatggctggcgctgacggtcattgcgctggtagcggcggtggcgctggccactaccaacctcatgacggaaaagcccattgcggaacaaaatctgggcgaaaatcagcaggcgctgaaggccatgtttcccgaggcggacgagtttgcggagctgagccccggcgagagcagcggcgtggacttcgtatacgaggtgaagcagggcagccagaccattggctacgcggtcaaggagaccgtacaggggtacggcggctccatcgaggtactgaccggcatggagaacggcgggacgctgcgggggatcagcgtgggcggccccgatttcaaggaaacggaagggcttggggcccgggcgaaggagccggagtttaccgatcagttcgccgggaaaacgcccccgctaaagctgggcgaaaatatcgatggcatttccggggcgaccgtgaccagccgggccgtggtggacggtgtgaatcagggcgtggggaaggtgcagtctctgaccggcagcgaaatgggcggcgcggcggaaacggaacagcctgtccgggaagccaacgccagcgtcatcggctacggcgggcccgtgctggtgcgggtacggctgaacgccgacggagccatcgaatcgctgaacgtgggcgaggcccggtttgccgagacggacggcgtaggcggcaaggtgaaagacgagagcttcatccgccagtttgtgggcaaaacgccgcccttggagctgggcaaggatatcgacggtatttccggcgcgacggtttcttcacaggccgtggtggacgcggtcaatcaggcggcggaatttttgggaaaataacccggtcttcgacaaacaaagcgaaattttgaggcaggaaagcgcagccgcggggcggaacctccttttgaatgatctttcggtcgaaaaaacaaaagggggaaaccgtcttgcggctgctgatcgccattttggaggaaaagaaagcgctggaggtacggcttcggctgtacgggatggacgagcactgggacgtgcgcgtagcggagaacgggcttcaggccgcggccctgctggaaatggaacgctgggatgtgctgctgctggacagccgcctgcgggctgacggaacgtctttgtgggaaaagctgtgcgctgcgccgccgttgtgcccgccgagggtgctggccctctggcaggacggtccgcgcccggcggcggatggcgccgtgcctgcggactgcggcggcgcaaggctggctgcgctgctttccgtgctcgccaaaaagccgctgccctgtctggtagcggctcaccgggcccggacgaagcgggcggcggagcgttttctggacgcgctgggaatgcgccgggaatggaaggggcggcgctatgcggcgtggtgcctgtgccgccgggttcccgtccccggactggatcagcagcccgtcaaccggctgtacgcggagtgcgcccgcgccttcggcgtcagcgccggggcggtggagcgctgcctccgggtggccgtggagggcgtgttcaccatgggcagcattcccgagatcgagcgtttcttcggcgcgaccatcgacccggacaagggcaagcccaccaaccgggcctttctgatggaggccgcctcccagcttcgcttactccttgacggcggaatgctcggggaagagcagggagatgcaccacagccctgccgcgcctaccagcgtatagacgatgcggctccagaccgccgcctgactgccgaagatccacgccaccagatcgaactgaaatacgccgatcagcgcccagttgatggccccgataatgaccagcaccaatgcgatcgtgtttaccataaggttccctccttcttgcaagcccgggggctttttcaggagtttgccccggaaggggaggaattatgctcctcgggcagaaaacaggcctgagcgtctgtgccctgaaagagaatgcggtttttccacgggcggcgcaagttcagcaggcagacccggccgcagagcgcgtccgagaccagcgccatccctccctgacagcagagccccatgcatagggcccactccggcagattccattccagctcgccgccgggaagggacagcttcatcagcccgtccggggtgctgatcagggcgctgcccccgtccgggcagacgcacagcgctccgggctgccccggcagacgctggatctcccgggtgcggggccgtccgggccggcccagacacacggccgtctgcaaattttctccctccacggcgcacagaagcaccacgccctcccgccaaaaatccgccccgaagcagggatttttcggataaaagacatggcggagggtcaggccgggcgcgttcagcaggcaggcttcgttcaccgcgcccccggcacacagaagcaaccgcccggaagggtgcagcttcatggaacggggaaagacccccgccggggcggcatagcaaagttcgcccgtttccagcgagaccgtctgcaccgcgtctgcttcggtgctgagcagatacaggtattttccgcaaggcgagggacacgccgccgccagcgcgggcggcgcgggaaagacccgttccgcctgcagcgtgcgccggctgaggcaccagcagtcccggttttttcggcagcagaggaacagccgctcccggctggccgccgggcagtaggggcattcggcgggacagggcagcgggcgcagggcttccccatccttccagagaaacgcaccgcgctcggagtccgtgatcagaattttcatgacaacgctcccttgcgcctcgcggcgatagaatcatttcatcctatgggaatccgggcagggcgtgcgaattttggcaggaaaaacggaaaagacgtcgaatagcgttaagtggcgtatttatggatatgtcacagacgtgaggaaagcggcggagtacgccgcaggaaaggaaggacgttacttgcgttatcagactcgcggaacctgctctacggcgattgatttagagatcgaaaacgacgttatcacccactgccagttcaccaacggctgccggggcaacacccagggcctggccaaaatggtggagggccagaacgccaaggatgtgatgaaccgtctgcggggcattcagtgccggggcaatacctcctgcccggatcagctgagccgcgccatcgagcagtactatcagcaacacgcggaataacaggctcatgacctgaacgcagaaggagcagaaattggaaaccacagaaccaatgaaattttccgactcgacggagttgagcccggagatcctcaaagccgtcgccaagatgggctttcaggaaatgacgccggtgcagcagcagaccctccccctgatgatggagggccgggacgtgatcgccatcgcccccacgggcacgggcaaaacttgcgcgttcggcattcccatgctggaatacgtgaacctgaacgaccgccgggtgcaggagctggttttggcccccacccgggagctgagcctgcagatcaccgacgagctgcgggcgctggcccagttcattcccggcgtgcgcatcgcctgcctgtacggcggtcagcctatcgtcaagcagctcaagcagctgcagcagaatccccagatcgtggtggctactcccggccgcctgctggatcatatgaaccggggcaacatccgtctggacgcggttcacaccatggtgctggacgaggccgacgaaatgctcaacatgggctttgtgaaggacgtgacccggatcatcgaagccacgcccatcgagcgggaactggtgctgttctccgccaccaccaatcaggacgtgttgaccatcgcgtggaagtatcagaacgacccggtggaggtgcgcatcgaggccaccaaggaaaaccggcctcagatcacccagtacgtcattaacaccgagcgggagcagaagtatgaaaacctgctctatcttctggacagcgacgtttaccagaagatcatggttttcatcaacaccaaggacatgacccagcgcctgtgcaagcggctgaaggacgcgggttatccggcggagtgcctgcacggcgatatgcgccagagtgtgcgcaacgaggtgatgcagggcttccgcaagggcaagttccagattctgcttgccaccgacgtggcggcccgcggcatcgacgtggacgatgtggaggccgtcatcaattacgacctgcccaacgaaaacgagtattacctgcaccgcatcggccgcacaggccgcgccaagaggcatggtgtggcgttcaccctgctgacctacaccgaatccgtccgctttgacgagattctcaagtacatcatggccaagcccattccgctgcattttgacgagatgggtatcctgtgcaaggaagacggcgaacctttcttcgaaaacatgtgattttcgtgcaacaggaaggccgaaatcgggaaagctaccttatccaaacattcagcaaaagtacggaggcgaagacttatggggatcattccttcccgcaatctggaggagcagcgccgggagaaggacggcatcgtttattttgaccgcggcgtgatcgagggcaaggacgggcgcaaataccagcgctacgccatccagacccactttgtgcaggtgggcgaaagccagaaggatctggtggaaaaatacgtgcggcctctgtatcaggagggcgacattctcagcttcggcgccaaggtcatgtgcatgtgcgtcaagtccgtcaagacccgcgatcaggtgaagcccggcttctgggccaacttcctgtggcgctttgcgggcatcaaccacaccggcgtgggaatgcacgagccctacaagctgcagctggtcatcgacatggtgggcctgccccgggtgctgctggcggcggtctgcagcgctgtgaccaagcttttcggcgttcacggcgtgttctacaaggtctgcggcaagggagtgggcggcatcgacggcttctacgagcgctccagctttgatctctaccacgagatggcactcatcaaccccgagcaccccaacgagctttgtgaagaactgagccgcgaaacgggcatcccggtcgttttgatggacgccaacgacctgcagcgggatcagctgggcaagtccagcaccgtgcccctgaccgacgagcagattcaggacgccatggccgacaaccccagcggtcagggcgacgaactgacccccttcatccttatccgtccgcagcagggctaaagccctgcaccccggactgcgcggcggagccgcacaggggcgtagggagacatgcggcttggccggggttttaccgccgtggcacgacaggtg

SEQ ID NO: 1565 - DNA, 3010 bp, Unknown
  16S sequences of unknown bacteria
gcgggcatccccgcggcatgctggcagcgtatgtgctgctgttcgtgcccgttgtcaacctttttctcgcgctgctgggtgaggcagacctgctgtttcagctgcgcgggcgaatgatgcgaggtgtgagaaatggaacgtctggaaaactttaaggtgcagctgatcatcgtgatcgccgcgcaggtcctggctgtcgtcctgctgttcatgttcgatctgcagcagatcgcgttcaccgtggcctgcgtcgtgctcgtcaatgtcatgatcgagttctggatcatgaaccggatggagaaggaaaagaagaatacggacctggacatcacccgggcgctgggccgtgacgccaaggacgctctggtcttcggcggcgtgggcatcatcacctatgatgagcagtactgtgcaacctgggtgagcgagctgctggaagagcgcggcgtcgacctggtggggaagaagctgtcttcctggatcagcggcatcaccgagctgttcaacacagacggccgggaagtggtgatcggccagagcggggacagggtctatgagatcacgcacaaggaggacacacagctgctctatgtgcgcgatatcactgagctgttcaacctgcggcaggaaaaacacaacaacggcatcgtcgtcggcctgctgcagctggataattacaacgaatatcagcagtatgaggatgagacggtcatgtcgcagatcaacacgaggctgcgtcagccgctgttcgaatgggcgcgcgagatgggcatgttcacgcgcagactgcgcagcgaccgtatcctggtcctgctggatgaggaaatttatgaaaagctggaaaaggcgaagttcccgatcctcaatacggtgcgcgccacggcggaggagatggatgtctccatcacgctgagcatggcgtttgcccgggggacgagcaattatgtcgtgcttgacggcatgatcaacgagctgatcgagctggcgcagagccgcggcggcgatcaggtggccgtgcgcgcctatggacacagcgtgcactatttcggcggcaactctgagtcgaagtcagaccgctccaaggtgcgtgtgcgcgtcatgtcgcagaccatccgagaggccatcatcgattcaggccaggtgttcatcgtcggccatcagatgatggattttgactgcatgggcgcggcgctgtgcatgtcgcgcatcgcccagcgctgtgagcgcaggacattcgtcgtgtcggaaggctgctcgaaggacgcgcagctcgaggatgcgctgcggctgtatcgggatccgctttcgctgcgccacgctttcctgagcgaggatgcggcgctggcgcagctgcaggagaacgacctgggcatcatggtggatcatcatgcgccggcgcagagctgcgcgcagcgattgatcgatcaggccaagcgcatcatcgtcatcgatcatcaccgccgcagcgcaggattcgtcaacggaccgctggtcacttacctggagagcggggcgagcagcgcctgtgagctgacgacggagatgctgtcctatcagcctaaccgcgtcgacatcagcgatgaggaagcgacgatcatgtatctgggcatcgtcgtggacaccaaccgcttcaagatgcgcgccggttcgcgcacgttcgaggcggcggccgtgctgaagaagctgggcgcagatccagtgagcgcagagaatatcctgagcgagcgttacgatcagtttgaggaaaagaccgcgatcgccaagtatgcccggctttaccggggaagatatatgatcgcggccgtagaagaggaaatctatcccagccgtccgctgatggcgcaggtcgccgatcagctgctgacgatccgcggcgtggaggcgagcttcgtcatcgcgaagacggcgaaagaaaatgacgcggtggcggtatccagccgcagccgcggcaatgtgaacgtccagaccatcatggagaagatgaagggcggcggccatttcacggcggcggccttgcagcgcgagcatgcgcaggtggcggacatcgaagcagaactgaaacaggttctggatgctgcagaggaggagaagagcaatgaaggtaatactgctgagtgacgtcaagaacgtcggaaagaaagatgaggtcgtagaggtcgcggacggctatgcgcgcaacttcctgctgaagcgcaagctggccgtgccgcagacacagggcagcatgaaggtgctcggcatgcagaaggaagaagagcgcctgcatgagctggagctggaaaaggaagcggaagccgtgaaggagcgcctgaagggcatcgtgctcgaattccagatcaagaccgggaacaacggccgttccttcggcaccgtgtcgaccaagcaggtggcggagaagctgcagcgtgagcacggcatccagatcgaccgccgcaagatccgcgggcatgagtccatcagcacgctgggcgacacagagctgaacgtggatctgtacaagaacaaagtcatcggcactatccgcgtacatgtcagcgcaaagagcgcgaaataaacgggagggatgaaacatggcaagagagctgccgcacagcaccgaggcggaacaggcgattctcggcgccatgctggtctatccttccgtggtgaacatcgcggtggatcaggatctgcaggcggatgagttctacctcgatgtgcatcgccgcatctatggctgcatgatggatctgcgcgagctcgggcagaacatcgatgtcgcgacgctgatcactcggctcaatgatacggaacagctttcgctggccggcggggcggactatgtcatcaagctgagtgacagcgcggtctccagcgccaacggcatctattacatcaatatcatcaaggaacgctgtcacctgcgcaggctgatcgagacggcgcagcagatcgctgaggagggctttgataccggcagcccgctggacgatgtgctcgatcaggcggagcggcagatcctggaggtgac

SEQ ID NO: 1566 - DNA, 11132 bp, Unknown
  16S sequences of unknown bacteria
gattttggccatttgataggaagaagaaaaagacgtaaatccaataagcttttcctactgtaaaaagcaaaaaaacttcagtcgtggccgataatttggcgcaatgattttccaattagatagacaggtgggaaaagacgtaaatccaatacgcttttcctactgtaaaagacaaaaaaaagctttagtcgcggccggtaatttggcgcaatgatctttgctatttgatagacagaggggaaaagacgtaaatccaatacgcttttcctactgtaaaagacaaaaaaagctttagtcgcggacagtaatttggcgcaatgattttggccatttgataggaagaagaaaaagacgtaaatccaataagcttttcctactgtaaaaagcaaaaaaacttcagtcgtggccgataatttggcgcaatgattttccaattagatagacaggtgggaaaagacgtaaatccaatacgcttttcctactgtaaaagacaaaaaaaagctttagtcgcggccggtaatttggcgcaatgattttggcgccgggcaagaagcaaaaaaagagccaagctcgaagcgtacaatgacgtacgtaagggtttggctctttttttagcgactttctttttatctacttaaaaaacactgcttgcttcaaataatttggcgcaatgattttgcaattagatagacagaagaaaaagaagtaaatccaatacgcttttcttactgtaaaagacaaaaaaagcttcagtcgcggacagtaatttggcgcaatgattttggcgccgggcaagaagcaaaaaaagagccaagctcgaagcgtacaatgacgtacgtaagagtttggctctttttttagcgacgccgcaccgcgccaaaatcattcgccaaattaggcgccacaaccgccgtctttatacccgcagtcgcgacaggagcggcacttcccgtcaaacacatacgcatacgaatggcacttcgggcacgtcaacgcactcgacatcgccttatcctttttcttttgcgtattaaccgccgcattagtcgtcgtcgcaagcggaagctccgtctgcaacggcgtcctctcgaccgccttcacagtcatcgttcgcccgttgttcgtaaacatcgccgcaatataatcctgatccaactgcctcagtctccgcccattttcagacgggaacatccaatccaacagctgcatcagcaagtcaactatacttttgcaagtgtgtatttccggtttgtcgccttcctcgttgtagtcgcctattctgacccagcctgcggggtcgaacgacatgtatcggaacgccccaataaagtcgtcaaacggcaccccgtactgcaacgcaatcgagaatgctttgcagaaagcgtcgaacattccgtttatgaacgatccgccctgccccaatctgccgaaaatttccgcgcaataaccagtctcggatatgccgactgtcatgtatccgttgatgtcgtcgccaatcgtaaacttaatggtttggccccaacggcggtacggcaggcgcttgcggagcggattagcgtgctcgtgctgccttatcttcgcggccgcatcgactactttgttccatgcctcctgaatttctccggaatcgaggcgagtgctgtaaactgcgttagccttcgagccgtcgcggtatattgcgatgcactttacacccaattcgtggctttccacaaggctttttacgatgtcttcttcagtggcggaagccggcatattgatagttttgctcgacgcccctgaaatgaacggctggagggcgcccagcatttttacgtgcccgtctactgctatgcagcgcgttccgccaaacgccgtattggcgcagtcgaaaactttgagagtgcgctcgtcaacccacggaatgccctccatgtgtccgcagccaaagtatatggaagaatcggagaacggcagtgtgcccttttcagactgggtgcacatgcgcttaaagaattcttgatattccgactcgtcgcgcaacggggagagtcgcgcgacaatctcgcggcaaatttcgccgccgtcgccaatagcttttaggacgtcgagatggttagagacgcgctttgcgtgcaagaagttttccgcgccggcaagccctgaaacctctgcgataatagtaagaatctgctcaaaggaataaccgagtttggcgagcccctgcggcacaaggccgtttatgagcgtcatagttccgcccccgctcaactgcttgtgttttacgagcgagtattctggctctgcggacgttgtgccttcctcgtatatgcccatcggggcgcttatagtgccggtgggggctatgcaagtgacaaagctgttgcggaaagagttttcttttttgagggaatcccaaagttttccggcctcctcgacaacttcgttccagttgtcgccgagcgacactttgtcgccaatgctctttttaaagccctcaatggcgtcgtgcgcattaaacgattcttcaaaaggcaagtcttcgcttttgcgcgcgtggacttttataccaaggaattttttgagctcatcgttcattagcgcgtgcatattaagcactctgcgcatgctgcctttaattagcggatattttgcaaaagctccaagtgccgccccgagttttgcgcttgtgcaataacataccgaagtcagcaaagaaaccaaagaagcagcaatagccctgccctcggaagaatcgtaaggaatgcccagagacatcaaaagacctccgatattggcaaatcctatgccggttgtgcggtagtttacggtgtttatggcgatttccggtatcgggaagccgccctttgtgacgttgatgtcggccgcaaccattgcgatttcgaccgccttcataaacttttctatttcaaactttgagttcttgtagaaacggataacgttgaaagagctcaaattgcacgagctaaacaccgggccgagatactcggagcacgggttgctagtttctatcatgcattcgtcgcggaaggtgctccagaagttgataatgtcgttattatgcaagcccggttccgcattattccatatcgcgtttgccatttccgcaagcatttcgttggggaaatattcgcgcacgatgtgcgacggatccttaacccagcgcgtcgcgtactttgtcccgtttttgtaagcgagccaaaagccgctcttcatagaaatagtgtggttcgcattttggttggacaaagtctgaccgtaaatgaggtcgtccatagccgggctgaaagacttatccacgacaaacggcgtgctgagaagcattttggcggcgatttgctcttcgggagtgccgtcggcgagcttttgctgggcaagcttgcggagcccgtaaactacgttgtgctcctgcaaaataactttcgcgacttcctcctgcctgaacttagttttcacgaactcgaagacgtccgggtggtcggagtacataacgaccatgcgcgccgccctgcgtgtcttgccgccggacttaattgcgcctgccattttatcccagccgcggtcgaaagaaagcggaccggaagcggaaccctttcccgcaataggctcgccttcgcttcgtatagaagaaatatttatgccgacgcccgaaccgctcgagaatatgctgccctccgtatattggtggcgcaaaatcgcgtccatcgagtcctctacgccaagaataaagcatgcgctcgcctgcggatttgcgtatccgttaaccgattttctggcctctacgccgtttttagtctccaacccgtaataggcgtcgttgcccttgtttccgagcagatcgcggagatccgggcgcccccatctccactgttcccaatgccctatgttaaaccatacggggctgtttggcgcccacatctggtggaggagcatgtacttcatctcctgattgtacacgagcgcagacttctcgttggcgaaatacccgagctggtagccccaaacagtgtacgtgtttgcgatgcggtcgaaaatctgcttaacggagtcttcgtattcgatagtgcccggatctttgccgaaaatatatttgcttaccgttatttttagagcgttgtcgccccagtgttccggcacttcgacgttctgacgtgaaaagaccgtttcacccgacgcaaacatctttatatctttgcgaacccattttgcggtatcgtaagcaaaaactccctcttttgtaaaaatacgctcgaatttaaagccgcccgcgcgaccctttttccccaaatccaaaggctggttcccatcgacaattattttggccatgatattctgaatttaatagtttttaaatgagtaaattgagcaccgtatccccgaaagcgttaaagctcccgataagcgatgaaaaacggcgaacggtaaaaccgaattccgccgataatcttagttcaaagaaaaactccaaattccaggcattgtcaaacgaaaatatcccccgccgccacggcattacccctcaatcgagtcacagaaaaggtttgcgggccaaaaaaaattgacgaattgccaaatatgatgtaaacatgcggtatgaagtctttaagggcatatttttatattttattattaataagttatgcaatgcagtcatttgccgaaaatgcggccatagccggcaattctcccgccggaggtgctgaaataaagagccaatggcaaaataaaagaatcgccttcttgggggactctataacagacaaatgccacgttggaacaacaaagaactactggcaatatctggaagaaatcctcgggataaagccggctgtttacggcataaacggcgacaatttttgcggaatattaaaacaagccaaaaggttgaaatccgacggagccgaaaaaattgacgcaatcatgatattcgccgggacaaacgactacaacggcagcgttccaatcgggcaatggtacaaatacgaagaagccgaagctccaattgcaaacggcaaaacgcaaatccgcaagcgcagaatccacataatggattcatctacgttcaaaggccggataaatgcggcaatggcgtacatcaaagaaaatttccccgacaaacagattatattaattacgccaatacaccgaggattcgcaaagttcggcgaaggaaatgttcagccggacgaatcatttcccaataggataggagagtatatcgattcgtacgtggatgcagtaaaagaagccggaaatgtctgggcagttccggtgatagacttgaattctcttagcgggcttttccccaacacgccgtcccatgcacaatacttccataaaaaagatacggacttgctccaccccaacgccaaaggtcacgaaaaaatggcgcgtgcaatcgcctacgccctgcttgcaatatctccaagataaaatattcgcattggaaaattcttaggtcggcacagatacgcccgcaaagctatgcagaaatttctgagccttgcgattctaagcaagctgtttttgaaggcgtttcctgtgaactgccctaccccattcggcgcgcggcaagttctgttttgcaaatatagacgtcccgcacaaatgaaaaacaaattcataaaagatgaaaagttttagtgacaattcgctaaaatattttaggagtctgataaaaatccaatacgaatagcccgctgaatttcaacaccgcaaggaatatttaataggttataaaatataggaaaggaagttctatgaaaaaaatagcactcgcactgttagcgacaatgtcaatagcctacgccgatgaaacaacactgcccaagcctgatttaggcaggggcgacacaataatgcaggcgttcactaaacggcattcgacaaaatctttttcgcgccgcaagccgaccatgcaagacctctcagatctcctctatgcagccaacggaattaacaggcccgagagcggcaagcggaccgcaccgtccgcactcaataggcaagacataaaaatatatgtatgcctacccgagggagcctacctatacaatgctaaacgccactcgctggaacttgtgaacaaggcggatttaagacagtcggaagcgccggtgtgccttgtgctcgtgtcggattataacgataggtggagcggattggacgccgggatagtgtcgcaaaacatatcaatattctgcgccgggacgggacttggcacatatccgcacaccacaatggacgtttccgaattaaaggcgggattaaaattgaaaggacaacaaaccccgatgatatgcaactctgttgggtttgctaaataatcctgagatgcattgagaattatttataatagtaggagctaaagaaatttgagtgggcataagaagctgggcaagtatgctttcttctatgcccccactatttgaggccccttactatctttgacgcatagtgaaaattttatgtaagagataaaaaatcattgcaaaagcagcaaggaatagtaaggtagaaaagataataaagaaacgcgggcgtagctcaattggcagagcgcgagcttcccaagcttgaggttatgggttcgacccccaccgcccgctgtttaaaatttatttcttatttcgtcttatttaataacttgcgcaaaattagggcgcagttaacactcttcaaaatttgcaacaaaattgtcatttttggtgtaaactggtaccaggcgccagtttttggtaccgaaaaagcttgcgctcatcgcttgcatttttcttcgcaaaaatctgaagctgtccgaaaaaatttttccgtgaatcctaaactcaatctcaaaaccgaattgagtaaaaatggataagcttgcaactcttaattacagaccgaaccgaaagaagccgtattttgttaggttctataacgaaagcggcaagagaacatcgcgcgcatttgccgcccgaatggacgcaatgcaatttatggctgaaaagtcgggcgacgctaaggcttcgcattttgacatttcaaccgaagaaaaggaacttgttatgcgccttaaacgcgaatgtttcgcccgcggattctccctctgcgatatggcggaaacattcgtgcatctggtccgcaacaagcctgtgagcgactactcgcttggcgaagtccgcgatatgtatttaaacgactgccgcgaccgcgggttgcgctcctcaactctcgcctactacacaggcaagctcgcaaacctctgcgctatgtacggagaaaaaatccccgtatcggcaatcacgcccgatatgcttgaagtgttcatatcttcgggcaaaacacctgaccacaatagacgcatttcaagcgcgttctacaagtttctcgccgaaaagcgtattgttccgcccgacctcttcccgaaggtaatagtgctgcgccgccgtaaaaagcacaaaattccgccgattcttaccgttgacgaaacgcggcggcttttccgagaaatccccgaatcgttcataccggcatttgttctgatggcttttttcggggttcgtcctcaggagatctcaaacgagcacggcaagcaggttcttgaagtttccaacgtggacttagtggcaaaaaccgtccgcattcccgaaacgattgccaagatgggcaatttccgcataatttcagatgcacccgaaaacgcgtgggcgtggcttgaaaagtatctgccgaaatcgggcaaaatatttccgtattcatatgccacctaccgcagaatacgcaatatgcttacgataaagcttccgcacgatgtcctgcgccacagtttcgcctcatatggctaccactatctggggattgaaaagaccgttgaaattctcggacaagagtcgggctacgaagtctacaagacacactacaaggcgatggttagaatgcaggactccgccgattttttctcaattatgccgtcaatacgcgacggattgcccccgcgccgcaagcagaagattggcgatttgaacttcgggctaagcggcgaagttacggacaacctcgcttatcttaaagtccaccccgagctgccccagcagcccgcgtaaaaaagttgccccattgactatactgcgggctcaaaaaaagaggaaggttcattcagccttcctctgcatgctttctttgaagcttcttttcttcggtctttgaataccttcgtcggtggaaacggaattcttgaccgaagcacgattatagcttttttcttccgttgtttttccgtcatggtattctcctttcggattttcgggcggtatgaaacatcgcgccaagaataatgtcaagcggcaaattttttctttcatattcctaaactttaggtatgaacaaaaaacgcactctcacacaggcagacataaatgcaattgttgacgccctcaaaaacggcgattttgcaaaacagctcgtgaccgatttcgcaaggattgtgggcgtaaggattcaggaggaggacattattgactccgatgcggcttgccgtttgctcggcaacatctcccacgcgacactaaaaaaatatgcggaaatctgccccgaaatacgcccagcaggaaaatactcgcgcggatacagtcgcaaacgcctgcttgaattccgcaccctccgacagcagggcgcattcaaaaaaaacaaagtctatcccgtctgctgaatgctcacttgtaataaaaaagaggcgaacaaccgttcgccttttgttttttacctaaagagaagacctgaaagaattgaagcgagaggatatatacgattggctaaatgcatttaaggctgctagcttgcaacgccgtggaaaacccctatctaacacttcattgtacaatgccgtacattatataagcgtatttttaaatttttgctgcaagaaaaattttattttggaaaatcccgtaaaatctatttttatgccggaggtatctaatccagagcctaaaatatatagtatcccagaagtttgcactattctgaatactacagcctatatgtccattgaacggtcgttactactgctatatttcttcacaggtatacgcttgtcagaacttttaagacttgagtggagcgccattaaattggatcagggcggtatttttttagatgaaactgtggtaaaaacaaataaacgtcgctttatagtattgccgcaaaatcttttggatgccctacccccttactgtgctaaatttggtagtgtagaaggtaaaatctttgattttaatatccccacggtaaatgtcctattgcataacctatttgaactttcaaaagctacacgaatacgtaatggtattaggcatacggctgcatcttttcatttagcacgtagtggtaatgcgtttaaaacagcagagcaattgggaaattccgcaagaattctaaagttgcattacactggaaatgtaactaataaacaatgtcagcagttctattctttagacctgacgaaacccataattgaacttagcaaggaggcttaaagcctctttgcatgttctattattaggctatccttacttctggctatattattactgtgttgtgtagtccctaaggcatgtacatattttgactttaagtactctctacaatctgactccctgtacctaacacattttgaggataattttatatatcctattttcctagcttgctttaatcgctctaaggaagtcggagaaatacttaaatatgcagcagcctctttttgggtcaatagtctatcttcattcatatttcaagtataggtaccatatataaaagcttatatgcacgcactatatactgtaggctatacctaacccctggatttatagctatacttttgccattttccaacgttgtattgctgatttaatttcagaagtagctgggtttataaaatcaactatatactccttccaccaatagtttggtagcttagatggaaaagtttcatcctctacgtctaccaacttattgaattctgctacggttattttagtattcttcaggtctattatgatgcctggtgcagagatggattcattatctataaaatccttagcacttactaaaaggctgtaacaggaataatcctcaaagtctttgtaaggtattacaattttcccatcgtttactaaatacccaaaacaagcactccccctatgctctgtgccgtctttaacttcatatacacagaaatcttcggcatatatattgtcatttttgggtattatcttatgtattgcttcctcaggtgtggacgcctccacctctcctaaacatatatcccctatataggataggtttgtactatcggaccagtcgttctcaaaagtatgtgtatacacatgggttgctattacacaatatttaggcatttctcttcttttcctttgattttagtattttcattgcttcttttatatccatcccctgtaattttgtcttcattttacgccccggtttgaattttatagcaatttgcggaggtagtttgaaaatcttgcttttcttccccggaacttttacattacgtgcacctttcactacaaatgtgaatgcgcatacatctctgagtgttacatccctacccctacctacatcttctgcaattttacaaaatagtgtctctattatacagcttaacatatttggagttggcaaacactcctgcgattctttagctaactcatataatacttgtgtgataagctctttcttccttatattcttcatgctttgtagctttttcttgaaaaaatttctgcttcatacgtattcattcagaatttagagaaaaaaaatcctttggatgtataatgatacaggcttgttttatatgatacttaaattacccagttcaaagctgtatatttcttagcattatgcccaactaccctatttgggtataaaaatgaacccgccttaataattaggcgggtgtttatttccgattatattccttagaaaagaccatttatcttttcatttgtattatctacatgcttatacccagaagtcaatacgctaatgatttttcaactatatgtccggaaagttcctatactttatatatgaaaagtaaatatcttactataggagggctaagtgct

SEQ ID NO: 1567 - DNA, 2405 bp, Unknown
  16S sequences of unknown bacteria
gcataaggaggtataactataaaatgataaaagtattatttatatgccacggcaacatctgccgcagcccaatggcagaatatatttttaaagatttagtgaaaaaagagggactggaaagtgagtttgagattgcatccgcggcgacaagtatggaggagatcggcaatccggtgtatccgccggcgcggcgcaagctggcggagtatgggattcgatcggatggacatcatgcacgtcggatagagcggagtgattatgaaaaatatgattatctgattggaatggagcagtttaatattcggaatatgatgcgggttcttggaagtgatccggaacagaaggtatatcgcctgctggattttacggacagaccgggtgatattgatgatccgtggtatacgaatgattttgagacagcgtacagggagattctgcggggatgtgaaggattgctgcggacgctgaaaaagaaatgatttgtgttagctctgagtgagaaaataaaaagaatattgaaacaacaaatgaaaaatcaatcggaggagaaaaagctatgagcatgggtgcaaagcgtgaagattacattacatgggatgaatattttatgagtgtggcgtatcttgctgggatgcggtcaaaggatccgagctcgcaggtgggtgcgtgtattgtgagtgaggataataagattctgtcgatgggctacaacggattccccaaaaactgctcggatgatgagttcccgtgggagagggaaggggactctctgaatacaaaatatttctatgtagtgcacagcgagctgaatgcgattctgaattatcgtggcggaagcctggaaggatcgaagctgtatgtaacattgtttccgtgcaatgaatgtgcaaaggcaatcattcaggcaggaatcaagactgtggtatatgatgacgataaatataaagatacaccgggcgtgattgcgtcgaagcgcatgatggatgcggcaggggtgcgatattatcggtatcagagaacaggaagaaaaattgagtttacggtgtaagtagagatatgtgaattttattgagtaaggcaaagttttttctttcctaaaaaaatttcttccatatatatgtataagcgtgttataaaaaatagtgaatggaaaaggagcgaattccataggggacataacttaactttgcaggtaaattatggaagaaatagagaataaattgaaaaaaagatattgacaccacaacccacctatactataatatatgggtatgaccaagtatgtaaatgttttgccaaaagccccggtgaaacattttaccatattgccagatgaacaggttacggacatttcctgagtattcatgaaggcatgttcgggaggacggaaataagcctctgtttgcccgcagttattgaatcagattaaggaggaagaccaatgaagagttttatggctagcccggcaacgattgaaagaaaatggtatgtagttgacgctacagatatgacactgggccgtttagcatcagaagtggctaaggttttaagaggaaagaacaaaccaacgtttacacctcatattgatacaggcgattatgtgatcgtagttaacgcagagaagattaaagtaactggcaagaagctggatcagaaggtatattatcatcattctgagtacgtaggtggtatgaaagagaccacgctgcgtgagatgcttgcaaagaaaccggagaaggttatcgagctggctgttaagggcatgctcccgaagggaccgctcggaagagaaatgtacacaaagctgtacgtttatgcaggaccggatcacaagcatcaggcacagaagccggaaacgctgacattctaataggaggtaaggaacattggctaaagaaagattttacggaacaggaagaagaaaaaaatcgatcgctagagtatatcttgtaccgggtaccggcaagatcacagtaaataaaagagatatcgatgagtatttcggacttgagactctgaagcttatcgttcgtcagccgcttgcagctactcagacagcagacaagtttgacgttctggtaaacgtacacggtggtggaaccactggccaggctggtgcaatccgtcatggtatctccagagcacttcttcaggcagataacgagtatagaccgacccttaaggcagctggattcctgactcgtgacccgagaatgaaagagcgtaagaaatacggtctcaaagcagctcgtcgcgctccgcagttcagcaagcgataatcgactgctcagactatatcaaaaggtttacaaaaccccggaaaatcaaggttttccggggttttcttatggtgcgcctagcggcgcacgtttcgtttgcgcgccatgggcgcgctctcgcaggtg

SEQ ID NO: 1568 - DNA, 8971 bp, Unknown
  16S sequences of unknown bacteria
ttacctacatatttacacagaacttaagtactgcgacgatcattctcggtattgttgtagcgcttatttttatcgcacatccgaagacagctccgtttttgaaggtcggggcagccgggcttgtgttgctggcgattttacttgttgtgctgatcaatatgtccggagacggcggaagcttccgtattcagcgtattcagacatggctgcatccggaggcacaggccggggataacggttatcagattttgcaggcactgtacgcgattggttccggtggatttttcggtaaggggcttggcaacagcacacagaagctcggggcaatcccggaggcacagaatgatatgattttctcgatcatctgtgaggagcttggtgtattcggtgcggcgattgtcatcttactgtttgtatttatgctgtaccgtcttgctatgattgcacagaatgcgcctgatctgctcggatcgctgattgcatctggcattttcatacatatagcactgcaggtagtgctgaatattgcggttgtcacgaattcgattccgacgaccggcatcaccctcccgtttgtcagctatggaggtacttccatcgtatttttgatggtagagatggggctggcgctgagcgtgtcgagacagatacgcttccgataatgcaagaagaaggagaacaaagaaaagatgagtaaagtaaagacaagatttgcaccgagtccgaccggacggatgcatgtaggaaatttgagaacggcattgtatgcatatttgattgcaaagcatgaaggtggtacttttatgctgcgtattgaggatacagaccaggagcgttacgttgagggcgcggtagagatcatttaccggaccttacagaagaccggcctgatccatgatgagggaccggataaggacggcggctgtggtccgtatgtacagagcgagcgtcagaaggccggcatctatatggaatatgcaaagaagctgatcgaaaaaggagaggcatattactgcttttgcgataaagagcgtctggattccctgcgccaggaggtggcaggaaaagagatcatgatgtacgacaagcactgcctgcatttgtccaaagaagaggttgaggcaaagctggcagcgggagtaccgtttgtcattcgccagaatgtcccgaatgagggaacgactaagtttgttgatgaaatctatggcgagatcgaggtgccgaacgcagagctcgatgatatggtattgatcaagtctgacggatatccgacctacaactttgcaaacgttgtggatgaccatctgatgggtattacccatgtggttcgcggaaacgagtacctttcctctgcaccgaagtataaccgtctgtatgaggcgtttggctgggaggttccggtctatgtacactgtccgctgattacaaatgaggagcatcagaagctgagcaagcgttccggacattcctcctatgaggatctgctggatcagggctttgtctccgaagcaatcgtaaactatgtggcgctgcttggctggtgcccgcaggacaaccgtgagattttttctttacaggagctcgtcgaggcatttgactaccacaatatgagcaaatccccggctgtctttgatattcagaagctgcgttggatgaacggtgaatatctcaaggcaatggatccggaaatattctatgaggcagcgctcccgtatctgaaaaaagcgctcacgaaggagctggatctgcataagattgcagagatggtacgtacccgtattgaggtatacccggagatcactgatatggtaagcttctttgagacacttccggagtatgataccgacctgtttacaaataagaagtccaaaaacaatgccgagacagcggcagcgacgcttcaggcactgcttccgcggattgaggcacaggagaccttcaccaatgatgcactttttgagatgctgaagatctatacggaggaaaatggctgcaaggtcaactttgtgatgtggccgctgcgtgtcgctgtttccggaaagacggtgactccggcaggcgcgacggagatcatggaaatcatcggaaaggatgagaccgttgcccgtattcacacagcactgaagaagctgggcgtggagtagcatgcaggtaagtaatgcacagcatcaggcaattacacacggagcagggccggcaatcgtactggccggacccggctccggaaaaacgctcgtgatcacgcagagagtccgttatcttatcgaagcgtatcacgtacgaccgcaggagattctggtgatcacctttacgaaggccgctgcacaggagatgcagagccgttttcaggcattgtcaaggcaaaggggagtcacattcgggacctttcatgcggttttttttcatattttgaaatatgcctatcattacagcgcggcgaatattctgacggaggagaagaaataccagattttgcagcgcctgctctcagagtcaggacttcattttgaagatgaaaaggaaacgctttcagaaattgcctccgagatcagcgtggtgaaaaatgagcagattccgctggaacactattattctaaaagctgtccggaggaggtgttccggggcttttaccgaaaatatgaggaaatgcatcgaagagaggggcttctggactttgatgatatgatgaccatgacctatgagcttctgacacagcgggcggatatccttgccgcgtggcagcggcattaccgctatatcctggtcgatgaatttcaggacatcaatcttttacagtatgcgatcctgcggctgcttgcagatccggagcgaaatctgtttatcgtcggagatgatgaccagtcaatctatcgtttccggggggcgaagccggagattatgctgaattttccgaaggactatccggatgcgaagcagatcgtgctcgaccggaatttccgttctgttgcttcggtcatccgtgccgcacagcttgtgatccgtgagaatacaaaacgctttgccaaacgcgccgtgcatgtacgtaaagggcaggggcagatcgacatccgggagttttccgggcaggagcatgagtccttgtatctgattaaaaaggtgcaggagagtcttgcgcgcgggacgccgccaaatgagattgcagtgctgtatcgaacgaatcagggtgcacgtccgtatgcggagcggctgatggagtttaatatcccgtttgagatgcgggacgcccttccgaatatttatgagcactggatcgcaaaggatctgtttgcatatttgcaccttgcgagggagcggctggatcgggcggagtttttgcaggttatgaaccggccgaagcgatacattgcgcgtgatgcaattgatgcgaaggttatttcactggaaacgctgcggacatattatgaggataaggactggatgcttgaccggattgaccgtctggagctggatttgcggatgctgaaggatatggcgccgtatgcggcggtcaattacattcgatacggaatgaattatgaggaataccttcaggaatatgcgaaggcgcgtcggatgaaaccggaagagctgacggatattctggatgagattcaggatggctgcagaccgtttaagacggtggaggcgtggtataagcatctgactgcgtataaggaacggctgctggagcagcgcggaaaaaaggagcgggatccggatgcaatcacgctggcgacgctccacagtgcgaaaggactggaatttcaggaggtctttttggtagatgtcaatgaagggacgattccgcatcggaaagcgtcgatggaggcagatcttgaagaagagcgtcgactgttttatgtggggatgacgcgcgcaaaggatcgtctgcacctgttttatgtgcgggagcggtatggaaaacgcgtggagccgtctgtatttctggagccgctgctggaagaaacggatgaatgagaaaagcatccctgaggcagaatttttgccttgtgggatgctttttggggtcacttgccagccggagtatgtcgtatatacacttaatggccgtcaggattactcctcgtcctcctcgtcctcagagacgagctcatcatactccagagaatccagccactcatcaaagccgtcagaagcagcctcgtactcctcatcgtcctcgatgttgtcgagaatcggggtgccgttctgctgcgtataacggtaaagatatacttcgccatcttcattagttccctgctcattcagcgggagaagggcgatatactcccgttcgcctgcctcatagatcgtgaggatagagcactcgatcgtctcatcattgtcaagtgtcagggtaatggttgccttgctgcaatcctcggcagaaccacaggtctcacagctgccgctgcacacatcaaattcgctcattttacatacctctcttatttgtttgtttccgcaggtaacgggcagcgatacacgccatgtcagctttactgcctgcggtactgagattactttatcaaaaataacggaaaatagcaacaacggactggaaaaagtgaaatattattgctatactgaaaaaagatcagaaagaaatggagaaaatgcgtatgaaattcatatcctggaatgtgaatgggctgcgtgcctgtgtacagaaaggctttttagactattttcatgatcggaatgcggatattttctgtattcaggagagcaagctgcaggagggacagatcgagctggagcttccgggctattttcagtactggaattatgcaaagaaaaagggctattccgggacggcggtttttgcaaaacaggagcctttgcgtgttctttatggaattggagaggaggaacacgatcaggaaggccgtgtggttaccctggagtatgaaaatttttattttgtgacggtctatacaccgaattcacagagcgagctggcgagactggactaccggatgcgctgggaagaggcatttcttggctggctgaaaaagctggagcaggaaaagccggtcgtattttgcggtgacctgaatgtggcgcacaaggagatcgacctgaagaatccaaagacgaaccggaaaaatgcaggctttaccgacgaggaacgaaataaatttaccgagatgctgaacagtggttttatcgatacattccggtattttcacccggatcaggaggggatttacagctggtggtcgtaccggtttcacgcgcgggagaaaaatgcgggatggcggattgactatttctgtgtatcagaagcgttaaaggaacgattgcaggatgcgaagattcatacagaggtgacgggttcagatcactgtccggtagagcttgacatcgagctgtgagaatggacagaaaggcggaaaacaagtgagggaaaatgagtttaagatatggttggacgacagtgttcagccgggggctgttgtcatgaaggacggtgttcattttggatattatgccgcggggactggacagccggagctgctgctttatgaaaaggggagcgaagtgattgcagccagtataccgtttccgaagcaggaggcagcgggtggattttatcatatgaaagtgaagctgcggacgtcagcctacgaatacaatttccgcgagaacggtcaggtcgtgactgatccgtatgcgcggaaaattgaaggccgggggacatttgggagcctgctgcccaaatcggcacatggcatccgcggcagttttctgacgaagagttttgactggggagaggatgtgcgtccacagctggcgtatccggatgtggttatgtatcaccttcacgtgcgcggctttacaaagcaaaaaaattcaggagtacgccataaagggacattcgcgggattgcgggaaaagcttccctatctgagggagcttggcatcaaccagattcggctgatgccggtatatgattttgcggagatgacgccgcggctggagttaaagggtgtgccaaagacacagaaggaagctgttgtgcgtgcggccgagcagcttccggaagaagaggcgtggcggatgaattactggggctacggcccgggcttttattttgcaccgaagtcctcctatgcagcgtcgccggatccggatctggagctgaagcagctgatcagggcgatacatgcgcttggtatggaactgattctggaatttccgtttacagaggatacggatatgcttctgattctggaatgtctgcggtactgggtacaggagtaccatgtggatggttttgtactgatgacccgcagcactgtctgtgaggaactggcaaggctgccaatgtttcgggatgtaaagctgatcggagagtggtttccggacggtctggttcagaaaaatgcacagatgtggcatagcaggctggcagagtccaatgatggctttatgaatgattgcaggcggatgttaaggggcgatggtgagcagtccggcgcatttgcggtgcgactgcgcagaaatccgaagggttgtgcagtcatcaactatgtgacaacgcatgacggctttacgttggaggatctcgtgagctatgattataagcacaatcaggcgaacggagagcaggatcgggacggtaccgattacaattacagctggaactgcggtgtggaagggccgacacgcaaaaaggagattttgcggcttcggatgcggcagaagaaaaacgcgctggctatgctgctttttgcgcagggtgttccgatgctgcttgcaggtgatgagtttggcaacacacaggacggtaacaataatccttactgtcatgacagcgagctgacatggctgggctggaaccagtcaaagagtacacagcagctgcatcactttgtgcagtccgctattgcttaccgaaaggtacatccgatgctgcatcaggcgaccgagcttctgtgtgcggaccgcaattcctgcggctatccggatttgtcttaccacagtgaccgtgcctggtactgtgatttttcacgcacgacgcgacagtttggctgtatgtatgcaggaggctatgccggagaatccggtttcatttatatcgcatacaatttatactggacagagcagacgtttgcgctgccgcttctggcggagcacgcctcgtggtatcgtgtcatggatacatcagagccggagagcttcctgctgcagccggaagcacttggaaagatccgttccttccgcgtgccgccgagaacgattatgatattagaaggtagagaagatgagacagaataatgatggacgtatcacctggcataaggtgaaaggacattttaagacaattaccgaacacaagctgcttgtgatgaaacattgctttcggatcggattgtaccggcagggactgatgcatgatctgtcaaagtatatgccgatcgagttcctgatgggctgccgctattatgcggacggcaaggcgagtccgaacaataatgaacgactggaccggggatattctgctgcatggctgcatcacaagggacgcaaccggcatcattttgaatactggctcgactactcgatcagaccggcgaaggggaaatgcccgctgcaggcggtacagatgccgcggagatatgtggcagagatgctgatggatcggatctgtgcctcaaagaattataataaagaggcatacacacagcacgatccgctcacctactttgagcgcggcagaggtcattatctgctgaatccgcagacctcaagggagctgcatgggatgctgcggattcttgatcagagaggtgaggaagagctgatgtactttgtgaagaattattatctgaaggggtacaagatatgaggctttttcatcacatagtaacctttaatttatccaacatctgcatggcgtagaaatagctacgcttgaaatccttcagtctcaatcaactgattcatatcttccggcatcggactttcaaaatgcagtagctcgccggtcaccggatgacaaaagtccagtgagcaggagtgcagcgcctgtcgcgtgatcctggcaggactgtccggattatagagaaaatctccggcgagtggataccccagatgggaaaaatgtacacggatctggtgggtgcgtccggtctcaagacggatgcgcagcagagaaaatccacagggaggaatctgcggcgcttctgattccgggtaaaatgcgagctgttcatagtgggtgatggccagatctccgtgcatggcatctacgcagcgcatgatggcggaatcagctttgcgggcgatcggcgcatcaatagtgccaaagggaggcgtctcgccctcgacgattgccagataatgccggtggatttctctgcgggcagacatctgatagaggatggaggcactgaacagatttttggcgagaatgagcaggccgctcgtatcccggtcaagccggttgacgcagcggtagacaaaagggagattttgctcagaaaaatagtacatgacagcgttagccagtgtattgtcgtggttgttgacagaaggatgaatgggcatatcggcaggcttgtcgattaccatcagatctgcatcttcatagacaatacgaagaggaagcctgaccggaacgatctgttccgagcaggcttcttctgtgatgtgcagctgtaggagatcgccttctgacagccgctggctggcgtaggcccatgcaccattgagtacaatcccgtgctcggtgcgctttaaatgtgtgagtacatgatgagagcagccgagctgttttaaatattcttcgattttgattccggtatctgcaccggaaatgtgataagtcaggtctctggtcatggatcgtatccggttcctttcagtcagcagcagccgattttggagatcagaatgcagtttggcgtatcgaccttgatcggacggcctttcataacgagcaatactttttcataatctacgg

SEQ ID NO: 1569 - DNA, 32759 bp, Unknown
  16S sequences of unknown bacteria
tccaccacctgcttcatcatcgcctgtacgtcgtccgcctcaaagaaggggattttgaagttcggtggcaggcggaacagcttttgcacgccccacccccacacgcgctccactcctttggcccacagggggagggcgtaggacaaacgccatgccggggaattggctgtatagtgttctttccatcccccgaagcccaagtgagggaaaaccaccgaggccacagcatccatgatttcgcttggaaactgctggctcaagagaattctgtgccattcgggagaggcgttcagagcgcccagacttcggggcagcctgcgaagtgtgggatatcgggagagtacatcgcagggcagcaggtatgcaaggggtaagtagcggacggggctatcatacgggaattggtatgtgatgggaatgaaagaaaacctcctttctgaaatcagattgtacgatagcctctgattattaacgacacaagggcgcactctttgttcctgatattcacaatcttctgcaaatttattttatgtctccattgcatccgtccacatctcgcactggctcatcacggtctgtaccgcatcctccatgccctccggcggatacttgtgctttttgaggagccgctttaccaaccggcgcataccggcccgggcgctctccttcttctgccagtcaatggtgcggttctggcgtagcagatcggtcagttctttggtaatcgctatcagctcatcgcgttcgtagaaatccttgatcgcctgcggtttggtgatcgcatcgtaaaaggccagttcctctgcagtgagccccagcttttcgccctctgcatgagcgttggaaatttccttggccagcttgagaagctcctgaatcacttcttcgttggtcagcatcccgttgagataccggttcatggtgctctggatgatctcggagaatttttccgatttcaccagattggtacgccggtagatggagacctgctccgcaatcagctttttcagcagctcgaccgccagattcttctccttcatgccagcgatttcttcaaggaatttcgggtcaaagagggagaactccgtgcccacatcggaaaacaggttgatgacgccttcactctggatgctgtgcttcaacagttcgttgatgcgctggttgacctccggcaacgtaaatttcttgcctgtgccgccgattgagagccgcaccagcatggtccgcaccgcctcaaaataggccgcttcaaaccgagtccgctcatccaccatgctgctgcacagggaaagggcctgccgaagcagaagtgctcccttgatgtagacgttctgtgtcttttcgctgtcgggcagtccgcgctcggacaccgattggcccagcaggaagttgacgccgccgctgatcattcgtgccttttccagatcgtcccccgtcaggaagccggtgtagtcaaacccgtggaagagatcgcggcagacttccagcttttccaggaacttgggataggccgccttgcccacgtcggggtcgccgtagttcttcttgtcccggacggtgtagtcgttcatggcctgcttgagcgcggcggcaatgcccacatagtccaccaccaggccgccctccttatcccggaaaacgcggtttacgcgggcgatggcctgcatcaggttgtgtccggccatgggcttgtacacgtacatggtggccagggacggtacgtcaaaaccggtgagccacatgtccaccacgatggcgattttcagcggggagtcgttgtccttgaatttgcgggccagctcctccttgtgggccttgttgccgatgatctcccgccattcctccgggtcgttgttgccctgggtcatgaccacggcgaccttttccgtccagtccgggtgaagctggagtatgcgcttgtaaatcttcatggcgatggggcgggaatacgccacaatcatggccttgcccgtgagcagatgggcgcggtagttttcgtaatggtccagaatgtcatccaccagcgaggcgatggtctggtccgcccccagaatggcctccatctggcccagctcctttttgcttttttcgatgacgtaagggtcggcattctccgccatcaggtcatattccgcgtcgataagccgcagggtgttttcgtccagcttcaggtggatgacccggctttcgtagtagaccggacgggtggcgccgtcctccactgcctgggtcatgtcgtagatgtcgatatagtcgccgaacacgtcccgggtactgcggtccctggcggagatgggcgtgccggtaaagccgatgtaggttgcgtttggcaggctgtcgcggatgatgcgggccgtgccaatggaggtccgcacctccagctcgcccttttcattctggcgggtgaccagcttttcggtgaggccatactggccccggtgggcctcatccgccatgaccacgatgttccggcgctccgacaggggctctccggtttcctcgaacttctgcatggtggtgaagatgatgccgttggcctggcggcccgccagcagcgcctgcaaatgctggcggctttcggcctgctggggcgtctggcgcaggaaatccctgcaacgggagaactggccgtagagctggttatccaggtcgtttcggtcggtgatgaccacgatggtggggctttccagcgccttttgcaggtaatgggcatagaacaccatggacagggattttccgctgccctgggtatgccagaacacgccgcccttgccatcggttacggtggcatgccgggtggattcgatggcctttttcacggcgaaatactgatgatagcccgccagaatcttgaaggtgttggcgccgtccacattgaagcagatgaagttgcgcaggatgtccagaaaccgcgccttttcaaagatgccctcaaagaaggtgtcaaactgggcgtgctgggtgttttcgtagctgccatccttggtcttccactccatgaagcggtcctcgccggaggtgatggtgcccgccttggaggtggtcaggtcgctcatgacgcacacctgattgtagatgaacagcgacggaatctcgtgcatgtagttgcgcagctgccggtaggcggcggaggcatccgtctcctcgcgggagggggacttgagctccaccaccaccagaggcaggccgttgacaaacagcaccacgtcggcccgcttctcgctgttttccaccaccgtccactggttgatgactataaagcggttgttctccgggcgctggtagtccaccaggtacaccagacccgcgcgctcctcgcccttcaccacgaacttgaccggcacgccgttttgcagatagtcggtaaagaccatgtttttctgcaggagggagccggaggcaaagtttttgagcttatacaccgcatcgtccagcgccgcctggggcagggtggggttgaccgcccgcagcgcgggcagcagctcatcctcatacaggggcgagtgatagtcccgctggatgtccgggccgtaggcataggagtagcccagggtctgggtaaaaagctgcaagacggcgttttcgtagttggattcggtgaagggcatggtgggtcacctcttgtgtatatcagattcaccattggaatcgcaataccatctatcgaatatgcatttgttctgtgctgaatttgcatccattaacaaaagggcatgggtatctttgttaattctatatttccggtattcgatggcttctccttgtttataccaggcaaggaagcaaattgtcgcgctgacatatacatggattcctcctgcatatgaatatgggccttcttcagtaaaaccaatcagtttattaatgtcattctgaaaatgggctaatcgcgtatcattgcgcgtttttacttctacaacaaggagattgttctcgctatttccccgttgatgtacaatcacatcagggaaattaaatcgttttcctctcaacgattttggttcagcaccccttctgttgtactcacaatcgacatgatagccgcattcttcaaagttctgtgcgacataaagcccgagcctgaaaacgatggaacgctcactgcattgcttctcaattatagcaaaatccttatggtataatgcagcaatcgcttcttcaaattttcttctggcaaacttgaaattttcatccattttatctctcacctttatgtttggtactcaacgctctaagcaaatacgaagatacgcgatagttcctgtgaatgtctgggaggtaggcgtaagcatagccggaattgggtgaagagttgcaacacggcattttcgtagttggattcggtgagggcatagagtaatgcctacatgtatccgcaaaaatcgataagcgcctccaaatatgatctgtatacagtaagaaagtttttcgttgatagattcgttgcaaggaatgaacatttaacatcaccttcttttactctgcatcagtctcacttgcttttctattttttcctccgcgttttgccttgtcaggctgttataagcgttttttaaattgtccaatgccctaaagtagtctttacgttgctctgtatctggaaataatcttttttgttcttcagcagtcattgctttttgctcgttttccttgcgtatattattcaaaaaacatgcataagaataaattgcttttagcatttgctcgtaacaagagacaaattcggcaagcaagacgctttcttttcccttgaaaatcaacctgatttcaattgcaagtgtttttaattcatcccgcttttttagaaaactttgatgatagggggcagtaagtggctgtataatagcttccgccgactcttctaaatacgtattattcgtcagccaaataaactcttgatcgactgaccattgaagttcatcttctctttttctttcaagtaacagtttgttttctttgtagagcgacaacagactttttgcaatcaaaaacctatttaatctgcgatcaaacaattgttgcttgttgctaatttttgtctgccaaatgcttaaaaataatgcgatgattgctgccacagcagttattaaagctagccagaagttccagtccttccacatagcaacaaacctcctaccataatgcgcagtatctattgtttaattctcagtaaaatggcatccataatttcttttgatttttcggaagcggagtgacggttaaaatctggtttactcgataacagctttgtaagatgaagccgcattgtacttaccgcgctttccttctgataccagtctatacatagatctgcttttaaactctctagcacttccttaaggtaagatgaagaaatgtgttgtggcagaactgtttcaaagatttttactgcatcagcatcgtctagaaatgggatttccccattcggcttctcttttccttcacttttagacaccttactaaattgtccgagatgagacatgtctttggtaagccgccgttgttttatatatgccatttgatgctccaattcagggaaaagagctccttcattaatgttatataaatctaattcctcaagaatttctggctttctcccacatggaattacaaaatgttcttcttcgaattcatctgttaaactgctgcttgcacgctgaatcaggctttttcctatatctgttggatcaataaaaatgttgtagtgccctggtaaaagaaatgctccactttgccgaattaatcgatcgttattaagcgttgaaataacaaagtaattgttttgcagagattgaattaggctgttatattttttcgtgcggcagttgtttgcagcgaaagaagagtatatccctttttctgttagcaattccaaacagctttcaagtgtcaaatctccaggtatgctttctgaagcaagaaacgaaatggtttctatttcgacatcttgaaaacctcttccataagttcgcttgtaaaatacagctccatcggtagatttaacttccttgattcccgtttcttcattctcttgaatttcatcatgtaattgacaggcaaaatatagagctaccaacggatttgttgttacgtccagcagacgggtaggcaatccatagtgttgaagtttcgtaagtctttcaaagctgctggtgaaagtacgaaattctactggattgcgtaagtatgcagaacgaattaattcaggctcatttgcaagtaaatttccacgatacacgctcgggataatttcccaggcggaatttgcttggccacgaaaataaaattgctggttgctcggatgaagtccctcagtttcttttaccctttcccttatttcggaaattgcagataggtagtcattcaatgattcaattacaattatgttttcattcgaatagtctttttcttccacgtatattctccttgcatattgcggtccggaaatgcgttgttgaactcatgaatgataatttgtcgcctcaaaactgcaattcggaaacatcgatttcaccagacatcagcttcggcaataagctatctctaatcgtagcaagtttagctgattctttgatgctatgttgcatcgtttcgtacatcggagaaacaatgttttcaaaagtagcaaggacatcacggctcgggattcgaatctcaattgtgttgagaatatcggttgtcatacttgggacggctgaacccgcattcatcgaagcaagatctttgcttttaagaaaatgataaacgaattttgcaatattaggaaatttcatctctgtgtaaaacattgtgtcaacagaccagaacggttcgttaatatacataacattgttcaatgttcccttgcgaggaatcaatacagattccttatcatacaatgggcgctctaccttgcgcataagaccaccagagccaaagaccggaactgatccatcggcaagctttttgtggtctttaccatatctcacgattattaagtctgagagatggccttgcttccattcggggttggcatgattgatgaatagttcttgataaaatgcctgggcctgttgctccaaattctcgttgatcttgttgttcagttcgattttgtcgtcgagagcacgtaacagagcacctatctttttttgctctgtcatagagggcaagtcaacttctaaattttgtacaacatcaatttgaacgcgctgtctcccggatgaacctaccatggatttaatggctgcatcgcgaacaagcgggctacaaaccagataatacaaataatcttcgtcagaaacgctttttttagcgcggaaaacgatatactctgtggaaccaaatccaatctcaccgtcatccaaaatggcaaccttcgccgtttttccattttccaaacaaggagtaatccttgccataatggtatcaccattccggaatttcgttccaccgttgaacggttccagcgtataaccgggaatgtcacggcaaaaaggacgcaattgctccattgctactttttttgcaatagttcccttttttagagattcgttggggttgaattccgctatatcagcaagtttacacctcatacccaatccccctcagccgctcccggatctgcgcctccagctcatgggactgccggaacatctccgacagctcctttgtcagccgggtcatcttttcctcgaagggctcgccgtcgtcctgctgctcctcgatgcccacatatcggccgggagtgaggatgtagtcctgcctggcgatttcctccgtggtggccatggcgcagaagcccttcacatccttcagggtgccgtccacaaaggcgttgtaggtgtcggccagcttgtggatgtcctcgtcggtcagctcgcgcagtttgcgggtcaccatggtgcccatcttgcgggcgtcgatgaacagggtcttgcccttctgccgcttgttcctggccaggaaccacagggagacgggaatctgcgtggtatagaacagctgggacggcatggctacgatgcagtccaccagatcggcgttgatgatgtttttgcggatgtcgccctcgccgccgctctgggaggagagggaaccgttggccagcaccatgccgatgcggccgttcggcgcaaggtgccagatcatgtgctggagccaggcaaagttggcgttgccggcgggcggcgtgccgtactgccagcgcacgtcgtccagaagtttgtcctgcccccagtccgaaaggttgaagggcgggttcgccagaatgaagtccgccttgagctgggggtggcagtcattgaagaaggtatcggcgttgtacttgcccaggtcggcctcaatgccgcggatggccaggttcatctgcgccattttccaggtggtggggttggagtcctgaccgaatatggaaatccggttgatgttgccgccgtggttctccacgaacctggccgactgcacgaacatgccgccgctgccgcaacaggggtctatgttcctaccgattttgatacaaaagaaaaagccttcttcggagcaaaagctgccgaaaaagacttgaaacaagggcttccaaggtcatactctgactttggaagcccttgttttatgtgtttagttatcctgctgccgctcggtaatgcggcggggtaccagccttgcggtgtagcgattttggaataattaaaaggtggggaaaaattaaaaagttacaatcattctcatgcctttatcttgcttacaggctttccattatatccagcagatgctgataactatcaacgctgtcgtagaccacatccgccgatgagagttctgcgaacaatttccttgcacagtcaatctttgctttttcaatcggcttcagattcagcgtttccatcgtgccttttgtctcggcgataaagaatatgtgctttaccgtacctttgttgaaagcaatcgcccagtcaggcgagtaattgccgaccggagtcggaatagagaatcccttcggaagtttggcgtaaacgcagacttcctctgctaaatccatatcctcagcgaactttctctccacgctctggccgtcttttgcataaccgtccgcaaatacatagtcctgtacattcttctttgcccgatacgccttggaaaaatccgtattcttttcggctgtaaagatggcactgtcgtaggttccttcggtctgattataagtaatcttctccacgatcatcgtagctttctgctcgttgatcaggcggatagcctttgtaataaactcctccgggttatttttgaacatggcaaaggtgtacggcttaattccctcaaggattcgcgcaactgtacgtctggtcagtttagcaccttcagcaatcttacccacaaggtcatatgtaacctggcttccttctgctcgatcaagagtataggtctggctcttttccgcaacgaatccggcgccgcttttcaacttatcggaattccagtcctgcccctgttcgccggtggtaacagtgtattgcaaccttgcaacgaacattttatcatcgatatgcgcgatagcttttcggataagttcctcgctatcaaactccacagtatacgcatacttgtggttaatataattccaaagcgtctgaaactccttcttatagaagttatcgttcagtgcattttcctgaatcttcgtttcgtgaccatcactgatcatattgtcaagggcgtgttcatcgaagatgctctggataagcgcatggacgccctcagaaatttccgtgcagctttccggaacgggagcgagtacgccgttcgcaaggtcagcgcggtatttatcggtaacatgatcgtcctcatcgatatagtcgttcttgatgaggtaacggtagatatcccgtccctgcttatcggaaacagtgacatcgttgccaccgataatgagcgtcttgccaataaaatattccgccgtagccttggtaggacgttcgtaaaggtcgtcacgaatgcctttctgcaaatcggcaacgaagtctttatacccatcagaagcaataacggtcagctggttgatttgttgcacctgactgccgagtgtatcagcatccatacgatcgccgttctgattcacgcaaagacgcaggccacggccaacctcctgacgtttctgcgtaggggaactgccaccatgcttcaaggtgcaaatctgaaatacattcgggttatcccagccttcacgcaatgccgagtgcgagaaaatgaaacgcacgggattgctgaaagaaagcagccgctccttgtccttcaaaattaaatcataagccgagatatcgtcactttcatcactgccacgcttggtagaactatctaccttacgaccttttttatctatgctgaaatatccggcatgggtttgatgtacatcaataccacggagatactgctcatacggcgtgttgaaaagcgtaagatactcgctcaagatatccatatattcctgctcaaaaatctctccgtactgcgagttcacctcattgccatcgtcatcatattttcggtacttcgcaacctcatcaatgaaaaacaaggacagtgttttgatgccgcgggaaaacaaatccttctccttttcaaagtgagaacggatggtttctctgatctgtacacggcgcaggtcagcctcggacacatctccaacgacttctccggcatggattgtttcaccgttggtaaaggtcacaattccacgaatgggatcaatttcactgatacggtatcctcgatactgattcatatttttggagagtgtgaaaaggtcatcgtccacgcccagtagccttgtctcgcggttgatggacttgttgtatccgatttcaaactcgatgcgtgccatcggcggtttcttcggagagataacaatgccctccaggaaaagatagctgtctgttccgcgcagattcttaatatcaaagcctttaacctcgattcgcttaaccagccgcttgttgtaagcatccagcgcatcaagcacatacaccagttcatggtgctgtttgtgcgtggcggaatagttcaggcaaaagagcggattaaactctttcagactttcctgcgtggcagtgccacccattttttgcggctcatcaaggataacaatggggcggttcgccttgataacgtcaattggttttctgctgccgaagtcatccagttccgtgcggatacgccttgcatcctttccacgggcattgaaggcctgaatgtttataatcatgacgttgatatctgcactctggctgaagttatcaatctccgccagattcttagaatcgtacacgaagaaacgagccttcttgccgtagtattccatgaagtgatcctgcatggtctcaaagctcttgcggacaccctcacgaatagcaatgcttggcacgaccacgataaacttgctccatccgtactgcttgttcagttcaaacatggtctttatatagacgtaggtcttacccgttccggtctccatctccacgtcaagggagcaggcgccaagccctccggtcattacgttttccgacagcttgatattattgcgagtctgaatcctgcgtatattattaagaagctgtccggaatcaagctgcacacgggcattggcaaagcccatatacagttcttcttctggaatcatccagtttgttacgtctcgtttaatctccacatctctgcggtaggtgaagcgatcgttgaatggttgacctgcaaacacacccaccacgctttctacagcctcggtctggtaaggctgtatggtaaatttgaatttcatatctgccattacaataccttcctttgcgttttcggactgtaggtttcaaaaatctgttcgaagttcgttgcgacactgtcactcgccatgccactgtcgcggaacacggcgtagaatggcttcctcagtgcgattgccttgaccgtctcttcggtaacatccgaatcaaagcaggcaatcagatatcccccggcaacagagaatactttctttccggcaatctctgtctcctcaatgtcggaggaaagcaagatgccgaggtcgagcatcacctggaagagtagatcttccggtgttctgtcagctttgatgttatttgcaaagaactgcatctgtccttggttataatcggctgggcgatagtaaacgtcctccatatttgtggtgtccacgcggaacacacggaaaccatagtctatatctgctccggtttcctgctttatcatttttccggcacgacggatgcgttcttcgcctatatcacatattgtcttaaatccagctttttgagctgctcctccttcttcggtttcctcttgaagttgaactaaaataaactttctatgccctccatcatctgcattctgctgaagaacggcatgtgcaattgttgcagagccagagaaaaaatcaacaacaatatcgtcctgtcccataaatgacgcaatatgctcctgacaaatactgaccaccttcggtgtatcgaacggtatattcaatttagcaagcaaatccgtatcgcttcctccaaaatagagaagtgaaggaatgttctcatacatattttctttcagtaaatacttactatttggaatggtcgtttcatctttaccaaataaaatacgaccttcatccatcattttcttcatagtagaagacggatttctccatcctcgttccggaactggacaaggttttcctgttatagggtgtattaaaggaataaaataatcatctggtgcctttttcttgttaggccatgccatagaaacaggacggtaaacatccccattttcatcaattttgttgtatgctttttcaccgccgctaaaatctgattgtgtgcgcatccatgcggcaaaatcagcattcgcatcatcgagcgtatatgtcaaagaaaccttggagaacaactgatttgcttttttaatgatcaaagatgcgttctttttaggtctctgcattttgcaagtttcagtaaacataatcttattcttcgcataaaccaaaatatattcatgctgataagaaataccctttgcatctcctttgggatttctcttgtcccaaataatagttccaaggtcattcgattttccaaatacctctgcgcatagtttttgaagattgtcaatctcattttcatccatgttgataagaatgacaccatcatcagccagaagatctttcgctaaacgcaagcgtggataaagcatattaagccaatcggtatgaaagcgaccattcgtctcattatttacccgcatatcaaataacaggttaccatcttcatctcgttgtccgcttgcctccgaaaactcagttccagtaacagtaaagtcatcgtcgtaaacgaatgcgtccgaacccgtgttatatggtggatcaatataaatcaatttcactttccccagatacgtctcttgaagaagcttcagcgcatcgatgttatcgccctcaatgtagatattctctgtatcgatgctaccgggtgttccgtctctgccgacagacttctccctgtcaaggcgcaaggtcttagcaataggttggttggcaagtaccaccgatttctttttatccggccatgtgaactggtagcgttcctgcgctccctcgaccacagccgcagagatttcctggcgcagcacgtccgcatcaattgcacggacaacctcaccgtcctcatttattgtttcggtcacggcgtttgggaacatcgcggcaagtttcctgaaattctcctccgccagatcgggtgtatgcatcttaagattctccatgtttcaaatcctccagttcctgtttatagccacgaaggcgtgtataaagttcaaattgtttcttcggctgttgctccttccaggcagcagcctcagtctttgctatcagcttctccagtttcagtatttgctcctgtagagcaaggcgttcatccaccgaaagggaagccgatttttcagcccgctcatcataaagagcaatctgttccacaaaagcctcccatatctcatcgagggagaagccctgaggtttcaggcttatttctgaagcgtccatccactgtgtccgataaagtttgctatgataaagggcaagctgacggctatcctcgaacataagcagaaagaccagattgtgaggattctgctttgcaatcgcctctattactttgccatcaaactcctgcttctttaaagttatcgacagcaacagtatttcctttatctccgaatccgtgttcaggttcagattatcttttgtgaggctgttctctataacaatcctttccacatcggacacgaacttgtccttcagcgcttttgtcagtggcagatgcttgtagaacgcctctttcggcaaacgacggtgaaccgccgttgcagtaggaaaatcaatcatctctaatcaccaccataaagcatatcagttcaaaatcatccaatcctgaaaaaccaccggacagaaatgtggtctgaccgcctctaaagaaactgtcaatgtctccctcatcctttgcatcaatgatcgacatgatagcatcctccaatagctgggaaaccttgctcatgtttttgccattgtttgtggctttattgaattgcttgcacaacactttgtccggcacagcctttccacgagagaggtgacgcatcacatcgagtgtatccttcggctgtaaatggtttgtaataacctcgccgtccatgccgacgtacaccatatagaacggatgcagcctattctgattctgaatattgatgtgttcgttaatattcttcagtacgaaaatcacgccaggcttttcgccctttactacggcatgaattccgaatggtgtgtgatcgatatttccatgctccttcatgtaggcgagcaggtccatacggaactcattcaagcctaaatccataatggaaacaccgctggtcatatcttccaagtcaaccacttcctcctggagcttctttaactggctgcggcgatattcgaggtcgcctttttcttcctgattgataaggtcatcatcgccggttgaagtcataacggaaatacgcatccttgtctcaaccctggacttgaggttgatgtattcgtccaaatccaaatcaggccaaaagttcacaagctgaatcacagcatttctgctgccgatacggtcgatacgtccgaatcgctgaataatgcggacgggattccaatggatatcatagttgatgcaaaaatcgcagtcctgcaagttttgtccttccgaaatgcagtcagtggcaatgagaatatcaatctcggtcttgtcattcggatacagaacgtctctatccttggacatcggagaaaagcaggaaagcacgtggttcatatctgctttaaacttcggaattgtagtcttgccatccaccgagccggtcacgagcgcagtatgtaagcccaactcatcccttgccataccgctgatgttgtcgaagaggtactcggcggtatcggagaaggcggtaaaaatcaacactttccgattaccttcgttaatcggggcagccaccttttcacggataacacgaatgagttcgtttagcttgaaatcgtactccggcgtaatatcttccaccatgagtatcaaaagctggagattctcaatatcctcgtcaatatcgcgcttccacgagatgtaatccatatcccgcaggtcaatcttgactttctttcccacgctgaagaaatccgtgttctggtcatcatagtcaaaatcatccgctacagcagagagatcgcgcatctcatcaaggtctcccgtgccgtccatcatgaactgttcgatagcctgcgaagtgtcatacagataatcataaatgcggcgcacggtcagaagaaacgaatgaacagaactttccatgcgctttaagagattaatgctcattaaacgctggataccaagttcacggcctttgcggaagttctccgattccttctcgtccagatacttgtgcagtttactggcatgaatataaatagtcggcgtatatatcgtcagctgcagtttcgacagcagctcgaacacttctttgtaatttatcgctcccggacggtcagtcaatttcggtcttagcgagattggcttgttccttgctgggaatgtaccgatatctgtaacatcataataattctgtatatgcttcctcgatcgagcaatcgttacgctgtccagcacctcgaagaagtcaaaatcaagctgtgaaagtaacgtggcagttgtccgttcactctccggcaatttgcaccatgcattatagaccttctgcgcctggcggaagatggtatcgatatctgactttgtattcagcttctcattgaattcggatggatcgccctcataggcaagcgccagctggttacgtaggtcgtaaaaacgattgtttaccggtgtcgccgaaagcatcagcactttagtctttacacctggttttatgactcggttcatcagccgcatatagcgattttccttttctccgccacggctgtctgttccgtttccgttacggaaattgtggctctcatcaataacgaccaaatcataatttccccaattgatacggtcaatcggcagaccaatcacggtattgccgctgtctctggaaaggtcggtatgatacagaatgtcataccgaagcctgtctgcggcaagtggattgttaatgaggtttccgcgataggtcatccagttctctgacagctttttcgggcagagaacgaggacattcttattgcgaccctcgtagtatttgataacggcaagtgcagtgaaggtcttgccaagaccaacgctgtccgcaagaatacaaccgctatattgttccagtttattgataatagcaagggcggcatctttctgaaagttgaacagcttgttccaaataacgctgtccttaaagcctgtagcctcatttggaagaacatcatcagaaatatcctccagaaattcgctgaaaatgttgtagatagtcataaaatagactaattccggcgcattttcctggtagactgtggagatcatttcgatgacttcttccgtaacatcggtcagtttatcttcgtcactccaaacggaatcgaacattcgtaagaattctgcacttgctggattctctatgcgggtaaccatatttgtcagattgttcccgcgttcacagccgaggtcaacagtcgtgaaagtgttcatcggcatataggtataggcgtcctccgctccgtccacgagcaggaagttattcattccttcgcgggtagtgttagtcttaaaacgtaccttacggcgcatccattccgcacattcctttgcaacggccttctgcttaagttcattacgcagacggacctcaaattctgtaccatacaggctcttttctcttttgagacggggaatataaaattcacgacgttccttctgcgttttctccgcaacaaaagtcggcgaagtgaatatgaatcgcagttccttgcaatcctcaagctgactcttcaattcctggtatgcatatatcgaaaagcaagctgccgctatagagatacgactgccttgccgtatagttttttcaagatcgtccttgactactttagtggtgttattaaaaatctccacaagcgcaccctcctccaacggctgttactcttcaaccgccttatcatcatcaataaattccatgatgtcaccgacatcacatttgagtgcgccgcatatacgcagcaacacatccgtattcacatttccgccttttccaagtttggcaacagaagtggcactgataccactcatctcccgtagagtctttttatttattccacggtcaataagaagtttgaaaagtttgttgtagctaaaacgcatctgcattacctccgtgatttctttctatattctacattaattacttcacatcatttaggaatccatatcgtgttcccggaatcaatcctttgccgaaggtttcaacgaccgcaccatgcttctcatattcaagggaagggatatggtcaaggttctcgataataataagctgaccctcatcctgatgattcatgaagtagcggtaaagcccagctctcatgctatccggcatcctgtcatccactccatcatcaaagccatgaagtggagtatcaatgataaagatgtgaggatcgaatttagcgtttagcgccagatatttccgtagcatcataatcatcactgtattaaggtaagaacgataacctttaccgtggctcgttcctttatcctcaccatttacctcaatatcaaatgttgtaaaattaaagtgcgcctgaagtaaaccggaataattgcattccttaagaatggaattggcatattcagacatcgtggtggcaaaatcatccccaaagtagtccttgggatgatactctaaagtcttatcatttttctgctcgttttctaaagcagtcagatcgtttccaaagtccgtggcataggcttcaatcaatgcaatctcactggcaattcggagatatgccttgtaagcattgactgtgttttgttgctcactttcctggggacgtagttctgttttaattttagattcgagagcatcacgctgccgctttaactcgacaagttcggccctgatttctttcttacgatcctcgacatctctctccgtatcctcaaggccggaaagttgggccatcgtccgctccatctctactttggacgcagcaatataggatatccgcttacgaggagtaatcgttccttcgcagtatggacatttggtggcttgtggaacttcctgataggcttcttcgccctcgacaatgagagaaagccgttgaatatcagctttatactgcgcagcaagtctgtggtatctcgtcaaaagaacatcgcactccgcagctcgttcctctgcttccagaatggaagagaggattttttggctctctgcaagggcacagtcgatttttctctgtgtttcctgtagggcagcagtcgcttgagctatctgcgcttcgacatctgcgtcatcaaaaatatgcaaatcttgttcaagctgctccttgcgttccgcagcatcccggattttccgattgacatactcggctacagcctttcggcgcgctttctttatttcctttttctcttgggcatctgtctctgtaaaagtcctgccggtaattagatacaaaagtgccgacaaaaacagcgtattctccatgtaacgatgttttggttctacgatagagtcgatatcatcaatccggttttcatccaaataaaatacacgcagcaaattgcgccaggtgagtcgcttcttttcaaaccttgcgttcgttataatcatggtttcttgttcaatgccaatgagcttcagccatacttcgttcagaggcggattcttagctccctttcggtaattgacatcataggtaccactgtctataccgtctatggtgctggtcacctctacctgattctttcccacatttctatgaagagcgacttcgccatcacggtcatttgattcgacaatcatggtcacgccgtcatattttgccgtttccttaaacggcttgtccacggagccaccgaagataaagtcaatacaattcgccacgcaggtctttccactgtcagagcgtccctgtatgatggtcagtcctttaccgaaggaaacgctggcatcgcccttggtggcgcttttcgctataacttttttgatgtaaaatcctgccattgcgttacctccttaaagatttcgttgactgtcgactgatttcgttgaacaactggacatcgctatagttcccatacttctcaatcacaagccgcatcagctctttataccgcttggcatattctgattggaaaccctcactcatgtttcttccactttccgaaacagaataaaggatacctgtttcatcatccgtggctataaccagtccatcaactaccagattctttattgcagtttttgtaaggctccgccttgcggatagttcgctaaatgcaaagccattctccccatttaaagacttatccgcaacaccgaaatcctcacagtaaatcgttatgaaatcataagcggtaattctgtcgagtgtaatttcggcattcgccacatcaagaagaagtaccacgtggagagacagttcaaagggggtattgaaaagtctgttattcatcaatgttcacccacgactcaatcacgccgtcattcaccaatatgtggcaaatgcctttcttctccaaattgccgatcagattccgcatttggctgagtacggaactgtcgagtgtggtgcttgttattttttcaaggacagcattcagccttgcgtaaccatcctcgtaatccttccaatatgtagtattgatgccgtgccatgcatcatccttcagtctgccgaactcatcctctccgtcatcgaagatatcccggacagatcgttcaatacttaccgcactgtaatatgccatgcgctgttccttgtagttctctgcatatcgtttcggaagggaaggaacatcgtcagcagtaaaagtctccttgtttaatttctgagcatacgcctcatacaaggcgcgaatgtaatccagttcatgcttgcctacatcatcagggacaagcgtctgatgaatcgttatgacctcaccggatatatgtaatttatcgcctctgcgctcaattgtcgcaggggctatattttttagactccttccggtctccatgcgctggtaattcaacgcagttacatcatcggacagtccctcggaacggcgtctaatgatctgagcaaggatattagcacaggcctgcccaacctcggaaggctcgacatcaaagctaaactcagccagcttgtccttcatgtggttcaaggcatcaaaggagtatgtatttacgaaatcagcaaactttgcctcgtccagtcgaggcgtaagtgcagacgcctttttctgtgaaattggaagtctgccactgtaatatgcctccagtgtagattttccaagctcatagaggggattcggagaagctttttccaatgcctcatcatccaggatggcatccgtcagaatcttcacaaattctgcggcgttcatttttgtttcgtaattatgatgcatgaactgtacaaggtcgcagaacttcaagttgacaccctcctttccaatgtaggcatttatgtaggcagatgtaggcaaacctacgagttttggaagtcctattttctataatgaaatcgtgataaggcagaaggagcgcacagtctgtgcgaaatccaaaacgcctcatatcacattataccacgagcaaacgcgataatcaatataaatttgtgaacgcaaaacttattttcaaaataaagctattgatttgcgtttgcgagtggtgcaatcccgcctgacaccgcatcagctgatcactgatggctcaacggtatccggcggcacaactcaatatcacagctgccttttgagcgggttagctgcaatccgaaacggagaactccgttaggactgcggttaggtcttgcaccctttttgcggcagcgcccagagtcctccgtttcgagaaatcgacaaatggaggacttttttatgaaaaccaatgaaaatcagaccacatcaaccatctactaccgtccgctcaagcagtggatcgaggtcaccccggaacagaagcgggactgggagcggttcgtagggactacccgcaaggcgaagcagagagccggagcctgctgcattccgtacaaaaaaagctacaaatgcgacggcctctgcgatacctgcgagttccgctgtatcccgaaggacgctccccagcatctttccatcgacactgagatggagaacgcctacgaaaacggcgtctcccgtaccagctttcttgcggacagcaaactgaccacggagatcgatatcgacgccctgattctgaacggcctgcttacggagcttcagtcatccgacccggaaagctacgagatcctcatggcaattgcggacgggctttccgaacgcgccggcgcagagcggctgcagatgccccggaacacctttgtgtataagcgcaatcagctgctgaagcggctcaaggaaaaattctaaaaatctttcggccaactcctcctttcccgtccagatgggtctgtgaaaggcaacacaagacgccttgggaaaggagaaaacgccgatatgagttacaacgcaaaccattatgacgcccgtgccgatgaggacattgttgatgtcctgaccgcaatcagcgtggtgtcaaggagactggcgagcaacctgactgccgcgcgccagcagagcaaatccagggaaggaggaaaattacatgagcagaatgagcgatatggcacagaccatcgaagatctccgcagtgctgccgctgctatttcggatgccgctgactggctgacgaagatgttcagcggagagcaaccggcagaggatgctcccgtttctcctcctgaaccggaactgacgctggagcaggtcagggccgtgcttgcggacaaatcccgccagggacacaccgccgagatccgcaccctgcttcaaaagtacggtgcgtccaagctgtcacagatcgaccctgcacactataaggcgttactcgccgaagcggaggaattggcagatggcaactaagcacgcagtcttatccgcttcttcttctgaaaggtggctcaactgcccgccatcagcaaggctgtgcgaagcctacgaggacaagggcagcgactacgccgccgaggggacggacgcccatgcgctctgtgagtttcggctaaagcagactctggggattccggcaaacgatccaatcgaaaacctcacctggtacaacgaggagatggaggactgcgccgccgtctatgccgcctatgtgacagagcttctggagaccgcaaagcagacctgcaccgactcggtcatcctgatcgagcagcgagtggatttctcccgctgggtacaggacggcttcggcaccgccgactgcattgtcatcgctgacggtgaactgaacatcgtggactataagcacggcaaaggcgtggaggtcagcgccgtggataatccgcagatgatgctgtatgccctgggtgcgctggagatctttgacggcatttacgacattgataccgtccgcatgaccatctaccagccccggaaatccaatatcagtgtctgcgtcatggaaaaggacagtctgctcgaatgggcgcagaatgacctgacctataaggcaaagctggcatacgaaggtggcggtgatttccactgcggcgagtggtgccggttctgcaaggcaaaggccgaatgccgggaacgagccgaagcaaatctggcgcttgtccggtacgactttgaggagccacccctcctgaccgatgaggagatcgccgacatcctggataaggtggacgctcttaccgcctgggctgcggacgtgaaggaatacgcgctccagcaggctgtcagcggcacggtgttccccggatggaagctggtcgagggtcgctccaaccgcaaatacaccagcgaatccgctgtagccgcagccgttgagggcacaggctttgacccctacgaaaagaaactgctcggcatcaccgccatgcagaagctgctgggaaaatcccgcttcgaggaacttcttgctccctacatcgaaaagccgcaaggccggccggcgctcgtgcggtcgagcgataaacggcccgaatggaataccgcaaaaaatgattttatggaggaaatgtaatatgtctacgaacacaaacagagtcaacaaccctatgaaggtcatcaccggccccgacacccgttggtcttacgccaacgtctgggagcctaagtccatcaacggcggcacgccgaagtactcggtgtcgctgatcatcccgaagtctgacactaagacggtggcaaagatcaaggcagccattgaagccgcctaccaggaggggcaggccaagctgaagggcaacggccgctccgtgcctcctctctccgcaatcaagaccccgctgagagatggcgacattgaaagacccgatgatcccgcctatgcgaacgcctacttcatcaacgccaactccgccaccgctcctggtatcgtggacgcggaccgcaatcccgtgctgacccgctccgaggtgtattccggcgtgtacggcagagcgtccatcaacctgtacgctttcaatagcaacgggaataagggcatcgcctgcggtctgaacaatctgcaactcatccgtcccggcgaacccctgggcggcaaggccagcgccgaagccgactttgcaaccgatgatgacgaggatttcctcggttaagacagtggaggtaaaacactatgacaacaattcagacaattcttctctttacagttctcggaatctggttgtgcatcagctccgtcattctgatcagcagcatccagtcctttctctacgaccgcaaacgtgaaaagcgtgagcgggaacaggcgcttcgtgacgctgaatatcacgaaaaccgcatgaagctgctggagaaataagcgactaagccccagggcggcggagcgatctgccgccctgttggggtatggaaggaagtgacgaaatgcaaaccttatccatcgacctggagacttacagcgaccagcccctcgccaaaaccggcgtgtaccgttatgtggagtctcccgattttgaaatcctgctctttgcctacagcgtggacggcggtcccgtgcggcagatagaccttgcctgtggggagaaaatcccttcggagattctttccgcattggagaatgagactgtgaccaaatgggccttcaacgccaattttgaacgcatctgcctgtctcactttctgggctatccgaccggcgactatctgaagccggattcctggaaatgctcgatggtctgggctgcgtacatggggctgcccttatccctggagggagccggcgctgtgctgggattggaaaaacagaagctgtctgagggcaaagacctcattaaatatttctgccagccctgtgcgccaaccaagtccaatggtcagcgtacccgcaaccttcccaaacactctccggacaagtggctggcgttcaaacgatacaacatccgcgatgtggagacggagatgtccatccaggcaaggctctccaaatatcccgtgccggacagcgtgtgggaggaataccatctcgaccaggagatcaacgaccgcggcgtggggctggatatggaactggtgcggcaggccattcagatggacgggcgctcccgctcggagctgacacaggcaatgaaggaactgacctcgctggacaatcccaactcggtacagcagatgaaacagtggcttgcggataacggcatggagaccgataccctgggtaaaaaagcagtggcggagcttttgaaaaccgcgccgccacaattgcaaaaggtgctgaccctgcgccagcagcttgcgaaatccagcgtgaaaaagtatcaggcgatggagaccgccgtctgctccgatggccgggcaagagggatgttccagttttacggagccaaccgcacagggcgctgggcaggccgcatcattcagatgcaaaatctgccccagaaccatctggacgatctgtccgaagtcagaggacttgtccgggcaggcgactttgatgccgtggaaatgctctatgaggatgtgccgaatacattgtcccagctgatccgcacggcattcgttccacagggcgaccgcaaatttatcgttgctgacttttccgccatcgaagcccgtgtcatagcgtggcttgccggcgagaagtggcggcaggacgtattcgccgagggcaaggatatctactgcgccagtgcatcccagatgttcggcgtccccgtggaaaaacacggcgtcaacggtcacttgcggcagaaaggcaagatcgccgaattggctctcggctacggcggatctgtgggcgcactcaaggctatgggcgctttggagatggggctgtctgaggatgagcttcccgctctggtctccgcatggcggcagtcgaatccgaaaatcgtgcagttctggtgggcggttgaccgagccgtaatggacgctattacccgtaagaccaccacaaaaacacacggcatcgtattctccgccagaaatgggatgctgttcatcaccctgccgtccggcaggagtcttgcctatgtgaagcctaagatcgggacaaataagttcggcggagactgcatcacctatgaaggcgttggtggcacaaagaaatgggaacggctggacagctacggccccaagtttgtggaaaacatcgtccaggcaacctcccgcgatatcctctgttacgccatgcggacccttcgctgctgctccattgtcatgcacatccacgacgaggtggtcattgaagctgaccgccggatgtccctacaggctgtctgtgaacagatgggcaggacgccgccctgggcaaaaggcttgcggcttcgcgccgatggctatgagactgatttttacaagaaggattaacgaggtaacgcctatgagcatcaataaattcaactgcgagggctattacgaccccacagcctatgaagccctcgccaatatagaaaaagaagaacgcgccctccgcgctttccggcctatcgtgtatatctgctccccctatgccggagatgtgaccgccaatgtagagaatgcccggagatacagccgcttcgccgtggacatgggatacatccctattgcgccgcatctgttgtttccgcagtttctctgtgacgacaatccaaaagaacgccagctggggctgttctttggaaacgccctcatgagcaaatgctccgaggtgtgggtgttcggcgaatacatctcttccggcatggaagcggagatccgcagagccaagtggaagaactaccgtttgagatattttacggctgcgtgcgaggaggtaaccgactatgcgtgaactgaacatcgcctacggcaacaaccggcaggcgaagagatgggtcaacaagaccataaaatttgacgatttgaaggaacggctcagagtgcccatccgcaccaccgagtccgcagaggaatatgcaaagatgagccgcgcccagcgggacgccgccaaagaccacggcggctttgtggcgggcgtgctgaagggcggcaggcgcaaggtcgataccgtggagagccgctcaatggttgcgcttgacggcgaccgcatcaacgccgcttttttggaaagctatgagtccctctgcccctatacctccgcactgtacaccacccacagcagtacggaggaaaatccccgcgtccgtctggtgttcccgctgaccagggatgtgaccccggaggaatttgtggcggtatcccgctatcttgctcagatgctgggcatcgactattttgacgaatgctcctaccagcccaatcagctgatgtactggccgtccattccggccaacggctcctttgtgtataaggagacggacggcggctggctcgatcccgatgcgattctcacaaaacacccggaatggacggatcccacaagactgcccacctcttccagggagagcaaggcgaataccaccgcacagcagaaggtgcaggaccctctgaccaaagaaagtgtggtgggtctgttcaaccgcacctattatcccatcagcaaggcgctggagacattcctctccgatgtctatgagccgaccgacaacgaaaaccgctggcatctgattgaatcctccagcatggcgggcgtggaaatcaaggaagacaaattcgtctatagccaccacgccaaagacccggcttacctcaagctgtgcaacgcctttgacatcgtccgcatccatcgctttggagatctggatgaaaaagcgtcgtacaaggcgatgtgcgagttcgccatgcagcaggatgaggtaaagctgctggcggcagacgaacgaatggcggacgcagagacggatttctccggcagcgaggataccgactggcagaagcgtttccagtacgaaccccgctccacggtgctgaagaataacctccacaacatcactctgatcctccagaacgacccgcagctccagaatatcgtgttcaaccagcagctggacggtatggagatcaagggcgaggtaccctggaagcacccatctaaatactggagggacgctgacgatgcccagctgatcagctatgtggattcccactacggaacattctcccagcgcaattatcagattgctgtaaccaaggtggcggacgaccgctcctaccaccccatccgtgaatatctggcggctttgccggagtgggacggcgttctccgtgtggacacgctcctcatcgactatctgggcgcggaggataattcctatgtccgcgccgtgacaagaaagactctctgcgccgccgtgcgccgggtacaggagccgggcgtgaagttcgataccatgctggtcttaaacggtccccagggaatcggaaaaagcaccctcatttcccgccttgccggagaatggttctccgacagtctgaacctgagcgataccaaggacaagaccgccgcagagaagctgcagggctattggattctggaaatcggtgagctggcgggacttcgcaaagccgaggtggagacactgcgctccttcctttcccgtcagaacgacatctaccgtgccgcttttggcaggcgggcgacgccgcatccgaggcagtgcatcttctttggcaccaccaacgccgagtccggctacctgcgggacaccaccggcaaccgccgtttctggccggtcaaaacgccgggcggcggcgtaaagcactcctgggaacttaccaacgaggatatcagccagatctgggcggaggtggtggtgcttgtagagaacggcgaaaagctacatctggctcccgacctggagacgctcgccaagagtgaacagcgggaagcgctggagtccgatgagcgcgagggactggtgcgcgagtatctggagaccctgcttccggaggattgggacggcatggatctgttcgaccgccgctccttcctcgccggagtgaataatatcggccgtgtgggtacggtcgccagaacacgggtctgcaatatggagatctggtgtgaacttttcggcaaggatcaaggcagccttggccgcgccgaatccaataacctcacggcaatgctcaccaagctcggctgggtgcgcaaggagaaaaaggagcgcgtcaggccctatggaccacagtttgtctttgttcccggcgatgttcccgactgacttttcgggaacggagcgaatcaggaacagttcccgacttccggcagtgttcccaggggagactctgggaacgccgtcaggaacacaccgaatgtgccgccgcaaggcaactttataggctctgttcctgtgttcctaaaaaagcatataaattgaaaatgtatcaaaaagactgtacagaacccgtaaatcacgcatacgcacgcgcgtaaggattttcaggtttttaagaacgcggaggtaaatcaaaatgtcaatgtatgaaatagacagcgcatatgtccgcaggtgtcagaagcggcttcaggaatggggagcgcccctctccggctggtactgtgactatatttacgatgtggcagatgaagaggaagattccgaccatatcgaattgttcacttgcgaactctgcgattgtacgcaagtacgatttgttcatgtgatgcggcatgacgaatattttgagactgtttcggtcggctgtatctgcgccggaattatggagggcgatatcctcgccgccagagagcgtgagcggcttatgaaaaaccgcgccaagcggaagcggaactttccgcggcggcaatggcggaagaactggtacggcaactatcagctgacttatcagggcagaaaggtatttatcaacaataagggcggcaatcgctacagtgtttatgttgatggcaagacatcctggagctacaagggcaaacccctcgacaattttgtctccgccgcctacgccgcttttgaattagccgaccccatagaaaggatacgcccatgagagaaaaagagatagaaaagaagctgatccaagcggtcaaacaggctggcggcatctgccccaagctcgtctctcccggttttgacggtatgccggaccgcatggtgctgctgccaaatggaaagataggctttgtggaagtcaaggcgaccggagaaaagccgcggccgctgcagttttcccgccacaggcttttgcggcggctgggcttcctggtgtatgtgctggacgatgcggagcagattggaggaatgctggatgagatacaaaccccatgaatatcaaaaatatgcagtggagtacatcaagacacaccccgcagccagtatcttcttagactgcgggcttggaaaaaccagcatcacgctaacagccatagccgatctgctgtttgacagcttcgagatccataaagtgctggtcatcgcacccctgcgagtggcgcgggatacatggacggctgaagcggataagtgggatcacctacagaacctcatctgctccgtggctgtcggaacggaagcccagcgccgggcggctttggtgagatacgccgatatctacatcatcaaccgagaaaacgtccagtggctcatcgatgagagcggcattccatttgacttcgatatggtggtgattgatgagctgtcctccttcaagaatcaccagacaaagcggttcaagtcgctgttgaaggtcagacctaaaatcagccgtatcgtcggactgaccggcacgcccgcttctaacggtctgatggatctgtgggcagagttccgcatcctggacatgggtcagcggcttggacggttcatcaccaagtaccgcaccgattacttcaccccggataagcgtaatggccagatcatctactcctacaagcccctgccctatgcggaggatgccatctaccggaagatctcggatattaccatctctatgaagtccgccgatcacctgcagatgccggatctggtcagcagcgaatacacggtccagctttccgaggaagaacagaaaaaatacacggacctgaaacaggaactggtgttgtcgctggatgatgcggagatcaccgccgccaacgccgcttccctctccggtaaactctcccagatggcgaacggcgcaatctatgacgacggcggcgagaccatccgtatccacgaccgcaagctggacgctttggaggatatcattgaagccgcaaacggcaaaccgcttctggtggcttactggttcaagcatgacttgagccgtatttcggaaaggctgcaaaagctgcatatcccgttctcccagctggatggcgccgccagtatccgcagatggaacaatggagaaatccctgtagcacttattcacccagcatcggcgggtcacggtctcaaccttcaatccggcggctcggctatcgtgtggttcgggctgacctggagcctggagctttatcagcagaccatagcgcggctctggcgacaggggcagacttctgaaaccgtggtggtacagcacatcgtcacaaaggacaccattgacgaacgcatcatgaaagccctctcccaaaaggagcatacccagacggcgctgatcgacgccgtaaaagcggacttgaaaatctgagacaacctaagaaaatccgtgccaatccgaggatcaaaatttcggaggtacgaatatgagcgatatcacgatttacgagaaccttgcgaacgccatcatcctgcaggctgtgaaggattaccgcatggcgctgaaaagcctgaaagtcaactcccggaacaggacggtgcagactgataaagccgaaattgagcggttcttccgttcgcagtggtactcgacactcacagatgtgaatggcgagatgctgatcctctccctgcagaaggaggcagacatatgaccgcaaaagaatatctaaaccaggcgcggcacctggacgcactcatcaactgccgcttgcgtgagattgactactggagggatttatcgagcagcgtctcaggcagtaatttcgaaccgcactacaatccaaacaagccgactgaagccccttttgtccggtgtcttgagaaaatcgacgccatccaaaaggatgtggcggaaaaggtggcgtatctggtgtgtctcaaggaaactatcaacgcggcaatcgacagacttgccagccgcgaggagcaactggtactccgttaccgttacctggataactgctcctgggaggagatatcacggatgctgaatgtgtcgctgcgcacggtgcatcgcatacacgggtcggctcttcaaaatttttctgttccggattgaaagttggcacggtttggcacagcatggcacacttgacttatggtatgattacaatagcaaagtagaatacagaacggccttcatgggagcgatcctatgagggcttttcttatgccccaaggaggtggcaaagtgcctaggaaaccgaaacggccgtgttcctatcccggctgtccaaagctgacggacgggcagtactgcaaggagcatgaagctgccgcccgcagacagtacaaccgatacggacgtcccgccgacagcaacaagaagtacggcagagc

SEQ ID NO: 1570 - DNA, 7623 bp, Unknown
  16S sequences of unknown bacteria
cacactggccccttgataggtgcaaaaagccacgcacaggtcgcggctttttgcaaattgatgagaggtagggcaggcagtcccttttcgatatagggatttttatgagtgaaaaaacagccgggatgccccggctgttttttattgtgtttgttatgcctggactttattccgcttttgccctttccagaaatggagagcgatggcacaaattgcccagatcaggtagccgatgaccatcctgataccgctttgatagaaataggaagaaaccacatcggtgctgcctcccagaatcaggcaggagaacagataggtgcacagatgagccagcagataataggccagggtgagccaaggctccagcttgaagatcagggtcagcagaggaagcaacaggaaaaacgacatgagatagccagtggaattggtaaagaaagcggaaacggaacggagcgattccagttgttcctgaacggccgtcagttctgcctggctgcttagaccggcccgggagagggacagagagttctggtggagcagcagggcagtccccgccacatccatcactgtccacagcaccaccagggcacacagaacgatgagggtccatttatgtttttggaaaagggctttttcttttgcctgctgggaagatgacagcggagaagaatctgttttctgttttttccgcaggtaaaaaaccacagcgaaaacagcccagatcaagtagccccgcagcatcatatagccgctttgcttcaagggagctgtaaccatctccaacccgccgcccatgatcaggcaggagaagatgtaggtgcacagatgggccaacaaataataggccagggtgagccaggagtccagtttgaaaagcaaggtcagcaaaggcaatgccatgaagaaatagatcaaatagccccagaaattgctcacaaacaggctgatcggctgccagaattcgatctttgcctcaatggtttccacctgggcctgattgcgcaaaccaaaaagctgctcccgcagggaactatcataattggccagcagtgtttgcgttacttccagcaccgtccacaataccaccagagcacagagtacgatgagagtccatttatgttttctgacgaaggtcatagtgatccccctttctcttcataggtagcataaattggttatatatattttatcacgctgccaaagaaaagaaataggcaatatttacaaatcggagccatgggatttggatagaaaaagggccggcaaataccggcccttttggagtgcaagggagcggcggctcgccgcccggcccttttgaaattattctttcttttcggggatatccagagcgatgctcagttccttcagctgcttttcgtccacaggagaaggacaatgcatcatcaggtcgctggcgttctgcaccttggggaaagcgatcacatcccggatgctgtcccgtccggccatgagcatcaccagccggtccaggccataggccaggccgccgtgaggaggtgcgccatagcggaatgcttcgatcatatggccaaaacgctcctggatgtcggcttcttcaaagcccagggctttgaacatccgctgctgcacatcgctgcggtggatacggatggagccgccgcccaactcggtgccgttgagcacaatgtcataggccttggcccgcatggcgatggggttttgttcaaacaagggcagatcctcgtccttgggagcggtgaagggatggtgcttggcataaagccgcttcttcccttcgtcgtcctcgccgtactcgaagagggggaaatcggtgacccacagcagcttgtaaaccccttcggggataacatccatccgtcgggccacttcgcaccggagcatacccagtgcattgagggcggtctcccggtctgcgtcggccacgatgagcaccaggtctcccttccctgccccggccttttccagcagagcgtccatggtctccggcttcaggaacttggcaaaggaagaactcagctcaccgttttcgttgaccttggcccaggccaggcccttcacccgataggtcttgacgaactcggtcaggctgtcgatctccttgcggctgaatttggcgccgccttcgatcttgatgccccgcacagtgccgccctgctccaatgcgccgtcaaagacgccgaagccgcagcccttcaccgtttccgacagatcaaagatctcatagccgaagcgcaggtcgggcttgtcggagccaaagcgctccatggcctcctggtagggcatccgctgaatgggcagagtgatgtccacatccagcacttctttaaacacccgcttgaggaagccttcgttgacggccattacatcttcctggtccacaaaggacatttccaggtcgatctgggtgaattccggctgacggtcggcccgcagatcctcgtcccggaagcagcggacgatctggatataccggtcaaagccggagagcatcagcagctgcttgtactgctgaggggactggggcagagcgtaaaactcgccgggatgcacccgggaaggcaccagatagtcccgggccccttcgggggtggacttggtgagcatgggggtttcgatctccaggaagccctgctcgtcaaaatactgccgggccacatgggcgatcttgtggcgcagagccagggacttctgcaaagaaggacggcgcaggtccagataacggtatttcagacgcagggcgtcattcaccgtggcctcgtcgctgatctcaaagggcggggtgtcggccttttcgtagatttccaggctgtcggccaggatctcaatgcggccggtggggatcttgtcgttgatggaagagcgctggcgcaccacgccttcgatcttcagagtgtattccgagcgaacggtgaaagccagatcaaacagctctttgttgtcggcctcgtcaaagacgcactggacaatgccttcccgatcccgcaggtcaatgaagatcaggccgcccaggtcccgcatacgggcgcaccagccgcagacggtgacccgctgcccgatgtgctcttcccgcagggagccgcagtaatgtcgttgagggttgagaaaaatcgacataaaaacatctccttatggtgataattgtttattcttccggacggatgggcttgccctggctgagaagggcgattttggaaagcagccagcccgaggcctgctcttggggaatggtctcctgctcccctgtccgcatgttcttgatggaaacggcggcggcgttgacctcatcctcgcccaggaagaggacaaagggcactttcagcttgtccgcatagctcatcttggctttgaatttcttctgctcggtgtaaagctgggtgcggatgtttgcctgccgcagctgggtggccagagagatggccggactaaggtcctcggtcatgggcagaatcagcacatccgccggagcggtgagcagctcgtcattgagcaggccctgctcctccagcacataaaacagccgggtcaggccgatggaaatgccaacgccgggcagctgtttgtcggtgtaaaacgccgccaggttgtcatagcggccgccggagcagatggagccgatttccggatgccgggtcatctgggtctcataaacggtgccggtgtaatagtccaggccccgggcaatggtcaggtccactttgaagtgggtctccggtacgccgaagtctcccatatggcgcaccacctgggaaagctcctggatgccggtgtccagcagctcgttctggcccttcagcttttccagagcttccatgggatcggcgctttccagcacttccagaagcttggaggcggcatcttccgccacggcaaactcgccggtgagcacttccagcaccttttcttttccgatcttctccagcttgtcgatggtgcgcatcacatcggtggccttgtcccccagccccagcagatcaaacagaccgctgagcaccttccggttgttcagccggatctggaaatcttcaaggcccagagcggtgaaggtgcggtagatcaccgaggggatctcggcttcgcacagaatgtccagcttgccatcgccgatgatgtcgatgtccgcctggtaaaactcccggaagcgtccacgctggggccgctcgccccggtagaccttgccgatctgataccggcggaaaggaaatgccaggtcgttatagtgaagggccacatatttggccaggggcacggtgagatcaaagcggagagccagatcgctgtcccccttctggaagcggtaaatctgcttttcggtgtcgccgccgcccttggccagcagcacttcggcggcctcgatcaccggcgtgtccagaccggtgaagccatacagctcatagctttggcgcagaatgtccatcatccagttcatctgggcctgccggtgaggcagaagctccataaaaccggaaagggtgcggggtttcattttgctcatagtccttctcctgttcttttgagagaaataaaaaacgccttcgtccctcacatgggacgaaagcgcagtctttcgtggtgccacccaatttcggcggaaaaccgcccttttgatgcctcaagggtgcgggaggctgccgcaggcgtctccgcccgccgttccggcgctgtcttccccgggtcctttccgcaaaacgctttcagccagggcgtttctctctgctgcggcggtgaccggatactaagtcgccttcatcacggtgcttggggatattctatcctttttgcaagggaaagtcaagagccggaagagaagcattgttgaaaaaaactggaggatatggtaatatgattgcacaatgaaacagaaaggaagatgcttgatgaaaaaaacatggtctatgctgggccgccggatgacggcactgctggcttccatggtgctgctggccggtgtgctgccggtgcaggccgcaggactccagatgcccgcagccaaaaaggcacagatggaagtgccctccgattggctgtcggtgaatgtgtattcctccctcaaggatgtgaaggcggaggatgtgaaggtcaccgtcacctatgacggctacctgggcagcctgaaggcctctgacctggggctcaagggagatggagaagttcccgtgctcaaggaaggctcccacatccagtttgagatccagcatgaaaaccccatgacctattataatttctgctatgacggcattgttgtgccggaagatatgcagcccatgggctgggatgactgcggcggcggtcagatctattacggatcggacagcgagggcagcttccccatccaggtctatggcacaggaaaggaaaaccacagcaccgcccaggccgccggtattgtcaacatggaggatttcggcacttatctgggaaatggcacctactcctattcggctgtcaacggcctggtggactatgccttccacagccaggaggcccgggatgcaggcggcaattaccagtacaatgactacaccatcaactatgcactgggtgcggctctgaccatcaatgagcagcaggtggaagagatggaaaagaccggaaccatgaccttcctggccggaacacctgcggagtacaagacggcctatcccggcctgaaggagctgctgagcaacgcagagaacgctccttccttctgggcggaaaaggaagtggcggcggccaaggaggccggtctggttcccgctttggtggatgaccccgcctatcaggacagcaccacccgggagcagtttgcccagctgattgttcagatgattactgtggccaccggcaaggaaatggaagccgccccggccggcacattccaggacactgacaacgaagcagtgcgcaaggcttaccaggccggcatcatcaacggcatgggcgacggcatctttgctcccaagcagactatgacaagagagcagatggccaccatgatccatcgggccatctcctacatcgaaaaggagaccggcgtcaagctgctgaccaaacccgctgtgatccagggctatatcgatgaaaaccaggtatccgattgggccgcagaaggcatgaaggcgctggtagccaatggcatcatcaatggcacatcggacaccaccctggctcccaaggccccctgcaccgtggagcaaggcattctgcttctgtaccggctctatgaaaagatctgatttctgctaactgtcaaaaataccccggttgcaaaccggggtatttttgacccctatggttgatgaaaattttcaaatctggtaaaataaagtcacgaaatcacagagaggggtgcaaggaatgaagaagatggacaaacggaaaaaagttcggtggattgccgctttggtggtgctgcttttgctccttgtgctctatgtgcctcgcccgttgtttttaaagggacagcaggtggataccatcttgtatcgggcgccagagtgggatacgctccatgtttattatcccattcagggagtggaacaggagcttcctcaggatgctttggaaagtattttgaaaaaagcctgggttgctccccattttctgccctttgagaggccgaaaacctttccccagggagccgtgacctatatgctcactctggaggatggccggaccatccttctgggcgaaatgaaccggctggaaatcgatgtgtttggaagttactgccgttattacaccatcctgaacgaagatgagctgatggaagaactgaacgccctgctcaagccggaggaaaaggagaacctgccctccgttgtggcgggtgaagtggatgaatgatgaaaaaacgccgcctgtatctcaggcggcgttttttattatttgttgtttttgggattgacgatatcacgccaggccaggtcgccccggatcaggccctggatgaggacttccgccgtggccacattggtggcaaaggggatgttgttcatgtcgcacagacgctgcaggttggtgaaatcggaatcgccgctgtatttgtccagagggtcccggaagatcagcaccatgtccagttcgttgtaggccgcccgtgcggccacctgctcatcgccgccgctgatgccgggcagcaggcagttgaccttcagccctgtggcctccatgatcagcttaccggtggtaccggtggcgcacagctcatgctgggagagaacgccgcaataggcgatgcagaactgaaccatcagctctttttttctgttttgcgcaatgatggcgatattcataatctattctcactccgtttctccgatctgtatggaaagccgggagaccccggctcttttttcaaagtttcatcagccgcaccttttcccccttcaggcggcgggcgatgttctgataggcggtgacagccgggccttcggaatagagcatcagcaccttcccggcattgccgcaggcgatgatatcccggtcctcgggcaccacccccaaaagacccaggccggaaagatccatggcccggtcaatgttcaccatatccccctgttcgatcattcccgggcgcacccggttgaccacgatgcgcacattgtccatcttttcccggtagaagatctgggc

SEQ ID NO: 1571 - DNA, 4581 bp, Unknown
  16S sequences of unknown bacteria
gagcgggtgatgggaatcgaacccacgtatccagcttggaaggctggtgttctaccattgaactacacccgcgtgtttcgcaacgcaactatactatcacagagcacctgttttgtcaagcggttttttaagaaaattttatttttttcttcgggcgggtgataagagcttttttatttatttaatgtcagtttaaatgcggcaagcgtgtttttcatgagggttgcaattgtcatggggccgacccctccggggacgggcgtgatatatgacgctttttgcgaaacgctttcaaaatccacgtctccgcagagcttaccctcgctgtttctgttaatgccgacatcgattacgacggcgccgtccttgaccatatccgccgtgacaaatcccgcctttcccacggctgcgataataatatcggcattcttgcatttttctttaatatttgcggttttagagtggcaaacagttacggtggcatttgccgcaagcatgagcattgccatcggttttcccacaatattgctgcgtccgattataacgcaatccttgccgcaggtttctatgttatatttctttagcatttccattactccggcgggggtgcagggaagaaaatccgggtttccgatcataatttttcccacgttcacggggtggaacgcatccacatccttgcttggaacaattgaatttattatatgttcttcgtttatgtgcttaggaagcggcagctgaaccaaaattccgtttacggccgagtcgttgttgagaacgtttatcaagctcaaaagctcctcctcggttgtgttctcgtcgagaagatattcgagtgattttattccgcagtattcacaggcctttttcttgttgccgacatataccttggacgcgggatcgtttcccacaagcacaacggcaaggcaggggacaaaaccgctttttttaagctgctcaacctcatttttgacctcgtctttaaccgccgccgaaacggcttttccgtcgataattgtcattttaatgtcacctctgacttctttgcatttatgttatgtcttataatcgcaattgcggcaattcctccgacaacgcatactgcggccacaatgcgggaaatcttaaaacttccgatcatgagactgtccgttctgaccgattcgataaaaaacctgccgagaccgtaccagacgatgtactgtaaaaaggtttcgcccttgaaagcgcggtgcttgctcagaaagtgcagcagtataaatcccgcaaagcaccaaagtgactcataaagaaaacaggggtggacgggggaaagcgggtcgacggtcactccttgggatgaaagcgcgctctgaaccgatgtttttgacagatagtttattgtgccgttgcttatcattccccagggcattgaagtgttgctgccgaaagcttcctggttaataaaatttccccaacggccgattgcctgcccgagaagaaggccgatgccggcaagatcaaacattgtaggcatatttaccttttttatcttgcacataattccgccgaacacgaccgctccgatgacggcaccgtatatggcaaggccgccgtcgtgtatgctgattgcttccttgaaggaatgataactgtcaagggaggtgagaacatagtatgctcttgcgcaaattatggcgcaaaccgacccgacgagcacaacgtctatcatggggtcctgcttgattccgaaatagggggctcggcggaaagcgtaaataatggcaagtaaaaatcccatcgcaatgagaattccgtaccaatagatctgaaatccgccgatttcaaaggcgactcgggaaaaggaaaattcaattcccaaaatcgagcctgtcataaccgtatccatttttattcctcgctttttatcggttcgatgaccgacatacaaagacggtcaaaatcaaatgacgtttttgcccgctcgttaagatcgttcaccgtcattttttcgtaaatctcggcttcgtcaaaaagcccgcttgacgcacaggcgcagtttgtcagcatatcgccgacgatttccacattgttgaaattcataacatagttgccgtagaactgacgtctgacaagctcgaatttttccggctcaacgcccttttcgcacacctcgcgtatacggttcttgattttttccgaaagtgcggcgggatccttgctttctccgctgaaaagaacagaggcgaaatttctgccctcaaaataggaggcagagaattccttattgataagcccctcgttcataagctcgttgtaaaaatccgtttgcgagcccattatgatttcaagaagcatttcggtttccacacgctctttgaccgagcggtagcctacgcagtcctgcttgaatccgagagcaaaaagcggaagagcgacgggcatttgctgtgaaatataaggagctacaacctccgacggttcgtcgtagggtttttcctcgatttcctttttctcaacatcgcgaagttccttttcgacggcgcagagaaccttgtcggtgtcaacgtttccgcacacggttataaacatattgttgagattataaaatgtgtcatagcacttataaagcaaatcggcattgattttcgctatggtttcggcggttcccgcaatgttgattttaacgggattgtttttatacattatcgtgaaaagattgagaagcagaacccacgagggagaatcgtcatacatactgatctcctgtccgattatgccttgttcttttctcacggtttcctcggtgaaatatgggtgctgaacaaaatcaagcagaatgtcaaaggaatcgaaaaaacggtcggtgcaggaaaagaggtaacaggtgcggtcaaaagaggtgtaggcgttggcagaagcaccggtttttgaatagcgggtaaaggcgtcaccgtcctcgctttcgaaaagcttgtgctcgagatagtgcgctatgccttcgggaacctcggtccattccttttcgcccttaagacggaacgcgttgtcaatggagccgtatcttgttccgaaaacggcataggctccgcgaaaatcctttttctcgcagacatagattttgagaccgcttttgtgagtggcaagggtgtatttttcaccgatttttttgttttcaaaaatctgcttttccattagtttttctcctccttacccttaagaacgtaaaccgtatcgaggcttatgccctttgcggcggcgacgatttgttccttggtgaccgcacatatttgttcgatgaattccgacggagtgataagctcgctgtcgagaaggcgtgaggcgtaccagccctctattccgccgcttgtatcctcaaccgagcgtattgcgtcggaaagaccgatttttgatgcggttattacatcgtcgtcgaaatctccgttcttcataaactcaagctgatcgaggataccctttttcgagtcctcaagattttcgatttctatgccgctgtcaacgcagagtattcctttaagtgaataaaggcgtgcggcacagtaatagcaaagactcattttttctcttacgacggtgaaaagcttggaatagggagcgccgccgaaaatatcggtcataacgcgcagcggcgcaatgttttccttcgccgaggatgcggcggttctgaatcccatgacaagcttgccttgagaaatttccattttctcggtatattctttgacggtttcggggattttaggttcaaaatcggccgctattttaacgggccggcggtcaagcttttcaaaagcgtttttaaaggattcgaatatcggctcggcgtcattctttcccacgttgattatatacaccggagcggtttcgagaagattttcccaaaagtcataaagctcttcgggagtgattttttccaccgcctgctcctttcgcatgattccgaaaggctcgttttcacacattttttcaagggctttggttatacaatatccgcgtttttcgtttatcagcgcacggatttcttccttaacaagacgtttttccacgttaaaatcatcgagcggaaaggcttttccgttcaaattcgggcggaaaattgcggatttaagcaaatcgcaggtttcggaggccacactttcctttgaaagggcatattcgtcagagagggaaatgcaggaaaatttaagaatcatattgtcgccgcagcgcatgaccgacgcattcaaatcggctccgtagagaaagttgaggcgttctctcaaggccttgggcgagttgtaatcggccgttgaacggcagatgagctttgcaagcagcgatgcacaggcggtgttttgctcggttatcggcatggcaaaacaaacggccgtgcgggcggttttgaatttcgaggtcttaatgtttataccccaaagaccctccgacagagtcttttttatatttgaagatttcaaagcaaattcctccgatacaaaaagtagtattattatacaataaaaattctttcagttcaagcgtttaaagggaattttgattaccacccgccatgcagccgagttctggatgatcgagccggagatggct

SEQ ID NO: 1572 - DNA, 4404 bp, Unknown
  16S sequences of unknown bacteria
gatctgcagaacaaggtcgacccttacctgcgcccgctgtatgacgccctgtttgacatgctgggctcggagacctacctcaaatatctcgagcggggcaatattgaggtcgcgcccctggcctacatgcgcggccgcacgctggacgacagctttatcatcctcgacgaggcccagaatacgacccgggagcagatgaaaatgttcctgacccgcctgggcttcaactccaagatcgtcatcaccggcgatatcacccagatcgacctcccggcggacaagaccagcggcctgaaggacgcggtgcgggtgctggagcatatcccggatatcgccatctgccgcctgggcgccagcgacgtcgtccggcacgccctggtgcaaaagatcgtcgccgcctacgacagcttcgagcagcgccgcccgtcgggcaagctgccgccgaaaacatatcacgcaaagaagaaggggtccgtatgaaacataaaattgtcatcgcattccaggctcgcacgctgcggcggctcagcctgagcttgtacctcaaaaaatgcatccgcaccgcactggcacaggagcatgtcccggcggcgtgcgagataagcgtcctcctcaccgatgacgacggcatccgcgccatcaaccaggcccagcggcagatcgaccgggcgacggacgtgctctccttccccatgttccacttcacccccggccggctgccggcggactttgccgcaaaagccgacccggccacggggcttgtccccctgggggatatggccatctccctggagcgggtccgggcccaggcgaaggaatacgggcactcggtgcagcgggagctgggctatctgaccgtccactccgtgctgcatctgctggggtatgaccatctggacgagggccccatgaaaaagcagatgcgcgcccgggaagaggccatcatggccgagatcgttttagagagataaggagcgcaagcatgatcgaaaaatccgctatgatcaccattgcagggcggccgaatgtcggcaaatccaccctgctcaacgccctggtgggcgaaaagatcgccatcgtctccaacaagccgcagacgacgcgcaaccgcatttccgccatcctgaaccggggcgatacccagttcgtcttcctcgacacgccgggcttccacaagccccggacaaagctgggggactacatggtcggcgtcgtgaatgagtcggtcagcgatgtcgacgcggtcattctgatcgtcgagcccatcgcgggggcgggcaagcaggaggaggcgctcattgcccagctgcacaagcagaacgccccggcgctgctggtcatcaacaagatcgacaccgtggaaaaggacacgctgctggaggtcatcgcctcctaccagggcctttaccccttcgacgcatgcatccccatcagcgccaagcggcgcgacgggctgcaggagctgctgcaggagctggaccgctacgctgtccccggcccgcagctcttcccggacgatatgatcaccgaccagccggagcgccagatcgtcgcggagatcatccgggagaagatgctctggaacctggagcgggagatcccccacgggaccgccgtcgagatcacgaaattctcggagcgggacgacggcgtcatcgagatcgacgcgacgatctactgcgagaaggccagccacaagggcattatcatcggcaagcagggcgcgatgctgaaaaagatcagcaccatggcccgccatgactgcgagcgctttttgggcgcgaaaatttacctgcagacctgggtcaaggtcaaggaaaactggcgggataacccgaacctcatccgcaacttcggctatcaccaagaccgctgacaggaggcaccatggaacacaagattttagaccgcagccagcaggacccggccaattgctgggcgctggaggacctctacgccacccccgccgactgggagcgggacctggccgaattaaaagacctgacgggcaagctcgccgggttctccggcgtcttcacgacctcggcggaccagctgctggcgctgctgcagctggacgactccctctcggtcctgctggacaagctggccaattacgcccagcgccgcagcgatgaggacacccgcatcggcgcaaaccaggagctggtcagccgcatcaccgccgcctgggtcgatctctccgccgccgcggcgtttctcacgccggagctgctggagctgccggacgaaacgctggaggactattaccgccagtgcccggcgctggaggtctaccgctggcatatctataacatccgccgccagaaggcccatacgctctccaaggcagaggagcggctgctggccgccgccggggagatggcaaacgcgccggatacgatctattccatgctggcagacgcggacctgacgttccccgatgtccaggacgccgcaggcgcggcgcacccgctgacccaggggacctatgtcagctacctggaaagcacggaccgcacgctgcgcaaaaacgcctttaccgccatgtaccaggtctatggcggcgtgcagaatacctgcgctgccgtcctggcggcccaggtcaagcagctgcagttttttgccgccagccgccgctatgcatcgccgctggaggccgcgctggacggcacccatgtgccggtcagcgtctatgagaacctgataaagactgtccacgagaatctggacaagctgcaccgctatgtccgcctgcggaaggaaaagctgggggtcgacgagctgcacatgtatgatctctacgcccccctggccaagggcccggcgcagcgcatcgactttaaccaggcgaagcagaccgtcgcccaggccctggccccgctgggcgaggcctacggcaaaattttgcaggagggcttccagaaccggtggatcgacgtctatgagaaccccggcaagcgctccggcgcctactccgccggggcccgggtgcacccctacgtcctgctgaattacaccggcacgctggacagccagttcaccctggcccacgagatgggccacgccatccactcctacctctccaaccggacgcagcccgtcgtctatgccgactatgtgattttcgtcgcagaagtcgcctcgacgtgcaacgaggcgctgctgatggagcatctgctctcccgcacgagtgataagcagcagcgggcgtatcttctcaaccacttcctggagcagtttaaggggacactgtaccggcagacgatgtttgccgagtttgagctgctgctggggaagctgaaccaggcgggccaggcgctgaccgcggagcggctctgccaggagtatctggccctgaaccggcagtatttcggcgacggcatcgtgatcgacccggccatcgccctggagtgggcccgcatcccgcatttttactacaactattacgtcttccagtacgccaccggctatgccgcggccattgcgctctcgcggcgcattctgcgggagggcaagcccgcggtggaggattatctgcgctttttgtccggcggctgcagccaggaccccatcgaccttttgaagattgccggcgtcgatatgagcagccccgcgccggtgcagcaggcgctggacctcttcggccagctgctcgatgaaatggaggcgctttgaccatggccatcgacgaggcgttctacctccccaccctgcacaccttcgccatgaacaacggcttcaccggctcctacggccgcctgcgctttaagatcacgccccatgtggaaatgcgcacgccgaaggaagtggattttgaagccagcagcatccgcgccgagtactggcacggcccgctgtgctatgaaaaaagcgagattcaggacgagaagaccttccccatgtccgaagcaggccgcactgccctacgcacgtggctttgggagaacagataatcaaacgagactacgctgcataagctcgcggcgcaaattctgcgagacttttttgacagactgagaccggctgactgcgctgcagtcagccggtctcagcgtctatcgtgcgcttcttcacagtaggaaagccttgcttcttcctgcgggcctgcttcttctcgcggtgctgcctttgcgtttcttagaagatgccaaaggagcgctgttggcaccctgttctgatggtatcttcgacattcggttacagcgctatcacaatggagaaagcgccgcaagggtcaagacccttgcggcgccaggagtggaccgcagcaatggacgggaaagaacatcactgcggtgcggtatcaggaatgagaacgataggattagagagagagattactcttcgacagcaataacgacgccggaaccgacggtacggccgccttcacggatagcgaag

SEQ ID NO: 1573 - DNA, 5057 bp, Unknown
  16S sequences of unknown bacteria
aaaggaaaaggtatattgtagtgaccgctagatgagtcttttacaatataccaggagaaacaggatgaaaaagaaaaagctgcttaccgcgctgacggcgctgtgcatgggcatctcttccttatttccaggctttcgtccaatgccggtcgaagccagtgaacaaggggatgtgcgtgtggcgacctttaatatcgcggcgaccagaaatgcaagcattgcggaattaagcagcgaaatgcaggaatacggcatcgagcttgccggtattcaggaagtggatgtcaatacttcccgcaatccgatcgacatgatggaggaatttatcaatgcgggatatttcacggacgatcatttccaaaaagcgatcgactatggaggaggagaatacggaatcggcatcctctctacatcagcgttgagcgataaaagcggcggcgcgctggtcagcgaaggcatcagcgaggccagagcttatgcgagagccgtctatatgacagcggacggcaaagaaattgccttctacaacacgcatctgacgcatgagaataaagatacccgtcagcgtcagctggcgcaggtgctgcagatcatggatgaagatccgactgagtacaaagtgctgactggagacttcaatacagacactgatctgagcgagaattatccgatgctcagaaattacgatatcgccaatggctatgatggcgtgtggtacgagacttgcgatgatgaggaaatcacgagcaaggccattgacaatatcatcgtttcccgcaacatcgagatcgtatcggtgggcatggatcaaaatctgctttcagatcaccacatgctgtatgcggatctgaacctgctggatgaagcacagccttccacacagctcatggaccgtctggtcgaagacgcgcaggctgtgaatgcggaagagtatacggaagaaagctatgcggcagtgagcgaagctttgagcgcagctgaagctgtggataagacgtctcaggacgctatcaacgcggtatgcgattctctgcagaacgcgatgaacgcactgatcacctcagaaacagagatcatcattaatgacgctgagaccggaacagggctgaatcaattcaattatgtcggcgcatgggagaccagcaccggctacccagatcagttctacaatggtgatgagcactggttcaattttgcccgttatcaggaaggggacacgatcccttacttcgagatccgttttgaaggtgtcggcatcgagatctatggaaacaaagatacggtaaacggcatctatgagatctatatcgatgacgaatatgtcgcagatgtagatacgtatcataccgagagactgacgcagcagctgatctatggcgtagatgacctggaatatggcgaacatacgctgaagctgcagctgacacagcgcaagaatgacaatgcgacctcttcagatggtgaagtggattatgcaaaggtcatccgcgaggaggaaaatgtcgaagttccttcaacgctcaacctgatcccgaaaccgcgtgaataccgccagtacgaaggttatttcacgcttggcaacgatgcgcagatcgatgtgatcgccgatgatgcaagcatggctgagatgatcgatacggctgaatatatcgcggaagtattccgcacttctaccggttatgaactgccgatcgctgaagcagcgcaggcaggcagcggcaatatcacgctgcagctggatacagaggcgggatatgctgaagaaggctatttgatcaccacgaccgaaaatcgcgtgatcatcgaagcgggaacgaccacgggaatcttttatggcgtgcagacattgcggcagatgcttcctgcggagattgaaagcgaggagactgtcacagatactgcctggatcgttccttgctcagaactgaacgacgcgccagaatatggtttccgcagcatgatgcttgacgtgacccgtcacttctttacggtcgatcaggtcaagcgccagctggatatgctttctcagtataagatcaatacgatgcatatgcacctgagcgatgatcaaggctggcgtctggagatcaagggcgagatgtacggcgaaagtttagataagctgcgcacgatcggtgcccagacttcctgtaacactaacggcatcaaggccggacagtatacacaggaagagttcaaggagatcatcgcctatgccaatgaacggcatattcagatcatcccggaatttgatatgccaagtcatgcctgggcagcgctcgtttcactcagcttcctcaattccacagaagatggccgtccggtagctgcgggctatgacaacactcgtccgtatgaaggctgggatgtcggcttcaattcgatggaatgccgcaacgaaaagacgtatgagttcatcgatgaggtattccgtcaggtatccgagatctccccttcaccgtatattcatatcggcggtgatgaggcacatgtgacaagccacgatgattatgtttatttcatgaatcgggtgaccgagatcgccaagaaatatggcaagacgccgatcggatggcagaattacgatacggcggttgaggatccagaaggtacggtgacacagttctggtctacaggcaatgccagattcgaagaaggaatcaactatgtcgtatgtccggccgaccacgcatatatggatatgaaatatgatgatgattgcccatatggtctggagtgggcaacacataacccggtagatgattcctataactgggatccgaccgactatggatcaaaggatcagatcgtcggtgtggagactgctttgtttacagagacgatcgcgacagatgaagcgctggattacatgatctatccggacagcgaaggaagaccgcagctgggatgaatacaagatgagactggcaacgcatgatgcgcgtctcgagctgcagggaatcggctacaagcgtgatccgatgatctggacaagtccggtcaatttccgtatgaccttagatgaaggcgaaggtacagaagcagattcagtcgaaggtacatacagcggcacgctgaatgagggcgtgacctggaccgaaggtaaatatggctctgctttgcatcttgacggcaccagcggctatatcgatatcggcgcgccggatatccagggtgaatggaccatcggcatgtgggtaaaccgcgaagccgcggaaggcaataatgccgcactgatctctggaagcgaaggcgagctgaaggtcgaacagtatgaagatacgaaaaaagtcggtatcaccaaatatggagagactgatgcgtcatttgattatgagctgccgatcggagaatgggtgcatctggctttcactggcacagagtcaggaacagatctgtatgtcaacggcgagcacagcggacatcttgatgtcactatcgctggtccggccaatcgaatcggcgcaaactccaggagcggactggccgatctgggctatatgaaaggctcaatcgatgatattcaagtttatgatcatctgctcagcgctgaagaaatcaaggaaatgatgaaagatccttatggttttggcgaagaggcatactggacgatgaacgaaggtgaaggtgagacgatcactgacacgagcggaaacaatgtcggtatactgaccaatgtgacatgggcagaaggacacgccggcagcgcattgtctttttacggcgagggctatgtcgatctgggataccgtgacatcgtcggtgactggacgatcggcctgtgggtcaatgcaggagagacaaccggcagcaatgcggtgctcgtatctggaaaccagggagagatcaagctggatcagtgggaaaacaccggcaaggtcggcatcacagaattcggcgtagaagactatacgttcaactatcgtgcgccgatcggagaatgggtgcatctggcttttgtctctgatggagaaggaacgacgctgtatgtcaatggagaagtccaggatcatctggatgttgcaatcaacggaccgtcagcccgtctgggcgcaaacggcgtcagcggtctggcagataccggctgcatgagcggtctgatggacgatgtacgtatctatacacgcgcgctgagcgaagctgaagttgcggagatcgcgggtgtcaaacatgaagatacgacattagctaagaccatcctgaagagcgcgatcgacagtgcggatgaagtcatggcggctgatgattatgagctgatcgtgccttctgtacgtgaaatgatcgagtctgcatatgctgaggctgttgcggtttacgaagatgagagcgcaaccgtcgcggaatgcatggacgcatggacaaatcttgccaatgcgctgcaatatgcagaattcaagggtgataagagcgaattgcaggcactggtcgatgaagtgaacgagatggatctttcaggttatacagaagagagcgttgtggcgctgaatgaagcgctgaatgccgcgcaggccgtattggatgatgaagatgccctgcaggatggcatcgatgaagcatacgatgtcctcaacgcagccatcgaagcactggaagaaatcagtgagccgtctgaaccggcaagcaaagcagcgatcgccgcattgcagatgatggtcgaaaaggctgttgcgctgggatctgaggatgcagcgctgaacgcagccatcacagctgcacaggccgtactggccaaggaagcgccgaccgcaacggaagtcgtgaccgcactgctcgatctgagcgaagcgatgcaggcgctgaacacggatgaaagtgaagacgcgctgagagcagatgtccaggcgacgatcgatttcatcaaggaaaacatcctaaccaacgtagaagggctccgtccgggcaaggtacaggcgctgatcaatgccatggacgctgcacaggatgtcgtcaacgatccggatgcaaccgcagatgagctgaaggcagcgaacagagtgatgagcaaggcagcccaggagctgtgggagatcgtgacgaaggcagagctggaagcactg

SEQ ID NO: 1574 - DNA, 1779 bp, Unknown
  16S sequences of unknown bacteria
ccgccgcagatgcccacgaaggggcagggaggctgaacgcgatcggggcttggctccagaatctcggtggtgcgggcacgcatgaacgacttgccgtcctgtacgacctcggcctcgacggtgtctcctgccacggcgccctgcacaaagacggccttgccgttgtcggcgtgcgccagcccgtcggcgccgtaggtcatcgattctatagtgagcttcatattcctgcctgtcattcgcgttgttgttcgcaccatggtagcagggaaaagcgccccgcatccgaggctttcctcaaatgcggggcgcttctacaaactgcttctacaaacgactatttcgtcttgccggtaatgagcgtcttaagacccaggccgatcagacccaggcccatgcgcacgcgaccggggcgatggcgctcgatggccttggtcttgccggcgggcttatcgcgacgggcgctcgtctcgggtgcgggcttggtgacctgcggctcgggctgaggtgcaggtgcgggctcgggctcaatgacggtcgcctggacctcttggactttgggtgctaccggctgcggctcgggctcgggggcgggtttcgcctcaatgacgggctcgggcgcggcctcggcgttgcgataggcacgctccagcagggcttcctgcgagttgaagggtttctcaccctctgcacgctccacggggacccaggtgccgtcgctcgtgaggctgcgggccttcacgttgtcgcgcagctgcatgcccatgtactcgtgcactagggcgcggcaggtggggtcgagcacggggaaggcaatctccacgcggtgctcggtgttgcgcgtcatcatgtctgccgagctcaggtaaatcatgtccgagtccacgccgaaagcatagacgcgcgcgtgctccaaaaagcgtccgacgatggagcggacatgcacgttctcggtcttgcccggaacaccgggcttgagacacgagatgccgcggatgatcatgtccacgcggactcctgcgcacgatgcctcggcgatcttgtcgataacctcgcggtcggtcagcgagttgagcttaaagaacacgcgggcgggctcgccggcaagggcgcgctggatctcgcggtcaagcccgcgcatgatgagcggtttcagtccgacgggcgccacacccaggaagcggtagtcgccgcgcaggttgcccagcgacagattgcggaagaacaggttggcgtcttcaccgatgccgggatgggctgtcatgagcataaagtcgctgtagagtttggccgtcttctcgttaaagttgccggtgcccaaaagcgtgaggcgcgttagcgccatgccctcgcgataggtgagctggcagatctttgagtggcatttaaagccctcggaaccatagatgacggtgcagccggcctcttccaggcgctcggcccactcgatgttgttctgctcgtcaaagcgggcacgaagttccatgagcaccgtgacctctttgccgttctcggcagcatcgatcagcgactcgcacaggcggctctgcttggccacgcggtagagcgtgatgcgcagcgagatgcactcggtgtcgtaggcggcctcgtgcaccagatccaggaaggggttcatggcctcgtagggataaaagagcagcttgtcgccctgcagcacctgttcgcggatggagcgggtcatatcgatggtggggttgggctgcggcttaaacggcgtaaagagcagctcgttgcgcaggtgctcgggaatcttgccctcaa

SEQ ID NO: 1575 - DNA, 3366 bp, Unknown
  16S sequences of unknown bacteria
cagaaatctgcaacaaccagaagctgacgcatccgactgttgatgggatgcagaaaattgtagaaaaaaacaacgaagcataaaaaatcccccgacagtaagatcacgcttgctgtccggggtatatttttgccttttatttactctatattttcagatatggggaacgcttgccgccacttcctgcatctctttcaggcaggcatcaaaaaacatccggtacgattcgcaccacatattccggtatacgcgctgccccgacactgctttgcggcagcgctgacagccgccacggcacaggagatagtgccggcactcccggcaggacggatccagcgcaaaggaacgttctacgaatttgatctgcacccgtgcttcatccagctgtgctacccggttctcgttcaaattgccgagccggtactcatccagcatgtaaaaatcgcagggatagacactgccatccgcttccaccacatactggataccacaggtgccatgctggtcacaggcctccggcggatagcctgcgagcatcccgatccagttttcaaactgacggatataaggctggcggttcttcttccagtcccgataccagagatgaaagaggcgaatcaagaaatctccgtatgcttccggtgaaagcacatacgcggaatcggacaaagcatgtcccatcggcggcagacaggcaatatactgctgatagttccagccgcgacggcggtagtcctcgtagatatcctcgatccgggcagccgtctgacggttcacgacagtgagaatgttgaagtcaacgccatatcgtttgagtaaatcagctgcatgcagtgcatgttcatacgttcctgatctgttcatctttaagttcggcgcattcttttctttaagcaatccatcatacgccagcttcctatgtcggtacacatcgtgcgtctcctgcacgccgtcgatcgaaagcccgatcaggaactgatgcctgacaaaaaactgacaccacttctcatttaatgcatacccgtttgtctgcaatgcattgtgaacgcgaatcccttttcgattatattttctctgcagctcgactgccttttcaaaaaatgcaagccctgccagggtcggctctccgccctggtaggaaaaggaaatctcccggtccgcattgagcatcgtcttccggatcacattctgtaaagtctcctcagacataaagccgtaggacgcctgcgcgcgctgcttcatctcatcacagtaaaagcagtaatcgcagtgcatgttgcactggccggaggccggcttgagcatgacgctaagtgagtgcataatggctcctttctgcatccttgcggctcttacttcttcagctttttttcgctcaatgtaccgctcttcgtaaaatacggcacatccagctcagaaagcttcacgacctcttccttcgcgatcgcgcgcgccacctcttcttccaggctcacaaaatcctcgtcctgctcctttgggaacatcggcggattattctcacggtagaaaaacggctgcatttcatccagcacgaccagctcatcattcttcacatagccttccagtccataccgcttctcctgctccaccaaagctgcgtggagttcctcgcgcactgcagacacgctctctgatggaaaactctgccgtaagcattcgcatgtctcttgcgcctcaagcaggtttgtcgtctcatccggatcattgatcatgtcgaacagctcctcttttccaccaccataataataggtgtacttatactgcccgttcctgatacttgcccagcgacgggagccatgcgcatgctccacatactgcttcgtccgatccttaaagccggactttttcagcacagactcccccggaaggatcgccggattcggataagccacaccagccgcgtcaagcacggtcggcaggatatcattcagatcgacaaagcgccggtcgacctcaccacctttaaatacttccggataccggacgatcaacggtacgcgcgcggagctgtcgtatggaagaaatttctgatacgtcccatagtctccgagcatttccccgtggtcacttgtgaaaatgatcagcgtattatcgtactctcccatatcctcaagctgctgcaaaatttttccgatgttgtaatctacaaatgagatcgacgcaaaatagagctcccgtgcacggcgcaggtatgcctccgtcggataatccgcgatatttttattctcctctgccagcgccgaaagcggtgtcgtcgataccttcagaggcggaagctcttttcccttatacaaatctgcccattgatccggcacatcaaacggcggatgtggcgcgataaagctgctccacaaaaagaacggacgctttcctgcattctcttttatatgatgaatgctgcggtggcttacccaggaggagccatgaagctcttccggaagcatcgagcgctgcggcagcatgtagagcagatgccgcactccgtggatactctggatatctccatagccgtgctccttcagatacagggcatattcatcgtcctgccggtgacgcggaatctcatccatcagctccagcttcgtaatgccgttatgtctgcgatacggctggaaatgcatttttccgactgcgatcgtatcgtatcctgcatcggaaagcagctgtggaaaggtcggcagatcatacggaatcacctttggattatcatcaaaatagttatcatcaaaaccatgatagcgtgccggaagtccggtgataatattgtggcgcgctgccatacagaccggattcggcgagtaggcattcggaaagctgcagccctcccgcaccagccgatccagattcggtgtgtacatatagtcgtatcccatcgcagcgatcgtgtcataacgctgctgatccgtcgtaatcagtaaaatgtttggttgtttgctcataaaaatccccccacctttgtattttaaagcggatattcgcaatccatccctgcaggtgtgctgacatatcccagcttcgctacttaaaatgccgatgccgccacattcagcacaccggccagtaccatcacccatattggattcatcttccgcttctgcaacaatacgagcgaaatcacaaaaatcataaccagcttccagttcgtcgccccaagggcaattgcctcattactgccccagaatgcgccaatcagaatcgagatacccgcagacgcaatcatcgccaccactgccggacgcagcgaattcaggatgccctgcagcatctccatattccggtatttcagatacagcttcgcaatgaccgtcacgataatacacgatggcagaatgcagcccacagtcg

SEQ ID NO: 1576 - DNA, 28685 bp, Unknown
  16S sequences of unknown bacteria
tgttcattagggtgatggtgcggtcggtgtgatttgtctgctaatgattgcagcgcggggattaagccgaacaggcttgatactcagccgatttcggtgtttattacggagttaattctattcacggtgctgtcgtcacggcggtcggtcacatataccgttttgacagcggtggaggaaagcaccgaataaaattcgcggaaaatttcgggcagcgaatggtttttgcaattcaccttcacggctgacggcaggtgcgtgtcggaaatgagtcttaaaatacttttatcaccgaaaagctcgccgacaaaaagccgagcagcttccttttccgccttttcggagacaaaaagcgtatctgcacggattatgagatttatgctttcgttctcatgagcggcgatgccgggcgaaaaaacaagcttggaggataacggcatatcctgctgaattttaattatatcaaggtaggagcagagtattcccgctgtatttcccgatacgaaggcgtcggtcggcttatcgtttttctttaaaatcccgctttccgccattttcccgagccgttcggcagcctgccgaaaaggcgcttccgacaggctgccgctgcccatatcatccgctgcgccgccgcaggaaagataaagcggagctattattccccagtaaaggctttcgttatcgccgcagagcatcgggctttcctttacaaaatccgatgaaaccgcctgatctaagcggcagggaacatcggcattttcacgcagatagggcagcttgtcaagccaaataccgtcggtttccaaaaacagcggcagaccgattaccttgccgttataaagaaaaagcagttctttaataaaattatcggtatttacaaagccgtcaagcgccgcaaggttctttgccgattcatcgctcatgcggtcggcaattaaaatatcggcgtcgctttcgttttcggcaaagccgatatttatatcgggataaaccgaattaaagctgcgggcggctctttttattgcgctgcgataatatgaatcgcagtatattttaagcgatgcgcttactgctttttcgctgccggtgcatattccgctgccgtctgtgcccttacagccgcaggaaagcagcaaaagggcaggtaaaatgcaggcaagagctttttttacggcagggaaaagcttaaacactgtcttttcctccgctttttctgtatgcaatcggttggacgccggttttctccttgaatattctgctgaaatattttgtattgtcaaagccgaccatatcgcttattctgccgacggaaaagcctgtgctcacaagcagctgctttgcgcggtcaatacggatatcaagcagataatcactgtagtttttgcctgttttctgcttaaaaacacggttatatagcttgagttagagtaaaatttttcgcccagagaggaaagcgttatattctgcgcgtagttttcttcaagatattttacaattttctgaacaagctgtgaggaattgtggttctcatattcctcaaacgacgcgtcaatatattcgttaagcgccgtaaatatcaggtctgcgccgtttcccgcttcaaattccggtgacggcaccgaaagtgcggacaactgctcgcggcacgcccgtgtgagcgcgtcggaaagctttcggcttacctcataaaccgcggccttatcggtttcggattttaagccctcaaatatattttttaatatttcgcggcattttagggaattcttttcctcaattgcctgcgtaagcttaagctcgctgccgagcggataggcaagcggtcggctgcctgaaagcttttgctttatgcggtttagggtatcacgcagctcgtcaggcgataccggctttaaaaggaaatcgaaaacgccgatttttattgcctgctttgcaaattcaaattcatcatagcctgtgagaataaccgtctctgccgacggcaggtctttttttatttcggacgccagcgttatgccgtcgcaaaaaggcattttcaaatcggttattataatatcgggcttgagcgacagaataagcggcagcgcgtcgcgcccgttttccgcttcacctgtaattgtaaagccgttgctttcccagtcgaaaagctttttcatgccgtttcttataatgctttcatcgtccacaagaaataccgtcagctttctttcgggcataaatttcagtcctcctttttaggctttttaaactgatagaccgcgcttgaatcaagggacgcgggaatcgtgaaggaaaccgacattccctcgttttcacggctttgtattataagaccgcggttatccgagaaatacagccgcagccgctcattaacattgtaaagcccgattccgtgctcggcgggcatatcgcggcggctgagcttttcggcaagcctgtcaagctcgtcgattgtcattcctctgccgttatccgctacggtgaagcttatatcccgaccctcttttttgattgttacggaaattacaagcttgtgcgaaatatccttaaagccgtgtgaaaagcagttttcgagtatcggctgcaaaagaattttaggcatatagcagctgagcgcctcttcgtcggtatcgtaaacgatttcaagcttttcctgcagccgcagctgctgcagcgatagataattctttatttgcgaaagctcctccttaacggttacgggcttatcgctgttgcggatgtgatacctgaaaagggcagacagattgagcagcgcctcggcaatgtcgtttttatcgtcgagcaccgccatcattcttatagtgtccagcgaattataaagaaaatgcggatttatctgactttgcagcatccggtatttagcctcggtctcgcgtttttccgattcggaaacggcatatatgaggttgttgagctcgcccgccagactgttgaaattatcgaaaaggtagccgaattcatcctttcgtttctgtgaaatgcgggtttcaaggtcgccgccgcttaactgcttcatggaaaactgaagcacctttatgggtcttgtgaaatagaacgataccgcggcggttatgattattatgaccgcggcgcatataaggcttaaggtcacaaggcgattaagcagtgtctgcgcgcttgcggtgatgaaattatagggcactgccgccacaaccgaccagcccgtattcgcaacggcgctgcttacaggcagatattctttcccgtttatttcggtttttccgtgcgatttcatattgcttaaaagtgatttggatatgccgtcagatgaatccgtggtgtaaaccggcttattctcgctgtcaaaaatataaaggatagtacccttgccgaaattgctcgccgcgcatatatctgcaaatgccgaaaccggacattccgaaatcacatagccggtatacatattaagccccgtgctgttttcaaaggaaacatcaagatgtctgcaggcaaccgagaaaacgcgggcatcggcggagaattcatagcttgaggttctcacgggcagaagcaccgtgccccccgttgagcttctgagcggtgcgtaataatcctcgtctatcgaaaaggcggggcggtcaaatttaccgtcggtgtaggatatcgactctccgtcaagcgaggtcactatcagcgaatacatatcctcatttgtgcgggctaccagctcaagcgcctcacgcgcccgctgctcaaggagcgccacggcggcggggtctgtttcaaattcggtgaatttgttgcgaagatattctggcacggcggcggtattgtctaccatgcgggttgtctggtcaacgcgcgatatatattccgaaaaaatcatcgctatctgctttgtcatttgggtataggtctccgacgcctcgttttcaagcgcggtattgcttgaacgaaccgtgaaaaatccgaaaattattataggtatcaaaaccgctgtcaaaaataccgacaaaagctttgtccttatagtgaccttccccgaaaagctatgatttctcatattcacctcttgaacgaatcaatttcgttcattataacgataaattgttaacgcaatgttaacaaagctgacattttatgccgccgaagtcctttattcaaaagtagtaaaaaaaagtaaccataatgtaaaaaaattgtgacgacagtttgttgtgcttaatatataataataataaagaaataaaagggatgtgtgttattttgactaacggaatcatcggtttgaggaagagaataacggcgacagtcttaagcttggttattgccttcggctcactgtccgttatttctgcttttgcggaatccgatgaagctttcaagggcttttcctactggagtgtttccggcggcgagctttccgctgtttcgggaataagcggctacggtgccggtatctcccaaaattcgggaaatgccgcaaagcttatttcggagcttatatcggtgaagtccggcaggaaatacaaggccggagtttctgtttcctcgtccgccgcaaacgcggatgccgagctgacggtagctttcttcggtgacgaagagggcgaaaacgccgtcggtgagacattaagccttgaaaaaagcagcccgacagccgatttcggcgaaataagcggcgatttcacgccgcccgagggcgcagcctatgcaaggctcattgtaagcctcggcgaaaacggcaaatccggcgatgaatacaagcttgataacgcctacctgtatatatacggtaccgcggctccgatatatgcggatgaagcggtgcccggctactcggcgggagagtgggcaagatatcccgacggcaacggtaagaaatgggaaaacaccgcatcgcgttatattgaaacggtggacgacggctgcggcggcgacggcgcactgcatattgtaaacaccggaatagagggcgatatgtggctgactgtcgtaccggacagcgttcctgcgggaagctatacggttcggatgaaggtcaagggcagcgtcacggcgccgggtcagaccttccgctttgcagattctgctcatatcgacagcggtgtcggcaatctgtttgctaaccgtgtaagctatgatgactggactgatttttcctacgattacgaatcagacggcacaaacaggtttttctttgttttcagtcagtataacggcttatcggacgtatatatagattcgcttaaggtcgttaataaggaaaccggtaaggatattttaaacggcaagggcgattttcgtcttgacggcgggtacaatcttgttgcatcaaacaatttggctaaaaacggcgattttgaggatattgtttatacatatttatccccagataaattcaacggtaattttgacggcgctgaggttaaggaggaaccgcttaaatggacgcttaacgataactatacgggcgatacgctcgtgctgtcgagcgattcgtcccacggcggcgtgcttgagatgacaaagggtgcgtccgcctcggcaggcgcgggctgggtaactcttgcgagcccgaatatctcggtcgagcaaggaacaaaataccgcttttccgcagatttaaagggaatcggcagtaatccctactatattataacggcgtactggttctttgataacggaacggcgcccgtacaggtaaagcccgcgggcggcgagggtaatttatctgacggctggaacacggttgccgccgaccttgaagcgccgcagaacgccaaggaaattcagctgcgaatcgtttttcaaggggctgcgggcgataaaatgctctttgataacgcctcgctttgtccgctcggtatgtccgcgtcactcgacggttggcaggaggcgggctattcaagccccgatcccgaaagctgctatgtaaggctcgaggataacggcaatgcggacgcgggctctgtgcatatttatcaggactatgaaaaaaataccgcccgcgcaagagcgggaatttcatatatgctgaaaggtcttgaaaacggcaagacctatgttatggagctgtggctcaagggtgcgactcagacagcgggcgatccgcttgcggcggagctttactggggtctcggcaattgggcaaaatcgggcaacggagggcttttgttcgataatgtaaattattccgaatggacgaaaatgtcctatgagtttacggtcacaaatgcccagtgggcgccgctttgcatatctcccggcggttacgccggagtcgattgctatatagacaatgtatcggtatatgataagagcgatacggcgcagaccaatcttataagcaacggcggtttttactcctattcgcagccggacacctcgcggcagctgattcaaaacggcgattttgaaaatatgcgcgtgctgtctgcccccggttggagcttctcgggcaagaccgattatgacaaggcttcatcggttatttctctcggcgataattccgcagcggtttcctaccgctacaatgttgatggcggacaaattttccgcaccgcggtaaacggcagaggcggaaggcttaaaataacctttgataccggcaaggaatgtgagcctgaaagctcgggcggcatatttattgtgccggacggcgcaaaatatatgcgtgtttcatatatatcggaaagcagcgcaacgcttaaaggtatcgcgctcacgctgcttgaaaatcccgaaaactacgattttgaaattaaagatcccgaaagcgaacgaccgcttaactggcagtattactgcggtgaaacggattcgggcagctattcgcttaaatatgccgcgaatgacggcgtgaacggcagcggtgcaatgcgcctgaccgcagaaatagacaatgatggctttgctgtggcttacggcaagcgtatgagcgcacaagcaaacggcgtttatcgcgttaccttccaaggaaaatactcgggggacgaaataagcgtttacccgtatatcagaacctataataaaaagggcaacgatacaacggagacatcgtcctataactggctgaccgccgcaaattcgcagaataacgacggcgaatggcacagctataccgccgatttcacggcaggcggcgacaccgcattttatgaggtgcgctttgaggtgcgcgcaaaaacggcgggagcaaagcttttattcgataatatttcggttgtttatttgggtgattcgaccgacccgaacctcgattttgagtcgggtgaaaacggcgaaaaggtattcaactggaatatgtatgagcgccgcgagaacccgaataagcccggtgaatttgaagagggcagctttggggcgtacaccgcggtaaaggcggagggcgcatcaaaggacggcagcgccgcggtgcatataagcaagccgcaggcaggcgatgttcagctttatctgcaaagcattatgcttgaggtcggcggcaataccgattatcttttaagctatgacgcaatggcgcagggcaacaagaagggctcgctgcagatttgcgtcaggcagtataaaaacgcttacggcgataatgtcaaggatgaaaccgaggcattcaaatgggtgaccgacgcatacgaatacggctcgtttgactggaagagctgcggcggtgcttttaaaaccgcaaaggacgcgaagttcgttaagatatggctggtttcaaacacctcggacgcgatggatatgtatatcgataatgtggcgctcacaaaaaccgagagcattgacgacccgaacctcgattttgaatatacagcaggcggcaagccgcttaactggagctatgtaacgtccgacggtatcgcaagcatttcggcggataaatccgtttactaccgtggcagcagctcactgcatattgaaaagcagtacagcagaataaactacaccaccgcgaccatggcaaagcggataaatgtcaacgcgggcgacagaatcgagtttgttatccatatgcgcagccgtaatgcggtgtcgggtgcgtttgcagcctcgctttcgggctataattcctcgggcaagcttattcaaagctggaccgggcaggacagaccgcttaattcgggcagtaacctgagcgactggcaggaatacagaatagtctataccgttccgaaaaatgttcgcagtgtggcgcttgccatgcgaataggcggcagaaaagccgatgtgtactttgattcgatagaatactacaactacaccgaaagcaacgacacggtttatgccgaggattttgcatctccctcatccgacggaatgttcggcggctttaaaaagaccgatgttaagggcaatccctccttcggcactgcgggcgaagcgataatttcgggcggctcgggcgacaacgcggctatagaaaagaaaatagatattataaataccgattattcttatcagtttaccgcgcattacagaaccacgggcactgcagtaggtaaattgagtcttacaggctataactggaaaaacgagtcggtgggagcggttgttgaccgcgaaatctcatcagccccgacttcaaccgaaatcaaggttgattttacggcgataaacgctgcgtattatgttctgcggtttgaaaaaaccggtggcgacggcggcgttgcattgaacgatgtgaccgtgcgcaccaccgcggagccgagcgtagacctaggctgggagggcgcgtggatagtccatcccgcggattacgacacaatagagagccagaaaaacaacgagcgctactattattaccgccaggaaataaatcttgaaagcaccgtgaaatcggcacagatgcagataaccgcggacgacagagccgatgtttacataaacggcgaaaaggtttacgaggagacccgcaccggagacacctggagcctgcctgtcacccttgatattacggaatatctgcaaaagggtaaaaatgttatcgcggttcggttgtataacggcgtttacagatacgcgcttttatacgacggaatagtgaagatggataacgattccgttctgcgcttctacaccgatgaaagcgtaaatgtagcgcgcgaatcgataggggagaacagcaccccgaatccgcagtggagcgaatccgacgccgataactttatgaagcccgattatgatatgtcaacaggcggctggacaaaggcggaaatttacgctaatgtcggcagcggcggctggggcgcgatcgacttcgatttttcggaatattcggattataaaatagaaacaaacgaattcaccttcccgaaaaacacaatttatgcgggcgacacggtgacggttacggctactcttaaaattgccgagaagctgcccgaagcttcaagctttaaaatatatttctggaagcgaaattcaaccagccgtatttgcacgggaacaataacccttgcaaacggcaaaaccacaaagtcatggcctaccggtaaggaatttaccgccgagttcgaaataaccgtgccgcagttcttggcggcgggcgattacacggtgcaatttgataacacagtggcgattgtcagcgattattacatcaacaataaggtcggaagccttaaaattgcgcagtataagcaggaggtttcaacaaagagcgaaatcaaaatgtataacggcaagccgaccgtatttgtaaacggcgtggcgcaggcgcccttgtggtacagccgccccgagcgcgatacccagtttgaccaatccgaaatggaggggctggcaagcgtgggaatagatacatctattgcatttatcctcccgcgtgaaacgctcggcgagctttggatgtccgacgggactattaaaaccgagaccatagatcagcagattttgggtacgcttgcggcaaacccgaattcgcagcttgttatggcaatcgataccacaccgccgcagtggtggctggacgctcaccccgaggagtgcgtaaagcttaacgacggcacggtgagcaaggagtccttctcctccgagctgtggaaaaaggaaacaggcgaaaaggttaccgaaataattaattaccttatgcagcagccctacgccaataatattataggctttaaaattacgggcggcaccacctacgaatggcagtggtggggaataaacggcagcacaaaggcaggcgattattcatcggtaggacttaccgccttccgtgcatggcttaaagaaaggtataaaaccgacgcggcgctgaaatccgcttggggcgacagctccgtaacgctcgcaacggctgccgttccgagtattgcggtgcgcagcgaaaccgagttcggcagcattttaagcgcaggcaagaaccgtcaggcaatagattacgagctgtttatgggtgagaagaagaccgaggcaatgctttattttgcttctcttgtgaaaaaagccacgaacaacaggattttcgtgggaacatatgcgggttatctgcttaatgttatcaactacgatatggcggcttccacctcacagacctccttccaaaagatactcgaatccgacagcattgatttcataacctgcccgtggaattacagcgagcgcgaaataggctattccggcgattatatgtcggctgtagacagcgttaccgcgcacggaaagctctatattgcggaggacgacaaccgcaaccacaccacatcaatgtttgaagcgcccgacgcgcgtgcgtccgtcggttggacgcgcaccgccgagcaatccatagagcagttaaagcgaaactttgcatatgctctttcgaagggctgcgggctttacctttacagccttgcgggcacttatttcaccgataagcagctatgggagactgcctctgccatgatgcaggaaatgaccctgtcactgggacttgaacgcaagagcgtttcggatatagcggtgttttacgatgagcagtcgcccgcgtatatgccgtattccggatctgaccttacaaatgagcttttgtataagggattgctgcttacgcagcgcaaggagctttacaacctcggtgcaccgtatgatacatacctgctcgacgacctcgaaaaggggcttgtgccggagcataagataaatattatgctctcgaccacgcaggttacagaggcagagcgccgcgcgataagcgaaaagctgcagaaaaacggcaatgttatcatctgggtgtttacatcgggtatgtccgacggcaataccacctctgttgataatctttcggctcttacgggaatgaatatgaagcttattgaaagccctaataccgagcgcaagcttatgggcacggttgaggttgaaaattacaacagctgggtaacagaggggctggcggatgtcagcttcggtgcgatagaatacagaaccttagcacccgttatagcggtggatgacgaaaccgccgtaaccctcggctatcacaccgagcaaaacggctacggaacaaacaatgtcggctttgcaatgaaggaaatgaccgacggaaagggaaatagctggacgagtatttactcggcagtgccttgtatcccggctgatattttaagaaatgtcctaaagcactgcggctgccatatttacgatgataccgcaaccgatataatttatgccgataacaattacatttccgttcattcgcttttcggcggtgaaaagacggtcacgctgccgggtaattacacggtgtacgatgtatttaaccgcaaggttattgctaaaagcgtaaacagctttacgtacagctcggataagggtgaaacaaggcttttccgcatttcgaagaatgataaaatcaagctttatttcacaagaaccgcgggcggtactgtaagccccgagggactgaatgaggcggaatacggcggaaaggtgacccttacctttaagccgaacagcgggtacaggctcggctacctgcttatagacggcgtcaaaaccaccgtaaacggcagcagctataccttcggcaacataaaggaaagccacaccgtggcggtttactacacaagactttatgaaaagctgccgcttgacgataacgacgaccctgtaaacccgaccgtgccggataacggtaataacggcaacaacggttatattgagccgaccacacccgatgtaaagcccgataacggcggcacggacgatgatgacggcagacaggcaataactaagaaaaacacgaggtattacaccaccgtttctcttaacctgcctgtaatcatagcgctctgcgccgcggcacttgcggttttggcggcaatagtaattctgcttattgttcttctcggcaaaaatatttactttacaaggaacggcaggcggatatattccgcaaaaatcaaaaagggtaccgtaaggctggataagcttaaagaaaagcgagggcttgagggaattacggcaacggttaaaaagggatacgccgcacaccacgcggggcagagcgtaaagctttccttaaacggcgcgccgcatacctcaattactttggaaaaaggcggaaacaattccgcagagctttaaaaatctttggggctccaatacagagccccaaagtaaaacccaaaaaactaaaaggagtgcaattttatgaaaaaaattctcattcgctgcatttgcattatagctgcatgcgcaaccttggcaatgtctgcagggtgcagtcttacaaagactacggtaagcagcgagaccgacgaaaccgtgagctatgtcagcggtgataaaaactcaaacactggtgcgtcctcgggcagtgccgatgcttcttccgataataagggcggggcaggcaatgttgtaagcgattcgggcgataacaccgtgcacaatgcgggtgaagtcaataactcatccgaagaaaagcttaagggtacgcttgaattacagatattcgtaggcggttacggcagcgagtgctgggaatatgccataagcgagttccagaagctgcagcccaatcttgaaataaacgcgcatcttgataccaatgttaacgcgcagatgaagacccgttgggcaaaggataacccgcccgacttcgttctgctcgacggcagcaatatgcctgcctccacctggatgagcgaaaacaagatgagagatctcagctctctttataaaaacggcaaggtctacggcacctcaacgcccataagcagccagcttaagagcggacttgtaagcacctataagaacacaggcaaaatctacgaaatgcctgttctgctttccacctacggtatgtggtacgatcagacactcttcagccaaaagggctggaacgttccgaagaattacaccgaactgcagagcttctgcaaaacggtgaaatcctcgggaatgtatccctttatctacacgggtcagtattccggctatcttgtttggggtatgcttatgccggcggtggcttccgaggctttggcgtcaaacgatacccagtatttctatgatgttgcaaacgcggcgagcgaatcagtctggagcgacgcgcgctttaaaaaggttttaaccaaaatagagacccttgcaaaagcgggatattttgacccctcggggctttcaatgaaccatatcaccagtcaggcggcgtggcttaagcacaatgcggcgctcatacccaacggcttatggcttgaaaacgaaatgaagagctcgacccccgcaagctttaaaatgcgctattatccgtcggttttgcaggatgcaggtcagaagacagctgttgttgccactgctacaagcgtaggcattgccgcaaaggcgaaaaacccgaaggcggcagaagcattcctcagattcctctataccgataaggtagcggctaaatttgcagagctttgcgccgttccgagcgcaacccgcaccgatgtttcaaaggctaaccttaccgagtccgcaaagcaggtaaacgagatgataaactcatctgaagtaacccttatttcaaaaggctctaccacctggggtagcgtggacgcaaccataaaccagtgcataaacaagctcgtttcgggcgatatgacggtggataaggttatttccgagctgcaaaaggctaccaagaaaaaagtaggataggctgacgatttacattaaaaggaatgaccgcaatgtcaaatacaaaactgaaaaagcgcagacccgcagataaatcgaaaatcgcctttttctcgcttttctgtctgccgccgcttttactttacattcttttctgcgtctacccgatcttttcatcgctttacacaagcttttttgaatggtcgggctacgatgccctgacaaaggataacttcgtaggctttcaaaactacatacaggtaataaccgattcggaatttttggcggctataaagaacgattttgttataatcctcggcaaagaaattataataatcgtgcttacaattctttttgccgtgtcgctgacccgccttaggttttcaaagcttgaaacgggcatataccgctttatcttctttatgccgaatgtgctgtcggttataatcataaccactatatggacctttgttttagacccgaacttcggtattttaaacccgctgcttaagggcgtggggctaacaaagcttattcccgaaatggggtggacctttacccaccccataggggttataacctttgtttcaagctggtgcggcataggcttatttatgcttataatgattaccgcgataaacggaataagcaaggagctgtatgaatccgccacaattgacggcgcgggcgagtggacccagctgcgctacataaccatgccggcggtgtgggagcaggcaaagtttatggttataaccatactgtatcagtcgttcagctcaagctttacaatggtgcaggcaatgctcggcagctctgtaagcgaggattcggtggttatgggcgtgttcgtttacaaaaacagctttgacagccagtggccgcaggtgggctactcctatgcggcggcaatacttatgcttataatctccgcggcggcttcctttatagtaaaccgcgttatgtcaaggggggacagtgtaaatgagtaaaaaaagaaatactccgcacctgtcccgctcggctgcggtggggcagggaataataagaatcttccttgtgctttggagcgtgactgtggcattcccggtaatatgggtgctttatacatctcttaaaagcaatcaggaatttttcgcttccccctgggcgctgccgaaaacccctcaatggggaaattttgttgacgcgtggaaggaggcaagcttcggctcatacttcttcaacagcctctttaccgtggtactgacattggtgataaccctgcttatagtgggcgctaacgcctatgttattgcgaaatacaataaccgctttataaaagggcttgaaaagttttatatggtggctatgatggtgccgtcggtgcttatgctcgtacccctttactattttgcggattcaattaaaataaccgattcgcttgtgtggctttcggtaatatacgcaatacagggcatgccattctcggtgtttatgatggcgggctttgtgcgcggaatacacaacgcgctcttagaggctgccacaatagacggcgcaagccagtttaccatattcttcaaaataatagtgccgctttcaaagccctcgctttttgttgtggcgctgctcaatataatgggcacatggaacgaatacattaccgcgctcacctttattcatgataatacaaaatacaccatggcgataggtctttcctaccttacaaattcgggaacctacgatgttaattacggcagaacctttgcgggtcttacaatagcccttgtgcctattcttataatttacgcaatattccaaaagccgctgcaaaacggtatgtcttcgggagacggcgtaaagggttgattaggctgacgagagccgaacccattacggtttcgctcgccgccttttaccaccttgcttgcgcttatttttgtaaggcgatagccttactgcaaatttcacgcttcgcctttcgaaaaaaggcggctgagagaaactcttcgacctcacaaacaaataagtttttgaaagtgtgaagacgaagaacgcagtaatactgacgtattacaagtgatgaggcaagaaaaggcaaaaaattattgtttgtaggcgtgatgagttcgactctcgtcagcctaagcaaagccgagaaatccgaacccgcctaaaacggcttaatttcggcttgtcgtcactcgcaggctataggatttacgagtcctgtcacactaaacaccgaaaggattataggaatgattaaaaaaatacttccgtgcttgttatcctttgcaattattttaagcaccttttccgcactgccgttttcggcggcggaaagcacgggcaatttaagacctgtgactattgccgacagctattccgccgacgggtggtacagaacctaccccggcggcagcgcggatacatcgacacgctatatcgaaatcgcaaaggagggcgccgacgatgtaggctcgctgcactttgtaaactcgggtaatcagggcgatatgcgcgttaagcttacaaaagcgattgctgcgggagactacagtcttaattttaaaattaagggcagcagaacctttgcggaaagtctttactttgtggaggacggaaatgacgcaggtcgggttcagctgatgcccggcgtaaagagctattccgactggacggagattaccctgccgtttacctcacgcggcggcagcacctacggctttttcttcagccagttcaatgccgcagcaagcatatatatcgataatttcaaggttttggacgcaagcggtaacgatatgctggacggcgcgggaaacttctgcacagaggatacgggcgaagaaacaagcaaaatgcagcagccgtatgagtatgtaagcagtgattactggtacagaacctacccgagcggcagcactgccgataatactgcgcattatatagaaatagccgcagacggcgcagacgacccaggctcgctgcactttgtaaacactacgcccgaaagcgatatgcgcataaatattgcgaaaacaattcctgcgggcgattatacgctgaaattcaaaataaagggcagcagaacatactccgaccagaatttatcatttgcggaatatgaatacagggatacgcccgtgcaattgatggacggcattaaaagctatgacgagtggaccgaggtaacgctgccgtttacaagccgcggcggaagtaacttcctgtttattttcagcaaatacaactggcagacaagcatatacattgataatttcaaggctttggacgcaagcggtaacgatatgctggacggcataggtaatttcaaccgtttaacgtcgggcggcgatgaatccgatattcccgaggatgttcttgcgctgaatgacagtaaaaccgcgaacagctggtataaattttccgacggtacttacacggctataaggaaagccgaaattgtgggcaacggctgctttgataacggcgctttgcatataagaaatgtaacacagggcggggatatacgcgtttgcgtaaacaagaccgttcccgcgggggaatatacgcttaaagccaacattaaaggtaaaaaaggcgtgctttccgaggctttctatttttcatcgcttagcgatacagccaacagctttaccttcttcaacaaaaacacatacgccgattggacagaggttacatcaacctttaaaacaaacggcggcagcgattttataatctttttcagccagtataacggcgattgcgatatataccttgataatctccgtattatcgataaagacggcaacgatatgttagatgggctcggcagcttttgcaccgaccccgccgtgggagatcaatcggatattcaaattataccgtcgcttatatcggggagtgctgcagggcttacagcgtccttgccggagcgctctttaataggcatattaaatgcggctgacggcgcggtgctgcttaacggcgagaaaaataccgacgttaaattcaaagcgtatgcgggcggcagcatagatatttcatacaccgcgaacgagggcgatatattatcgctcgacggtgattttaccgataattattacaaaaagcacataggtcctgtttctttcaggtattcgggcggaaaatggcaaaatcttttaactgccgataaagccgagttttatttctttgaatcattgatagaaaacagtggctttacttcgggtattgacggctgggagcaaaactctctgcctgccggcagtaaggatactatatcctccgaaaccgcaggctatgatggagcagctcttcgagtcactcacagtaaagcttcgggcgacagcgtttacaaggtaagaacaagcaaatacatacctgtaacggcgggcgcgacctataagctccgcctttatgtaaaggcgagcgggaatatgcggctcggcgcgtcgcttcgtggaaacggttcctctgctgttccgacagagtcggggcttaacacggcaattacaaacagcaccgacggctggcaacagatgaattatacctttaccctcccgcaagatgccacgcttacgggggtaaaggtgcagcttgataatgcgttttattcatccgatgccgaaatactgtatgacagcattgcgttttacagggtatgcgagccgggagatgtaaatgccgacggcagccttgatatactcgatatgatacgctttaaaaaggtcagagccggtatagcggaatatacaagccccaatgccgcagatataaacggcaacggctatataaatactattgacgcggcaatgattaaaaggcttctgctcggtcttaccgattacggctctgtgccggaggtagcaatgattgcgcctgacacggcgtattcctacaatgcttctgcaagggcttatcttaccgccgaaaatcccacggttgacgattacgccgtgcttatgaccgattcggcacaggatataaaaatagtacttgaatgtccggtagagggtgcgaaattcaaggttgaatacggtacaagggcggattactccgacgcggtaacggttaatacaaccggtaagagcatagctgttaataatcttttgagaaatacaaaatattatgtaagaataaccgccacggctaacggaattacccgacaggcggaaagctcgtttaaaaccgcagatataggtccgcgcgtaatgaccgtgggcggaattacaaatgtccgtgacctcgggggctatgaaacctctttcggaaaaaccaccttgcagggactggctttcagaggtgcgcagcttgatattaagggtacatcacgactgacggcgcagggtgctgagctgctcggcacggatattgccttggggcttgaaatagatttaagaacggcaagcgaaacgggcgggcttacaaagagcgttgttacgtcagcaaaatatctgaacagccggataggctcgtataccgcggctttttcaagcgaccaaaaggagctgttccgtcagatatttgcatcatatgcagatgtaaataattatccgatttatgttcactgcgtatacggcgcggacagaacaggcacggtatgctatattttgaacgccctgctcggtgtggacgaaaaaaccttgatacaggattatgagtttactaccttttcggacgcaggcttgcgctcggctgcaacaaatgcggaaatgaaagcatttttaagctctttctgcgcgctttcgggtgatacccctgccgaaaaagccgagaattacttgctttccataggcgtaacaagcgaggaaataagcaccattcgcggcattttcttcggggaaatacccataaattaagctctgtgcggcggatgccgcgtaaatataaaattccggcaggacgccgaaaataagtttggaggtaaatttttatgaaaaaagcgtttccatttaaaaaaaggctttccgcagtgttggcggttgttttggcagtcgccgccgcagcgggaacagcaccggcaagcgcacaggatggaacctacgcgtatagcgtgatcggtgattacggcaattttgaaggcactctttggcatttcagcgataacagcagcgaagacacgttgagctttaacgccgaaaagcagccggtcgttacaaagggttctaagtctacgggaaacgaagctacggcactgaactaccgcagggtaacgcttgcggcgggcgattatcagttatcattttcgcttaaagcttcgtcacaggcatattacatagtaagcggatacggatttgactctgcaggcaatgcagaggcgctgaaatacgaaaaaaccgcagagggcagcgtcggcacggaatggaccgatgttacggcaaactttaccgtaaacggcagctatacctcggttgaatttcgtataattcttcgcggtgctgccggcacacagataacggttgataagttagagaccaaggcgtttgaagagaaacaggaatatgcctgtgtaccctcttctgcaggttgggacggaacttataagactgaaagcccacttgctaacagctatatagagacttcatcagagggctacaaggaacccggttcattgcacttttaccagtacggcagcagcgaccgtgccgaccgtaatatttattacacactcggcggattagcggtaggaaaaacgtatacgttgaaaatggcagttaagggcgacacaagaaaaattgattgggcagttgctatgaatattgaattggcttacagtaataattcaatatgggcggaaaccaacagcaatgtattgacaataacggataattattccgattggcaagagctgagctatgatttcactgcaaataacgattcaacgcagatacggttcaacaccagtcagtacggacagatcgattgccttatcgatgatatttcggtttgcgagaaggacggcaatgttaatcttatagccaacggtggtttttatgttcccgcaaccacattaaacggttgggaagggacttataagaccgaaagcccgcttgctaacagctatatagaagcttctacagagggttacagcaatcccggttcattgcatttctatcagtacggcagcagtgaacgcgatgaccgtaatatttattacaccctcggcggattaacagtaggaaaaacgtatacgctgaaaatggcggttaaaggcgataccggtaaaaacgatcctaataatgccatgaatattgaattggctcacagtaataattcaacatgggtcagtacgggcagtactgttttaaaaccaaccgacaattactctgcttggcaagagctgagctatgatttcactgcaaataatgactcaatgcagatacgttttaataccagtaagtatgggcagattgattgccttatcgacgatatttcggtttgcgagaaggacggcaatgttaatcttatagccaacggcggtttttatgttcccgcaaccacattaaacggttgggacggatcttataagaccgaaagcccgcttgctaacagctatatagaagcttctacagagggttacagcaatcccggttcattgcatttctatcagtacggcagcagcgaccgtgccgaccgtaatatttattacaccctcggcggattaacggtaggaaaaacgtatacgttgaaaatggcagttaagggcgacacaagaaaaattgattgggcagttgctatgaatattgaattggcttacagtaataattcaatatgggcggaaaccaacagcaatgtattgacaataacggataattattccgattggcaagagctgagctatgatttcactgcaaataacgattcaacgcagatacggttcaacaccagtcagtacggacagatcgattgccttatcgatgatatttcggtttgcgaaaaaggcggtacaacaaacttaattgcaaacagcgatttctgcaaaaccgaaaaggttttaataaatgaaaacttaattaaaaacgatgaggttaagcttaccgatatacccggcattgatatgggtatgctcagaaaagacggcgcaagcgccgcggctgttcccggcggctcttacgacggttcaaccgctctgaaagtcacagccgacggacttgagggctatttccagacatacggcaatgaatcggaaaccgatttccccgatgctgtaaagagaggtaaaattgcctttgttaagggcgataccgccgttaaggcaagcggatatttcaagaaacttgatacaagcgatgcaggcgctgagcctaaggtatggttcggtttcggaaaagagtataccgtaaagaaatttttggtttctaagaccatcagttcaatcggctcgcattataacagtgagtcggatcgtctggatactgaaaaatacgaagctatggataacggttgggtaaaatttgaaatgtccttaaccgatgatatgctcgcgtcctccgagcttaaaacctcacttgccgaggcggagcgcataagatttatgtgcggtttagactgcgacggagatgatggcaagaaaagttatcacggcgaggcgcttttcgatgacgtcaaattcgaaattatttcaaaatacgctccgggcgactcaaacggggacggcgatattgatattcgcgaccttgttcatatgaagaaatacgccgcaggcaccgttaagtttacagatatgacgcgcggaacctggctttcggatataggctacaacgaaagcccgtcaattacaaacgaaatggtttgtatgcgtaaatatcttataggcgcgtcaagcaaatacggaaaataattaaataataaaagcccggtgcaaagggtgcatcgggcttttgcgtaacgggtgagaaaatgcaaaataaatcggatacatataaaagaccgctgaagcacaaaagaattgagccgcaggctttagcagaggtatgcggggataaatccgcctttcaggggtggaagataaaaaagctttcggatatttcttttcccttaacaattaaaaaggaagaaataataatagatttcgggggtcactttacgggttatcttaatatcgagcttgcgggcagacccgagcacatacccgattcccccacaaatatagccttttcctttgccgagatgcctattgagcttgccgaaacggcggaggacagcgaaaattcactgtctgtcgggtggctgcaaaacgattttaaaacaatagcctttatgccatataagggcagccttgagcgccgctattcgttcagatatttaaagctgaagcgtactgattcggtgcgttttgcggttgatataaccgcgctgtatatcgacgcagtgtcggcggtggatatagatgatgcgctgccccttaatacggcggacagcacacttgccgcaatagacaaaatatgcgttaatacccttaaagagtgcgagcaggatgtttttgaggacggaccgaaacgcgaccgcaggctgtggatcggcgatttacgactgcaggcgctggttgactatgtgacctttcgcaataccgaccttataaagcggtgcatttacttatttgccgagcatcttaacgaaaagggacttgtgccgccctgcgtatttcccgatactccgccctatgccgaccaatggttttaccttgattattcgctttgctttgtgctttgccttgtcgattatttggaaaatacaggcgataaaacactgcccgaggagctttacggaattgcgctgcaccaaatagaatataccgacagtgtttttgacagaacgaagggaataattaacgagggattttttatagaccacggcaattacgaccgcagcacggcgtccctcggatattttgcctatgtgctgcgcagtatgataggattatcggaaaagctcggtaagcctgccgataaatttaaaaatattcttgccgatgtaaattctgccctgctttcaaaaagggacggaaaaacagggcttttcaccgcgaaaaacggcgagatatcgtggcagtcgcaggtgtgggcggcgctctcgggcgcgttgagctgcgaagaaacgaaaggtttgcttaaaaaaaccgccgagtataacccgggaatacatatgtcctcgccctttatgacccactattatttagaggcgctttattcctgcggaatggcggaaacggcaaacgaatatataaagagctactggggcgcgattataaacgccgggtttgactgctgccccgaatgtttcgatattacaaacgacagggtaacgccctattcaaaccccgtgcttaacagcgcctgccacgcatggagctgcacgccctcgtaccttatacgaaagggaaagtcgtaatatgataaacattttaagaaagccggacgatataaaaatcgaatgcgaagaggataatgccgactgcacggttgaaaccgaaataagggacgaaaagctttacatatatgtaacggcggctgttgcccgcccgcgctttatctgcctacgctggaattaccgcgttaccgagcctacccgcataatgggggataaatgggagcgctcctacggggatatggaatggcactcgctaaacggggaaatatttatgccgtggtattttcttgcaaacagcggcgataaaaccgtgggctgcggagttatgacgggggccagcagctttgtaagctttcagtgcgacgcttcgggctgcacggcgtggtttgatgttcgctgcggcggcacaggcgtaaggcttaacggcagacggctgcttgcgggtgttattgtatgccgtgaatacagcggaatttcagctttcgctgcggcaaaagcgttttgccgcgttatgtgcgaaaatccccgattgcccgaaaagcccgtatacggcagtaataattggtactacgcttacggtaaaagcagccgcgccgaggttataagggatgcggaaataaccgccgagctatcagcgggaaacgagaacaaaccgtttacggtaatagacgacggctggtcggttaatccctgcgcgggaccgtgggaaccgaatgaaaagttcggcgatatggcgaaaattgccgaagaatttaaaaaaatcggggtaagacccggaatatggataagaccgctttgcgataaggagcttgaaaagctgcacccggaatggtgcttatcacgaataaatgacggcgatacaaataccgagccgtcatactgccttgaccccaccgttcccgaggttcgagaatatgtaaggtctaccgttcgcaaaatgaccgaatggggctacgagcttataaagcacgattacaccacctacgaccttttcggcgcgttcggctgtatgcttaacggcaaaataaccgcaaaggacggctggagctttcatgacgaaagcaaaacgagcgccgaaatagtttcggagctttacggagtaataagggaagccgcgggcgacgcggttgttatcgcctgcaatgcggtatcgcatctgtccgcagggatttttgaggtatacagaacgggcgacgacacaagcggcaggctttggagccgcacccgcgcttacggcgtcaatacccttgctttcaggctttgccagaacgacgcattttataagattgacgccgactgtgtggggataatccccggtaaaattgattggagccttaataggcagtggctggatattctttctgtcagcggcagtccgctttttatatcggtcaagcccgatgatattaccgacagcatgaaagaggatataaaaaaggcgtttttccgcaattccgggcaaaaggataaagccgaaccgcttgactggctttataacaatcagccgcagtgctggcttataaacggcgaaaaaagagaatacgattttgtggaaaattcttacccggaattactttcgggcagcacgcaaagctattaaggagaagtgctatgaaggaaaacataaaaataggcataataggactcggtcagcgcggggacgtaatgctcgaaaaccctataataccgatgatgaagaacggcgcgggcatagaaatagccgcggtttgcgaccttttgcccgatagggtgaccgcagcggcggaaaaactggaaaaggcaggcttttcacgcccagccgagcttacggattataaagagctacttaaaaataaagagcttgacgcggtgtatatagccgtatcgtgggaggcgcacgccgaggttgccgtggcggcaatgcacgcgggaaaatacgtaggacttgaagcgggcggagcatattcgattgacgactgctgcaagcttgtgcgcgcttatgaggaaacaggcacggagcttatgcttatggaaaactgctgctacggcaggcgtgagcttatggcgcttaatatggcgcgcaagggcgttttgggcaatattatgcactgctcgggcgcatactgccacgatttaagggaagaaattacaagcggcaaggaaatacggcattacaggctgcgcaactatattcaccgcaactgcgaaaactaccctactcacgaaataggacctattgcaaaaattcttgatataaacaacggcaaccgctttttaacgctttgttctgtttcgtcagctgcaatgggcctgcacgaatacgccatacaaaaaaagggcgcggagcacccgctttcaaatataaattacgcgcagggcgatgttgtaactacggttattaaatgcgcgggcgggcagaccgtttgccttacccttaacacaaccctgccgcacgcatactcgcggaaatttgaggtgcacggtacaaagggtatgtatatggaggataacgacagcgtatttttggacggcaacgctgagcacacaaaaaacgagtgggactggaaaccgatgtggggcaacgccgcgcagtatgaaaaggaatacgaccacccgctctggcaaaacggcggagtggggcaggatatgcacggcggcatagaccacctggttttcgcggcgtttgtaaacgcggttaaaacgggagcgcacgcgccgatagatgtatatgacgcagcaacctatatgtgcataaccgccttgagcgaggaatcagtcgccaagggcggagcgcccgtcgctttccctgattttacgggtggcagatggacagagcgctcggacattgccgataacgaatataccttcgataaattaaacaatggcagagatatatacttcgccgactgaacggcacagattattttaagagaacataaatgctgaaattaaaaacagaaaattgccgaattgccgccgtttatgatatgcggtatgaaacgcctgttgatataaccgacggcagcggaaatttcgggaaacccgtgtatacccttaaatcgcaggatataaccaaagaaaaaagcccgaatttacaccgtataacgattattccgtcccctatacggaaacggaaaacggaatacagctaaataaagatttcggggtttccctaacggcggaggaaacagacggcggaattgtattggaaataaatttcacaaatgaagatgtgagcgcatgcggaatttccctaccgttcagctttatggggcaaaagaacaatttatgggagcgccagtttaccgcttcaagcccttaccgcacggcggacggcaagcaccttatgttttatcttgttcgacccgacggtaaaaatctggtttgcattgcagagaacgaaacggacggctacagaataaattattcggatttcctttgcgggcactatattatgggcatacagtttctctctcaattcgatagggcttacggaagacagacaagagcagagaaaagagtaaagctgcatataaaggcggtaagcgactaccgcgaggcgcttgaaaaggcaagcgggctgtggggtatactcgcgctttactaaaggtgtcaaacacattgattttcattccaaaagtttcgcgcattgactcaattaccgacctgtcatttacggttcgtgcgtccaccattgtaaagagtataccgtcgattttaaggtcgggattgataccgcgctttacctgtgaataagtacgcaataacaggtcaagacctttggtagacaaaattctcggctgactcggtacgataatactgtccgccgcaacaaaagcgttaatcggcagaagtccgagcgacggggtgcagtcaataagaatgtaatcataattctttttaacctgattgacataggttctcataatgcactcgcgactcattaccgtaaagagatagctttcaatgccggacagttccacattacagggcatcaggtcgataccctcgctgcaatgaatgataccgtagtcatcattaaacggtttgttgtcgattaccttactcattaaggttgcaagggaaatatccaactcgtccggtcttttgattccgagactgatggaaagcgaaccctgcgggtcggcatcgataagcaaaatctttttgcctttcattttaagaccgacgccgagattcaatgcggtagtagatttgcccgtacctcctttctgattttcgattgcaattac

SEQ ID NO: 1577 - DNA, 7455 bp, Unknown
  16S sequences of unknown bacteria
tccctttgggaccaaagggaggtggcgcggcgcagccgcgacggagggattgaccaaagggggcgcacgaaggccgccgccgtacacgccgccggggacgattgatgcgcgaaaaggctttgcccttctctctgttttttttgatggtctgcacaacggcgcggcgctgtaaaattttttggagaaacttacctcgcgttcgattctttggcttgcaaaccgacgtgcgttcttgtataatataaacattcgttcgatttggaggatgtgctatgctcacttgcgccttcacgggccaccgccccagcaagctttcgtatttgcggaacgcggatcatccggattatcgccgcctttcgggcatgctgggcgccgtttgcctggagctgtacggcgaaggtttcacgcgctttctttcgggcatggctttgggcgtggatatgttggccgcggaagtggtgctgaagatgcgcaaggagcacccggaagtgtcgctcacctgcgttttgccctgccgcgaccaggcgaatcgttggcaggaagccgataggctgcgccaccaggatatcttgctacgggccgatgcggtcgtttgcctgcaggaaagctattcccgttccgtcatgctcgcgcgcgaccgctatctcgtgcagcatagcgactgccttttggctgtgttcaacggcagcccgggcggtacgaaatacaccgtggattatgccctgcgggcggggcggcgcgtggtgcgcatcgacccgcaaacgtttgagcgcacagaggatttgggccagctccgcctgcccctttgagcggcggagcgatcgaggcgagcggctgctgtgcggagcgcattgtggtgaaggacgaaaaaaccatcattcaaaaaaagaatttgggatttttgttgactacgcgccaaacaatcgagtataataaagtatgacttttgatttatcgagattggaggcgcaaccatgtatattacgcggcatttggaggcgcaagtacaaagcgcatcgcgctattatcccgtggtcatggtgtgcggacagcggcaagtgggcaaatccaccatgctcaaccacatccgtgaaaacgggcgcagatacattaccctggacgacggcaatgcgcggcgtctggcagaagatgatcccgtgctttttttcgagacgtatggttctccactgttgatcgatgaatttcagcgcgttccctccatactgttaacgattaagcgcattgtggatgagaaagcgctcaaaggcgaggacaataacggaatgttctggcttacgggctcgcaaaaattcaagatgatgcagaatgtgtccgaatcgctggcaggccgcgtggcggtgttcgacatggcgggcctctcttccgctgagatcgaagagcgcccggccgcgcctttccacccggatctggaaagcctgcgcgagcgtgcgcggtcatgcaaaatcaagaacatccatcagatctatgaggagatctttcgcggctgcatgcccaagctgcgcgccacagacatcgaccgcgatcgcttctatatggattatatcaacacctatctggaacgggatgtgaaggatttggggcaggtcgggaagatgagcgagttctatgatttcctcgtgtacatggcggcgcgcaccggccaggaactgcggtatgacgacgtctccaatgccatcggcgtatccgcgcccacggccaaggcgtggatctccattctggaacggtcgggcgtcatctatttgctgcgtccctaccacaacaacatcagcaagcgactggtcaagacgccaaaggtgtacttcatggataccgggcttgccgcgtatctgtgccggtggcccaatgcggaaacgttggagtatggggcaatggacggcgcgttcctggagacctacgcggtaaccgaaatcgtcaagagctattataacgcaggcaagccatgcgatctgttttactatcgggacatcgaccgcaaggaaatcgatctgctgatcgcggagggagacaagctctatcccatagaggtgaagaaggcgaaatcccctgccaatccagacaggaacttcggcgttctcaaccagttcaagcgggatgtgcagccgggcgttattctttgtatgagcgacgagttgattccctacaaccgggatgcatggctctgcccaatttccgcgctgtaagcaggtggacgggggaataacctccctcgtccacctgcttttcaccgcctaatcttccggcacggcatagatttgaatgccgccggaatcgtagaccaacgtgagattttgtgcgaaccaatccacatccgcgccgtagccgcgctccgtggcgccgatatacacataatcgacgtcgtattgcgctagagcctcgaagctgggattggcgtacgtttcctgaatgtaggccgaccttgcggtaaattcctgcgcaaacccgtgccaccacagatagagatccggcccgcagaccacggtgcggcccgccagcacggaaacggggttgatgtgatccgtgtcggtgaggaacaccgcgtcgcgctcggtattttccttcacgaattccgcggcttccacgtcctgcggggaaaagagcgcgtagcggctgatggcctcgcgcgccagcgacatcgcgcccgaggtgagcgtgagcaccagaaacacggcggcgagcaacgctcggccgcgaatgcccttcaggcggtcgtaaatcgccagcaggtattgggccgccagcggcagcacggcgatgtaggccacgtagaagagcttgatgttgtcgtaggaattttcctggaactgcaccagctccgccagcgcgaacaggatcagcgcgcccagcgccagcgccttgccgcgccgcccggcggatagcgccgcgggcgccagcacgatgaacaccggccccacgtttttgatccagaaccagaagtattcgtcgatcagcccgctgcccgtgttgttcacccaattgaagcgcaggcgcggatagccgccgccaaacgtctgcgggaacgaccagaacagcagctgcggcagcgcgagcacgcaggcgatcgcgccatagagcacgagattcgcgactgtatcgcgctccttgcggcaggcataatacgccagcgcgcccaggctgatcgcgcccagcgccaggaaggagtgcgtgtgaatcatgggcatggcgcccgcccacacgcccagcgcgacgaacaggcggcggttgtttgccttcagcccgcgcaggagcaaatacagcgcgggcagcacggtgagccaaccggccagcagcgtcctttgcggcagcagcaaatcgaccacgcagttcacccagcgcacattttcctgcgtgtagttggcgggcgcgtaataatagccaaatagcgcctgctggagcagcgtggaatcctcaaagacctgatcaaacgtatacaaaaagcccaggccgccgcccagaaacagcaacaggaacgccagcagcacagcgccttttcgccgggtaagctcccaggcgaagaggcaaaagccccaatacaccagcgccatcatcagcgtgcccggcagcgtgaacgaaagcgcgagatcgcagcccaattgatacatggaggccgagagcgcgtccaccaaaaagggatagcccagcatcacgcccggcaaaatcgtgtattccgggggaaagctcgcgccatccagccccgtggcgatgcccaggtgcaggcacaaatcgccataggtggattggcccacatagagcgtgccatccgcgccggggcacagcacgtgcgtatattgcaaatacgccgaaaacagcgtgagcgggatcaccagcgcgcaaatcagccgcgtgggcggcgcgggcgaaccggcgtcgcgcagattcggcctgcgccacaggcacagcgcggcgacgagcgccgccacgcccaggccgcaaaattgcgcggcgggcgtaaagcgcagcgcgaacgcgaacagcgcgggcagccacatcatcaaaacgagtcccaggcacaggcccagccacgcgcggacggcgcgcgcgcagcccgcaaacaggctgcgcgcgatggctaggccgcacagttcaaacgcaatcaggagcaaaattcccagcatagcaggatcctttccatacgatccgcacgatccgcgattggccgcgcggacaattttccctgcctgttcattcagggggatgggagcaggctcaatggctcaaatattccaccagcgttttcacgcccgcttccatatcgcttagatccacggtttccgcggcgctgtgcacatagcggcagggaatgctcaaaacgccgctgggcacgccgccgcgcgattgggcgatcgcgcccgcgtccgtgccgccgccggtgagcacttcgcgctggtgcttcgcgcccgcgcgctccgccgcgctttccagggcctttaccatggacggcgcgcaaatcagcgaggaatccatcaccttcacggcgatgcccgcgcccagttccacggaaatcttcacgcccttgggcgtgtccccgcacagcgtcacatccagggccacgccctcgtcgggcgcgacgccataggcggcgaccgccgcgccgcgcaggccgacttcttcctgcgtggtgaacacggccacgacggtgttctcccggctttccagcgccttcagcgcctccaccaacagggcgcagcccgcgcgattgtccatggccgggccgctcacgcgctggcccatttcgaacacatccggcgcgtagacggccacgtcgcccacgtccaccatggcttcggcttcttcgcgggaacgcgcgccgatgtcgataaacagcttgctcatggggctattcgcgggactaaagtcctccacctcgtgggaaagcacgccatttacgccgtttgcgaacaccacgcggcggttgagcgaattggcccggttgatgccgcccacgttgtgtacgcgcaggaagccttttttgtcgatatgggtcacgataaagccgatgtgatccatgtgcgcggccaccatgatctttttgctcccacccttgcgggtggcgatgaggttgcccagcgcgtcggtcgtaatttcatccacatacggctcgatcatgccgcggatggtgctggcgatgttgctttcgcgcccggtcgcgccgtaagcgcgggcgagggtcaacagggtatctttgatggtttgcattttggttatccctcctggaaatcggcgttcgaagccaaaaaggcgttcacaaggcgataggccgcgtccacatccgccagcgaagccacgctcgacggcgaatggatatagcggcagggcacgttcaaaacggccgtggcgaccgcgccgcgctcgcgctgcaggcggcccgcgtcgtttccgccggaaacgtaggatttcatctgccaagggatgtcctccttgcgggcgagcgcgcgcagggcgcgccaaagcggctcgtgcgaaagggacgaattgtccatcatggaaatcgccacgcccttgcccggcgcgcacacgcgcagatgctcgggcacgtcgcccagatcgttggccgtggtgccttccagcacgatggcgcaggtcacgttttcgatgtgttccatcacggtctgcgcgccgcgcgtgcccacttcttcctgcacggtgaaggcgcaggtcaaatcgcagggataggtgttttccaaaatcgccatcaggatggcgcagccgctgcggtcgtccagcgccttggccttgaccatccccgcgccgaattccacccattcgctgtcgaaggagacgaaatcgcccttgttcacctggcgctccgcgtccgccttgtccttggcgccgatgtcgatcaccaggctgtcgtgtttcatcacgctttcgaattcgctcttggactgcaggtggatcggcttggcgccgatcacgcccggcacggccttttcgcccaccagcacgcgcttgctgacgatcacgcgcggatcgatgccgccgcaggtgtcgtaggtgagatagcccttatcgtcgatgccggtcaccatcagcccaacttcgtccatgtgcgcgcacagcaccacgtgccgcgcgccttccgtgccctttttgtgggcgatgaggttgcccatgcggtcaatgcgcacgtcggccagcgggcgaatccgctccagaatgtaatcgcgcaccgcggcttcgttgccgctcacgccgcgaagggcggtcagctctctcagtaccattgaatgtccccccattcgcgagcgatgtcgtcgataaagtgcgcgagcaagcgcccggtgttttcgatggtggaaaccttcgccgtttccaccgtggtgtgcatatagcgcgtgggaatcgaaaccagcagcgtgggaatgccgtcgcgcgcggtctggatgtcccaggcgtcggtggcggtatcgcccgcctgcacctcgatatcgaacgcaaaccggtgccgcttcgcgcattcttccagctttttgcgcatcacgggatgcaggttcggccccatggaaatggcgatcttgtccggatcgatttcaaatttgccgctgcccggggcagtggcgaacgtcgcgtcgatggcgatggccagatccggattgagcgcgtgcgccgccgtgcgcgcgccgccgccgccaatttcctcctgcacggaggccacgaacacggcctgcgcgctcgcgcgcagccggtcgagcgcctcggcgcacgcgagcatggaggcgacgctttcgcggttgtccagcgttttgcccgcgatgaagccgttttgcaattccacgagcggggccttgaaaaccaccgcgtcgcccacgtgcaccaggcggcgcacggtggccgcgtcgtaccctacgtccacatagagggaatccatggtgacggccttttcccgctcggccgcggtcagcaggtgcggaggcttcgcgcccaccacgccgaacaaatcgccgccttccgccttcacgatcacttcgtgcgcaggcagcacgcgcgggtctacgccgccgttgcgccgcaggcgcaaacagccgtcgtcctcgattttggtcacgcacatgccgatctcgtccatgtgcgcgcacagcataatcacggggccgctttgccccttgcgcgccacgacgctgcccagcgcgttgatttccacgctgtcgcacaggggacgcatcgcgtttgcaatatagtccgcgaccgcgccctcctgcccgggcacaccggcaagcgcggtggcttcccggagaaattggatggtatccatgcgatgatcacgctcactttctccccaattataccagcattttcgccggagcgcaacgcctgcacacaaaatgaacaagcgatatagcagggctatttcctacggttgcgccactaaccaaaaggctcccctttggtcaatccctccgtcgcggctgcgccgcgccacctccctttggtcaatcc

SEQ ID NO: 1578 - DNA, 6762 bp, Unknown
  16S sequences of unknown bacteria
gcagcgtgcgagagccgcacgctgcatgcgcgagaagcgtggcactgccacacatcccacgtctactgcgcgagaactgtggcactgccacacatcctatgcgtcctgcgcgggaaccgtggcactgccacacatccggcgcgtgcggtgcggggtctagcggcgtcttcgcttacatgagctttgtcatggtggcgagcaggataccggccgctatcgcgagcatgccgacgatgcggcacctgtccaggcgtatcttctcgcagcgcatcagcccgaacgcatcgattacgaggcctcccgcaagctgtccgagcgtgacgcaggtcacggcaatgccgacgccaatcgttggcgtagcaagcgcgattacgaacacgcccgccgctccatacaggccgccgagccaggtccacggtgcggaagggcgaaccgagtgcagccttccccggttgacgatgagggtgtagacgccgacgaggatggttccgccggcaaacgacacgaagctcgcctcgagcgtccccaccgtcactcccagcgtcgcgttggtcggtgcttgacacgctcctcccacgcccgcgagcagcgagagcgcaagcatcgcaaaggcgcgtcccctgaagcgggaagtgctatccgccgaattctcgcttacctgcccgcctgcgcgatgcgtccgcacctgaccatggtagacgagggcgattccccctgcgatgaccgcgcacccggcgacgcgcggcaggctgaatgggatagctgccgaggcaaaccatccgaatgtgtcaatgaccatgcccatcgcgatctcgccgaacatgatggccgtcagcgtgagcgcgacgcccagcgccggcacggcataggtgatgacgaggacgatgaagacgccgtacaggccgccgagccactgccaaggaggagtctgggcgagcaacgcgaggttgccctggtgcacgagcagcacgagcgcaccgaggatgagggtcccgccggcaaacgacacgagcgtcgcctctgcgttgcccacgactttggagagttcggtgttggtcgggctctggaaggccatggcaaagccagtcgccgcgaccagcgcaatgagcagcgcgtacaaggtttcccgcttacccgagcagctcgtcgaagctgcgaatcgcaagcgtggcgtgctcgcagagctgctcgtaggttccggcgtggtcttcttcgtaggtgccgacggtgctgatgccgacgccgttcatgacgcggatggcgtacagcgagtcgtcgaagccccaggcggtttgcggctctgcacgcagctcgtcgagggcaaggcggaacaggcgggggtcctgcttggacagatgcgtctcttctgtcgagaagacggcgaccagctcgtcgaggatgcccacgtgcgccagaccggcgttgagatatttggtcggcgtcgacgagacgacgcagcacggcactcccgcagtctggagcttctcgaagaactcccgcgcgccctgtcggaacgttgcgcggttgttgtagtagtcccacatggtgtcatgcatgtactgggagacggcctcgttgctctcgagcaggccccagcgctcgtggaagatcttcgccgtttcgctcatcggggcggcccgcatctcctccagctcgtcttgcgtccattcgtggttcgtctgcttgatgagcccgaactcgacttcgcgccaggtcttcatcgagtcgagcaggcatccatcgcagtcgaagatgattccgctggcattcgcaaacttttcgaacatgcatcgcctttcttgtgtcccgaggtgacccgaggggccgtgggtatcgtgtcattttggcgcgaagggacaccccgacctgtcccctcgtgccaggagggggttacttgtggtattcgtcccagagatcctggaatgcggtgagggcgccctcgatggtctccttgctgcagcagtagcctgcgcgcacccaccccttcatgccaaagccgtcggatgggacgagcagcagctcatgcgctttggcacgctcgtagaacgcgtttgcgtcgggctcgagcgccttgatccacatgtagaacgcgccctgcggcttgacgaaggtgtagccgatcctttccagtccctccatgaagatcttgcggttgatggcgtacggctccttgttgaccggcgcgtcgatgcattcggcgactgtgtgctggaacagcgtgctcgcgcaaatgtagcccaagaaacgcccggcgcccacgacggcgtcgtagaccgttcgccagtcgtcgacctgcggcggaatgaggatgtaggcgatgcgctcgcccggcaggctcatcgacttggaccagctgtaggcgacgagcgtgttcttgtacagcgacggcacccatgcgggtttctcgtcctcctcgtagtacagctcgcggtagggctcgtcggacagcaggtagatcgggtgcccgtactccgcgctcttgcgctcgagcaccgtcgcgagctctttcaggttgtcgtcggagtagatggagcccacggggttgttgggcgagttgatgatcacgacggcggttttctcgttgatggcggcctccatcgcagggacgtcgatctggaaatcgtccgcgcgtgcgggaacctcgatcagctcgccgcccgcatcgtgcgtccacgtcttgtactccatgaagtacggcgaggcggtgatgacctgctcgccggggcagacgagagccttgaaggtgatggcgatggccgaagacgcgcccgacgtgaggtacaggttctcgccggtgtagtcggtgccaaagcggcggttgaggttgtcggcgatgacgtcgcggacctcgatgaggccggggctcggagtgtagccgtgctcgttgcccttgccttctgtcacgaggcgcgcgatggtggcgtcgacgcactcgggcgacggcacagacggattgccgatggacaggtcgaagaccctgtcctcgccgatttgggctttgcgctcgaggccgtaggcaaacgtctcgcgaatcttgttgggggcggcaccgagtgcgcgcagttcttcgttgatcatatggcgtggacgacccttcatatgcgaacagacagatatgtcacacagtttacccatttggcatcggggccgtcggctcgccgtcgtttccaattgatgaaatctggctatctatccgaccgatggcgcagaggcacggccggcggcaggggagatgccggcgctcagccgccggcggaggcacgcggccggtgcatggcggaatgctagacggtaaagaccttgccctgcacgtcggaaaacagcgcgcttctgatggccttcgtacgcttgacgaagtcgacggcaccctcgtcgagcagcagcacgcccgtcgagtagccctccccgtcgagcgcgcgctcggtcacgagcgtcacggacgcgagcgtcgaggtggtcgggcggcctgtgcgcgggtcgatgatgtgggggtagtcggtgcccgccaccgaaaagccgcgctgcccgatgccgctcgtcacgaccgcgcgtcgcgcgacctcgacgaagccgaccgtgtcgccatcggatccactgatgccgacacgccatttggtcccgtccggcttgcagtcgccagccaagatgtcgccgcccacgtcgatgaggaaacgctcgacgccgcgtctgcgcagcagcaccccgagcctgtcggcgacgaagccctttgctattccgccgcagtcgagctgcgcctgcgggtcggaaagccgcacaagccacccgcgtgcgtcgtcttcggggccgagcacgggcgtacccgcgcggaagcgctcgatgttgtgccagccgacgtgcgagcgcacgcgctcgatctttgctgcgctgggctcgcagccctcgcgctgcgccttttcccacaggccgagcaggggcccgaccgtcacgtcgaagagtccctcgctcgccttcgcgtacaggcgtgcgaactcgagcaggtcggcggtctcgggatcgactgagacgggctctccgtgcgccgcgttgatgcgcgcgatgtcggagtggggaagcgtcctgctgaacagccgctcgtagcggcggcaggcagcgacgaatgccaagatcacctcgtctgcgtcgatgccctcggggtagaagcgcagctcgacgttggtgctgaaggcgtggatctttgcggtggccagcgctccggcctcgtctgttcccgtctcgaggtagtcttcgtcgacaatcgggtcgagcgcgccttcgcgtgcgtctgcttctgcttgctccatggtgtgccggtctcctgcgcgaggttgtcggttgcgaaacgcttatcagggtacgccactttgccttgcgtataatgtcgagtcatgaatacagacgcagcagacacgcagcccgccgcaacgtcggcacctctcatgacatccgcccccaggccatcgcttgcgaaggtcgtcatggccgcgctcgcgttcggctgcacgatggcgttcgcacgtgccttcggctcgggcttttccggcgtgctgtttgccgggaccgccgcgcagatggacctcgtgagcaccgtgagcacggccgcgcgcgtcgtcgtgctcatcgccctcacggcgctggggtgcctgcacagatccgcgatctgccgcctttcgctcggcgccgcgggcgcctgcatgggcatcggtgtgctcgtcctgtccgcgagcgccctgccctggctgcaggttgtcacggcgatcgcgtgcggcgcgggcagcgcgttcgcgatgctctcgctcatgatgctgctgagcagcaggtcgctcaaggagatcatcgcggtgagcctcgccggtctcgccgtgggtggcatcctgatagcggcatcctcgcttctgccgccgcccgtgggcaccgtgctgttcgcggcatcgggcgtcctctccacgctgggcatcctcgccgccgaccccgcgctctcgtcctgcgtcgaccagggcgcgtactcggcagacgagtttcgtctgttcccgtggttctccgcgatcatgttcgtcgtctgcggcattctcggggcgctcatctacggcgtggcgaccacgctttcgtggaatgtcatggaaggggtgagctaccccgtcatgggcgtcgccgccgcgttgaccatcgtgttttgcgtgctcgtggtactcgccgtcgacaactgggcgcaggtcatctgggttccgctgttcatcttgctcgcggccatcctcgcgttcgtcatcacgagcgggcagatgctgggcagcatcacgctcgggctcgtgttcgcgctcatcctgtgctaccacttcctgcgctggatgatcctcccggcgctcgtctcgacctcgctgctcccgcgctttctgacgggcggcatcctgctcgtcatcacgaacagcatcttcaacgtcgggctcggcgcgcgcctcgcggacgtgctgccgctgggcatgcaggtgccgagcgcgtttggcggggtcatcgccctcatcttgggcgtcgtgttcgccttcgccatgttcatggagcacgcggagcgccagccgagcgaggaagagcgcctcgtcccggcggcggcctatcggcgtggtctcgaggcgtcggcgccggcaggcacggcggtggcatcagctggagatgcggcgctatcgcacgggggcgtcgggcgcggcgacgcggcgcacgatgaagtgccgaagccccgggagcagcagcccgaagacgacgtgccctcccaagcagagcccctgccggcggaaaagaccctggaggattactgcgccgagctcgccgacacgtacagcctcaccccgcgcgaagaagaagtctgcgtcatgacttcgcgcggctactcgtcgagctacatcgccgagcagctctacatctcggggagcacggtacgcttccaccagcagaacctctaccgcaagctcggggtgcactccaagcaggagctcatcaacttcgtcgaggagaagatgcaggggtaagctgcccgtctgcggcacttttgagcgcgcaagagactcgtctgcaaaaactatcagttctgttgggttgcagttctccccgctcagcgtgcagatgccgcgcgatgcggcatttcgtggcctgtcagccaaacgcgctttgctagcatgtctcgcgaagagaaggggacgtgtatccatgggtcacagtgcaagccgtaaaccgattcctccgtgtccgctctacgtcgacttgcgcggggcgctcgtcaccgtcgtcggtgccggacgcgttgccgagcgcaagattgagatgctgctcggacacggcgcgcgcgtgcgcgtcgtcgcgccggcgtgcaccgctgccgtcgaagacgcggcggcggcagggacggtcgagctcgtgcgccgcgcctacgagcgcggcgacctttccggctcgtttctggtcatctgcgcgacggatgacagcgccgtcaacgaggcggtctacgctgaggcaatcgccaacagccagttcgtgaacgtcgtcgacgtgcccgacaagtgcaacgtcatcatcccgagcgttctgcgccgcggctgcctgcagatcgccgtgtcgacgggcggagccgcaccgtctgtggcacgtgacatccgccgttccctcgaagagcagttcgacgagagctgggaggcgtacatcgacgtgctcggcgagctgcgcacgctcatcaagcagcgggtccccggcccggcggcggcgcgcaagccgctgtacgag

SEQ ID NO: 1579 - DNA, 32759 bp, Unknown
  16S sequences of unknown bacteria
acttccacatccgacacttttcgaacaaatctactcaaaatgtcgataatgtaaatatttttgacatttccgctttttatacgctctacaacctcatcaaatgaaataatttttgctttcattttttattcctccgttcaattaatttttctatctttttatctttcagttcgatttctccacctaaaagtcgctttatcacttcatgtgcactcctattgctgttacaaacacaaaacggatctttatcaatcaagattatggttttgtatgtagaacaataattttttacccgtttagtttcaattaacattttttatcctcaaccagcattaaacgaagccaaaacaacgcctttttcaacggattcatcagctactccaatctttcggcacttcacgtcgctgggcatttttacccagtcgtatgtagctagccacatactatcaaaaaaagtcccgtctggatgaatcttgactgcttcttcttcactttctgcgcaaacaatagcggaatcgtatgtatcccaacccacgtttacatcttgcgttaataaatataaattcatatgcatacctctttcataaaatccttgtacatcatgcttgattgaatccctgtattattctgatacttcccactgttatacaaatcatagtcaccttttatggtgtgataatagatttggcatacttcaatatcgggataaataatcaatggatgaatacaataaatttccaatgtccagtaacctgcaaagccaatatctccgaaaccggcggttacatgaatacacaatcccaaacgacctgtagaggagcgtccttctaacataggtacatatttactggtagttgtaaattctttagttcttcccaaatacaacttatttggttctaataataacccttctggtggaatcactaactttttagtcggatttggttttttcatgtccagtatgtcatcttcatataccaataactcattatgcagcgttaggttataactgtttgggtttacttgactggaactaaaaggacttatcacgatatttttattttttatttctcttgcgatttctttgcctgataaaatcatcttcttactccaatgtcacctttattttctttccgagtgctttggcaataaggcttaaagtatctaactttaaagtttggcctttctccacagccctaagagtgttaattcccacaccggatttttccgcaagctctttttggtgtaaaccttttgcttctctcaactttttaatttctgtgccaatttccattttcctacctccatatttaggcactatatcaacgcctttccgtgccgtcataccttttactttttttacatacggcgtgccttcatgcttgtagcactcttgcggtgtaacgcctcgccttttacctgtatctatcatgtagtggcatgcatataccgttgtccctgctcctgtcatagctctgcgatagaagcaatcgtaacatttgttatgctttacttttctttctgacacttttccgcatccgcataaatcccacattttactctttacggtttcactggggcgcactcgtccagataagattgcatttgcatatcccgtacttataccgacactggacgcaaactctctttgtgtcatatttttactttttatgtacaaacaaagttcttctcttaatgtcatttttcgtccctttccagcttatacagcttgtccaacgcctcctgtagcgggcagcttttacactcataatcgttatctttgcagataatcgcacaaccttttccgcctgtcttttttaaccccacttgcttaaatgcggggtaatactcagtgagattctctatcttttttcgcctccgaaataaaaacttgcacatgtggaaattttgagtagtattttctgacggtcaagtcaaccacttgcgaatcatctttataagctaagccgttcagagcatcgcatacagctttcgcgatgttgtcaccgtccggctttttggtcggtctttctatatcagacaccatgtcaagaactcttttgcgtgacgcacttttcggtatcgtatagtatgcatgtatctccatttcaaccgcactggaaaacataccgctgcactgtgtcttatatgccatcgcaatttctcgctcataatcctttgttttctgcggtgtataaatatgcattgttccgctctgtcttaccgccctgggtctttcctttccttgcggctcaccgtacacggtgaaactcgtcattttcattctttcaacctctgatttttattttggtctttagataagctaagctgatactttttagttcgttgaaaaatcctgctgcctactgcttcatcacaagtgataagttcacgtatcgtcatttctgatgaaataattgtgattttactgtgaatgtatctgtgattgatgatttcaaaagccagctttaaatctccctgtgtcggcggcactctcacacctctgtcatctgcataggtcttgaaaaagtcatctatgtacagaaccgggatagtctttaactcgtgcataagcggctcatagctatcagcatcgtttacaacgctttttatcctggtcgattcatctttccacagcatatattttgcagcatatccccgattgataaactcgcctaccaaagccgtacatatatgcgttttacccgctccaacttgtccacctatgaaaaaccaattttctttgtaatcatccagaaaatcaatcgctgtttttttgattctttcttgccacggttcttttgcgatgtatgtatcaaacgtattttgccctagggcgtcctctaagccacttttacgcatccttacgagagtttgccttactggcatacatttgcactcttgtgcgaccgtatagccccctttaacgacatatacaacgcctttgttcttgcacagttcgcagtcatacccttttagttcacctggtaaggagtttaaagtgcgacactctttttcttgatacgtttctgatgaatcaaaaaattgcatcttcgaaatcacttccgggggtgctattttcaagatttctgctttgtagtccaccaacctctctcctttcccatgtccgaactgccgctttccaatctttcatactgttacgccctaccttccagccattggcttcgtagtagtctacaaagcggttagcatcgactgtgttatttctttcctgacagtatgccctgacttcttcaaccgtaggtttaacaaattttttgttgtgtgcgccagcactttctttttttatactatttttttctttattatctatatctttatctctatctatatctcttaactctaactctatctctggtgtagatttcttacatgaaatcttacaaggcttctgctcttgctttattttgttgtagtaaacgcgttgtctgtcagcctcggtgctagactgtcctatatatttttgtatatcaagcatataaattgcaccattatctaaaacttcaattagacccatttcttgaaaaatttgtaatgctttttcaaccgttcctacctgatgcctcgtaattgctgcaatcatttgtgggttatacggaatcctattgttaaacattaatctcccgtcatcttttaagcttctcaaatacagttttaaaagtatattgctgtataaatatccatcttgcatactttccaacaaaacaatctcatttgtgtcaaaaaaattttcttttagcctgatataataatattttttgttatcagccattgccttcaccttttaaaaactttcttgcgccttttgcgctccaaaatatagattttttctttatcatgttaagaaatcgtttttactctgtgtaaatattcatctaaaattgaaaatttatttaggtatatatcatactttgattggtgcttaccaatacttatttgaagttgttgaaccttaaatgaaggtattacgtaaaacttatcggcatttcctccatctcgtgcaacaagtatgtaaatatcacatgttggctttttctttctcaatgcaaaagaataaaattcgcacatttgagggcttttatataaagctgaaactttaacatctatcttcaaaattccatcaacaagtaaatcataaggataattttgtgacatcatttcaaccgagaaacctttactagacaaaagttcgcaaacttctctttctactttctttgcttttgatgtatcgttgtcctgtacggttaatcctaattttttagcccaaccatagtatcctaatgtctttgaaattttgtttgttaatctgtcatttccatagaaatcatgtatatccgttctggttggcatcaagttatttcctatgtgccgtgatacttctaaaatatccgcttcaatcatctcatttgtccaaattgttgccataataccacctccatttcacttcctgcgcttttgtattcacgggataaacgctaaccctcagttaaaaggcaagtccccgtcgtccataatttcctcaaagcctccgctttcaggtgtgtactgcacatcagcactgtcttgcttttccttcttgctgtctgcaaactctaccttttccgctaaaacttcaaaggcttttcgtttatttccgtctttgtctgtatagcttctggtttggatagctccttgaacggctatctttctgccttttttaaaatatttgcagataaactctgctgtacctctccatgctacaatgtcaataaagtctgcctgtctttcttctcctgccttttggtatggacggtcaacggctatactaaagcctgttaccgcattgccgttttgtgtatgctttagctctgggtcagctgtcaatcgaccgattaaaactacgctattcaaaaattccaccactttctataaattaattttgattcgttccaatctggatatttactttgtaaatattgcttaaacttttctttaatctcttttctttttggtgtatggtcgtaatcatggtgacactgcatacacattgtgccgatattctcctctataccaagtccaccttgcgaacgtgcgatatagtgcgagtttggcatggcgtatggactatgacatataatgcattcatgtctgtctctttcccataccttgtctttgaccgcctttgatatatcaagtgctttcgttcttttcttcattcttccacctgtccgttaaggctgcaagttgctccggcgtatatgtttcaatgccttgctcttttgcctcaaacacaacctcatttatcaatgctgccatttcttttttatcgtaagtcgatgaaccgtagtatacgataacccttgtacagtctttcactttgcttccatctatcgtcctgacgatgtttcccaagcctccggcttcccaatgtcttgtaaagctttcaatggctttatcaggaagaagcaaatactcatatacccctaccctgcgaatcatttcaagataaacattttcttttgtcgtctccagcttttttgcgattttatcgcataaaacccacatatatgcgttggcatctagggagcgtttcccgtagtcctcttttagtcttgctgtatactgcttatcttttttcgattggcaaaagtgctttacaacaccagattcttttgcttgaagcataagccatataccttcactgtcggtcatccactttgctttttcaaatgttacctctgtcacttagaaacatcttctttctttggatagagaacaaaaactctttccgattttctttgtcctctagcctttctccaaatagcaagtgcttctattttcccgtgtgaatcatactctatcttagatacaacaaatttatcattcgtagcttttttacctttgccattagtaaaaatttcaacatattcagagggtatccatatataaggagctgtatagagttctcttccaataccccaattgaaacacgctctcttaaaactgtcagaagcttctcctttttctttctctgttacactttctgtcccgcaattatccttccaaatccattcatttccgacttttatgccaacggagcagtacagatttcctttacactcataatatcggcattgccacatatcacatccaactgtttcgtcaaggatattcatgtcacaacgtgcatctttatatagcaaaagactcactccattttcactgatagtcgcgacacggcactgtatttcgtcagccttcaatcgtctaaagcttgtcatctacttcacctgcaaattcatacttgttttaagctctgcgccttcaagttcttttccttctttcatcagctttgtaacatctgcttttggaatttttactgtggtttccgtaatacataaattcggatacttctctttgaacgcttcttcatcagctatgtacaaagatgttgattttctgaaagaaatagcatttctcggcgtttccaatctctccataccgatagcctgcatggagaaagacaaataatgtttcaggctatcaatctgcgcttttttcgacttcatacgcttatccaatgcatctttttcagcctttatcgcggcaatttcagcctcttggttctttatcatacatgcgatattgtcagctttttcattgaactcccccttgataccctctaatgtatctgctacagcttcaatcgggatttcttcatcctcaactgcctgtaaaaattgattatattcgttactgatttcatatagcttcatttgtctaagtcaatcctccactcatactgataaaactcaacgtctttgtatataaaaaacttcttatatggattcatccagtcatcttgctctactgtgactagtaccgcccccacggcactagctaaaacttcgatacggtcagtgacttgaatacccccactaaaaattggataaagactggctttgcactcttgctgtagtgctgtatatcctttgtatagctttaccaagtcttctacatcatcaacagtattttgcttatcgtctgcaaaagcaggatgatttctagccttcatttgacacaaactctcctatctgatatactttttatgtataatattttctttgccctttgtcggtgttccagcaccaacagggctttttctttttttactcaaaagatgatggactactgccagcaaagcgatacctgctatacatacagcttgtcctataaaaaatccagctgcatcaagtctgccttgctcaaagctcccgactacgccaagggctgatatagtcaaggtgaaagttagtccgattgtcacccagtcaaatattttcttcattcagtcatctcctatcactacttgtggcagcttaaactctacgcctataagcttatacaaagcacacagttctttcagtgtcatcctagatgcatctttcattctctgattaacagtactccttgacatacctagctttattcccagctcttctacacttaatccttttttgtccttgcaatactttatgacatgtgctgcttgctttttatttttttcaagtaaaaggtcttttccatatgttacttttggcatgattttccccccttccagtgattatttttcacctattcttgacttttaacatctacccattaacagtggcaaagaactttgactgaataaaaatttaccaacagggctataaacgtttgtataggaaagtcgttaccaatgagaaaaatcatgaaaaagaatgtaatatatgaattcttctttgccactggtaatgaatagatatttgtgtcaagttgccctctctcccaaatagtggtaaaatttgtttggaagggaggtgctacagatgaatgaaaaaataactaaaaaagacgcatggattattggattgctaaaatcattagacttagacatgatacctgaccgtaaaataactctttttacttcgtcaggaatggtatgcggacgttacaatcagattaatgaagaaagtattaaagatatcacaaaagaaaatatactccgtttcactactaaaacattaaatgacgctttagaagaaagaaatgatatccaaggtacgaatgtctgtattcttcttactgatgtaactgtttatatttccaacacgcctatttttcttcctgagttggtagttttttcagatcaaatcaacggtttttcttatggctctatcgaaatcagctagtaaagtcccagtaatttcttttagttgacttcgagattgtattggaattaattctaaacttattgtcctaggctgaatttgctttatttttgcaaattcagctatttcttttacttctcctgaaatttcaattttcattttcctttatcctttctaactacttaacattgaacatcaatattaagtaaaatttcttttgaagccaattcatctgccaatgagttggctttctttaatagttttaatagtttttttgttttctttgttgcttctactacctgtgaagtatctacatcaataacaatgtagccttttgcttcttcttttggtatgtaattttccattctctttttctcctttcttagtcggtttttgttaagcgatgttgtctttactcaaaaacttgttaataaagtactgctgtcctttacctgttacttttgttgttcgtgtaatgcgtacgctaccatcgggattagaaattgtacgttcttttacttcaaatactcctaactccattgccatttgtgtcggcatgttcatactacttcctgatttaatcaaatacccattcttacgcatccaatcaaataatcttttttgtccaatgtctacaccattttgtttgataagttttgcaaggtcaccaataagtatggatgaatccgatgtttctacagcttttgcaaaaagcaccattggcttatcctcttctattctttttaaaagatgctgatttttctctttttcttcttttagtgctgttgcaatcttaataatcgtatcaggatttaatatcgccgcttctagtgtttttggcgtcatgtatgcaccatgttttcgaatagattttagaatttctttgacctgtttcttaaattcttttgctatcggttttcttgattgcattaatacttcatatagaccattttcagtaaggaaccattgttcttggtttcctccaagggtgtaagcattctttacaaccttttcatcatcatctacgctttgtaacatcattcttgcattactatgctcaatccattccgcaacatctttcgccaaaaataaaggattctcataatctccataaattttaaagtcttttcccaaaacttctctttgttcaattatttgtagttctgtcatgcgtattcctctcttttttatattaacaaacgatacgttcaatattttgaacttttttcttaaaaaaataatcgcctatgtctttttctgttagatttaacaaaaccaaagctttacttatttcaggttgtttccacgctattaagccatttaactttagagaggctgtcctactagaccatcccatcgctcgagcaaatagatactgtgtagaaaatttttctgtaattctacctttcagtttactataatctaaatccataatttcacccccattctcgaagttcaattatttgaacttccttaagtataacctctaataaaataactgtcaagagtaaaattcaatttttttaacttttttgttttttatattgaacttttgtttaaaaaatgatattatagtggcataggaggtataaacatgaaaaaagaaaacacctcaacaagattaaaacaattgatggaaacccgaaatctaaagcaagtagatattttaaaagcttgcgagccattttgtaaacaatataacgttaaaatgaataagtcagatttaagtcaatatgtttctggcaaagcggaacctaaccaagataaactttttgttctcggaaatgctttaaaggttaatgaagcgtggcttatgggatacgacgttcctatggagagaattagtaagcaacctgccgaaatggggtatggttatatgaaacaaatacaagaagaaaacaaaaaagctttattagaagcgaataaaatccccgaaggtttctcccctcctccagaaatggttttaaagccattagtgggaaagattgcatgcggaacacctattttagcagaacagaacattgaagattatataaccgttcctaaagatgttaaatgcgattttcttttaacttgtgatggagatagcatgattgaagctggtatacgttctggtgatgtggtttacttgataaaacaacctgatattgactataacggacaaatagcggctgtcagagtagacggagaagcaacattgaagaaagtattcaaatatcaagataaagttgtcctacagcctgctaatgcgaattatgagccgttggtgtacattaaagaagaaatgaacaacttagttattgaaggtattgcaactggatttactcatatatttgtaaataaataaaataaccgctcactactgccatagtgaacggaacaaaccgaactattctttaaaaaaattttttgaaacttgacaaatttgaaaattcctgcatataatataagtgcagaaagtattttttgcacttattaaatgatacaattccttttgtatctctcttaagaggaaagccccttcctgctctgaaaaaatggggaatcaaaaaagcagttacctctttctgtgattagaggattaaaaaagcggtgagcctctaccgtgagtgaggaattaaaaatgcgggatagtttaattactgtctcgcattttgctttttcaggaggatatatgcgcgcatttactttctatcatatcgatgaaaaatatattaattatctacataagatagaacctagagtgcaatttaataaaaatgaacatagaccatatattggaatcgttctttcaatcaatagtgtagattattatgttccattagaatcgcctaaaccgaaccataaaaacatcaaggcaggaggtcctgtttttaaactagatgatggaaatctcggtattatgggattcaacaacatgatacctgttttgccatcctgtttaaaagaatttaatatcctagaggaacaagacgaaaagtataaaatgcttttgctaaatcaattaaaattttgtgaaaaaaataaattattgataaaaaacagagctgaaagtgtttataaaaaaactataaaaggtaatgtccctttttacactcaaatatgttgtaattttaaaaaattagaacgaaaatacaaaaagtataatccaaactataaaccacacaaaaaataaaaaaaacgcccctatcctgttggcgcaggatagagacgttgactatataaccctagggctacatagtacagtaaagtaccaaagatattgtaccattgcagcccgtaaaaatcaaggggctgcttttttgcgcccttttttaggaggtacagtaatggcaaaggctaaaaaactaccatctggtaagtggagggctttagtatatgactatacagacagtagtggtaaaaggaaataccaatctttcaccgcagaaacgaaaaaggaagcagagtttttggcggctgactatagcttgaataaaaaaatgaggtcaagcacgcactctatcaccttatatgacgggtatacaagatatatcgaaagtaaaaacaacgttctaagcccgtcaacccttagagagtacaaacgacaacaaaaacatgattttccagagcttatgccgcttcccatacaaaaaataacgcaagaaaatattcaagttgcggtcaaccgcgcagcagggctgtactcacccaaaacggttcataacatgcatgggcttttggtatctgttttatctatgtttttaccaaacttcaaggtaagtacaacgctgccgcaaaagataaggaaaaaagtctacgtccctgatgatgaaatgataaaatctttgatggacgcgtgtaccaatcccgacttactaaaagctattattttagcctccatcggtacactaagacggtcagaaataagtgccttacttgaaagcgaccttgtgggaaactccgtaaaagtggataaagctatggtaaaagattctgccggaaaatgggttgtgaagctacctaaaaccgaagaaagtacacgtactatagattttccaccagaaactatgaaattgttaagagaaggactacaagaaggagaaagagtagtaaatcttactccaaactcaatcactgatgctttcgcggaattgagagataaagtcaccaccgaaaagtttggaattcacaagctacggcattactccgcttccataatgcatgcgttaaatgtcccggatatatacattatggagcgcggagggtggaagtcacgagaaacactacaaaaaatttatacccatgcactagacgaccaaaagacaaaaaatgataaaattgtgttagactacttttcggaactgtaaatatgtaaagagagaatccgtgttgcatttcgtgttgcatgtgttgcatttttacaggttttttgtctgttttttaagatttatgaaccaaatataacacaaagaaaaccgcgtaaccaagccatttgacctagttacgcggtttttacgttggtacgggtgacaggacttgaacctgcacggtcgcccaccagaacctaaatctggcgtgtctgccaattccaccacacccgcatattttgatgcgacaatttcttgacgcaagtaggattatatcaaagccgcaccaaaaagtcaacagttttttactattttatcaaatctttttccaacatactctgcgctgcaagcatcgcgcccaattttccgctgtgaaaattgagtccaccttgcatccaagcagcatatggttcacgcaacggtgcatcggcagataactcgatagatgcacctaaagtaaatgcgcctgccgccataatcacctgacaatcatatccgggcatatcccatggttccggtacaacaaaagaatctacaggcgctcctttctgaattccctgacaaaatgcaatcagcgcttcttctttttccaacagcactgcctgtatgatatctgctctcggttcattccatgcaggagtaacatcataaccaaaatgattcattaatcccgcagtgaatactgctgttttgagtgcttctcccgttacatgaggcgcatgaaacgcgcctaaaaataattccctgttatttcccagtgtcgctcctatctctctgcctgtacccggagttgtcaaacgataagcacagctttcaaccaagtcttttcttcctgcaatatatcctccggtaggggcaattcctccgcccggatttttaatcaaagagcctgccattaaatcagcaccacgagaagtaggctcttctgtttgaacaaattcaccgtaacagttgtctaccattacaatgcaattcggcgcctttttcttagcaattgccgcaattttttcgatatcttctatcaataaagatggccttaggctgtatcctctcgagcgctggatatataccattttttgattcggttcaatcgcttgttcaatggcctgataatcaggagtgccgtctgcttttaactgcacttctttataatgaatcccaaactcttttaaagaaccgtttgcatcacccgtcattccaatgacacctcttaaggtatcgtatggaattcctgttacactcagcatggtatctccgggacgcaggacgccaaataaagctacggtaagcgcatgggttccgcttacaaaattatggcgtaccagagcatcttctgctcccaacgcctttgcatataccatgtccaatgcgtctcttcccctgtcaccgtagccgtagcctgtagaagatacaaaatgactttcactgactcctgcctcatggaatgcagccatcatcttttgctgattatattcggtaatctcatcaatttcctgcagacgcggagtaattttcttcatgacttccgccgctgcattttgaatttttgaatctattttaaactgtggataaaacatgttttctccttttagatttgttctaattccgcccatacaccgctgtccgtaaatcccattgtgcggtaaaaaagcgcattttcttttgaattacaatacacatagatatgcttctgatactttgccatgcaatgatacaataaactttgtacaacagaggtaccgattccttgcctctgatactccggtaaaacggctacagcccctataatggcggcatgttctgtttctgccacagtcattgcacaggcgatgattttttcttctttttcatatcctactgccgctgctcccccatgacggattctatgggacatatccaaataaaacggctcaaattccggtacatgaaacgctttactgcggcaagcctgcaatatactgtatacctgatgcaaattgggagaaatcgttctattggtctgttcaatcaaatgtgcattccatttcatgatagtccctgtccttgcaggagtaatatgcaattgttctgcacaggaagcatggcacatcagacaccttgctcctatcattttaataaatatacaaagttcatcaaaatccgcattttcatgagcaaacagcgtaattacgccgtccatttttgacagatatgctgtagggtgctctgcctcttctttcttttgtatccagaaatctgcaaatggatagttctcatacatatttgcaatacataaaattctgcatgcaaaagaatctgtttcctgatattgagctatcggggtcaagtctttcttttctgccaacacaatcatacttgttcgctgcctgcaattctctctgccaatttcataataagcgtttcagcagagtgaaaatcatcttgtgctatttgtcctaccgcagaatgcagatatctgcaagccaacgataccgcaatggtgcgcacaccgtcacgggtagcatgaatagcccccgcatcattgccgcctgctactgcctgttttatttggcaaggcaattgttcttctcttgctgtatccagtgccaaatcgtaatatgcgcgatcataaatggttcctttatccataaaggaaataaccgcacctttgcccaagctgcacacatgcttttcattaggaacacctgcaacatctgctgccgttgtggtttccacaacaattgcggcctgcggctgtacctgataagttgcagtacgagaccctcttgtacctacctcttcctgtacacaaaacacaaatgtcatatcataaggcaattcagactgaatcatatcaattaaaatggcacagcctgcacggtcatccaatgcacgactgcgtatcataccgttttgcgtatcaaacagagaatcaaaacagactgaatcgcccaaatggaccactttttcggcttcttcacggctggaagctccaatatccaaatacatatcatggattggaacggcttttcctctttcctcggagttcagcagatgaatgggttttgcaccaattacgccgtgaacaccattacctatgataacgcttctgccacaaagaacgcgtttatcaataccgcctacagtggcaaattttaaatagccatcgttatcaatatgggttacaatcagaccgacttcatccatatgtgcatttaacatcagttttgtttttgcaggctttgcaccttttttctctgcaatcacatttcccattgcatctatgataacatgttctgcataaggtgtaatttgcgctacaataaaatctcgaaccgattcttcatctcccgaaatgcctcttaatgtacacaattgttccagtaacttcatatttgccatgtcttttcctcctttctttatctatgatgaatgtaagaagccatcagtttggctacacgctctatatcttccaagtccactacctccacaggtgtatgcatataacgcaaaggaatcgaaatcaatgctgttctgacacccgactgtgtggtaccgatgacatctgcattggtacctgtggaaccacccattacttccatttgataaggaatctcttcgtctttcgcaatatgaaccaatttatctttcatttctcggtctaatgtaggggatacgcctatcataggtcctgcccccagttttccacatttataggctgccactccgggctggtcggcaaagctgacgtctaccgcaattgcttctgtggggaaaatacggaatgcgcctgtttttgcaccttggcttccggtttcttctctggtactgagcaatatagtcagcccacattttagcggtttgtcatgcaacaattgtgcacagcgaatcagagccgcacaaccggcgcggtcgtccaatgcggcggaggatacacgatgattcaacaaagtacggggttcaccgttgatgataatgcggtcacccaaagataccttttgctctgcttcttctttggtcaaacctaagtctaccgccatcttatcaaccggttctactttattgccgtcatcctctaccaaatgaggcggcagacaacatacaattccggttaacgtctcatggccgtataccgttacgggagcgcccggaagcacacggcggtctacaccgccgcatggcgctatatgcagaaaaccatcttcatcaatctgtgttacaatcattccaatttggtctatatgggcgtctaacatcacttgacgctctgcatttttatctcccataaaaccaatgacatttcccatatggtctatggttacatctgtacaatatggctccaatgctttttttgcctgaagtgctgcaaagtgctcatcacccggtgtacctgccgcactgcaaagctgaaacagcatttcttttaattgttccatagtacccctccttacaacgcatttacgatattcttaaaatgatttcctctggcttcaaaatttggatataaatcaaaacttgcggaagccggtgatagagatacaatatctcccttttgtgcctgttctttcgccaaagcaaccgccttctccatagagttggcatgtaaaattacaatttcctgttcacagtagtttggcgctgcttttacagcagcttctattttatcggctgttgcacccattaaaattaatgttttcactttatccataataattggaccaagtgtatcgtatggaatttgtttgtcatatccgcctgcaattaaaattatttttctgtcatacagctgtaaagttccgttcgctgtcctggttgggctggttccgatagagtcattgtaataagaaactccgtctagcactctgaccaactctgcacgatgcggtacccctccaaagttttttgccacttggcaaattgcctcatggggaacatctccccacactgccgttatggctgccaaataattttccacattatgttttccgggaattttaatctcactgctatgcagtacctctgtttgcgtttccccttcagacatgacaatcattccatcttgccttaaatacgccccatatttgcatggttttgcactgctaaacgtgaacaattgtcccctgacatcacttgcaaacgacatggtcagttgattttctgcattcaatactgttttggacgctgctgtttgatgcagtaccaaattgcgttttgcctgtacatattcatccatatctttatgcatatccaaatgattgggagaaagattggtcaccactgcaacctttggactgcggcgcatagaaatcagctgaaaactggataattccacaaccgccacatcgtttgtatctatttgctcaatttcgggaagcagaggagtaccaatgtttccgcctaagtgtattcgtttgcctgccgcttttaaaaattctgaaataattgttgtggttgtagtttttccgtcactgcccgtaactgcataaataggacaaggacaaaggtcaaaaaacacttccatttcagatgttacaacaattcctttttctcttgcctgttccagctcttttgtatgaaaacgcatgccgggagtgcggaacatcatatcaacgtccaattgctccaaataatgttcccctaattttaaggtgatacccatttgctccaattcttctcctgtttttccgagctgttctttttctcttttgtcacaggcaaatactattgcacctttttgacgaaagatttttgccaacggtaaattgctgcctccgattcccagaaatgcaatcttttttcctttgatatcttcaaaataggattccactctactatccatcgcaatgcctctttccattttgtactcatacaaaaacatagttatttttattatacgttttgggactgtaaatagcaatacaacaccacaatatgtatgtaaaatttacaaataatactgcatgtttctctaggattattcctctttttatggtaaactaatcacaattgcgtaagagaatccatcataaaaaacgaaacataaaaaggggtaagtatcctatgctgatagaattaacagaacataagaaacatatgaaagaacataaaaaagagaaaaagcaattacaagacgagctgatggttttgcagcagaccattcgggaacatcaactgcctgtcattatattatttgaaggatggagcttttcaggaaaaggcacatttatttccgaactcatgattcattttgactttcgccatttaaccatgcataacattactcctccgacagatgaagaaaagcgccacccgtttttatggcgccattggaatatgcttcccaaaaagggagaaatgtctattttggattgcagttggtatcaggacatttcggcatacccacttttaaatcaaacggatgaggataaaatagaagaacgaaccaaagaaattctacagtttgaacgtacactccatgatgcaggttatattatcattaaattctttcttcaaattaacgaaaaaacgttaaaaaatagaattgacggtttggaaaataacagtgcaaccaaatggcgcgttacggaaaaagaaaagaaacaatatcatcaatatcaccatttttataaagtgtaccaagatatgctggaatctaccaatacgggaattgcgccatggcatgtggtagatgcttcttatttggatgaagcgtctgcatttatttttgaaacggtcatcaataccattcaaagttctgccagtcagttggaaaataaaacatggcctattcttatgccttccgatacctatccaactttaaaacacgaaccgattcaaacggttcctctgggacaaaaaatatcagatgatgattatgataaacaattaaaaaaattacaaaagaaattgtttgacctgcaatcacgtttatatcgaaaaaagattccggcactgtttctgtttgagggctgggatgctgcgggaaaaggcggctgtattaaccgtgtttgccaaagcttagaccccagaggataccaagtacggcaaattgcagctccgtcggaagaagaacgccagtaccactatttgtggcgtttttggcgcagcattcccaaaacaggacatattacaatttttgaccgcacatggtacggccgcgttctggtagaatatattgaacaattctgcacaaaagaagaacaaattcgtgcatacagtgaaattaatgaactggaaaagcaattgacggactggggcgctgtgattgtaaagttttggctgcaaattgataaagatgaacagctgaaacggtttaatgaccgtcaatccacaccgtcaaaacgatggaaaatcacccctgaagattggcgtaacagggaaaaatgggacagctacgaaattgctgtaaatcagatgttggaacacacctctacagaatttgcgccgtggcatgtggtccccacacaatgcaaaaagtacggacgtatccaagtattggagcatatcattcatgccattgaacaaaaattacagtaagttgtttcatacaatttacaatgctcacaaaattatataaaatttctaattgtgtctatcataatcgacaaaaaagtgataaaatagagcagacataaaaatatcacttcagttaaaaattgcggaggttttgattcatgaaagctgtatatcaaggcaaaacaaaagatgtatttgcgctggacaacggaaattatttattgaaatttaaagatgatgtcacaggcactgacggtgtgtttgaccctggcgccaacacagttggacttaccattgacggaattggcaaagaaaacttaaaagtatctatcttcttctttgaaattttgaaaaaagcaggcattcaaacacattatgtttctgcagatgtagaaaactccaccatggaagtactgccggcaaaatgctttggtaaaggtgtagaagtgatttgccgtaatcgtgcagtaggcagcttctttaaaagatatggtgattatgtaacagaaggccaacctctaaacgcttatgtagaagtgactttaaaagacgatgaccgtggagacccgctgattacttgtgaaggtttggatgcattgggcattatgacacctgagcaatttgaggatacaaaaaaattaacacaaaccattaatagcattatcaccgacactttaaaagaaaaaggtattgacctttatgacatcaaatttgaatttggctaccataacggagaagttatcttaattgacgaaattgcttccggaaatatgcgttgctataaagacggtaaaaaactggatcctatggatttaactgcaatgattcttgcataaaagaacataaaaaaacagcgcctgcaaaatatgcaggcgctttctttatcattttttcgataatgtattgacattgccgctacgtaaaccattaaaatgcaaacaggaggtgatgatatggaatataccatcaaacagctggcaaatctatcaggagtcagtacccgtaccttacgctattatgatgaaatcgatttattaaaaccaaaacgtattggagaaaacggatatcgtatatatgaaacggaacaaatagacacgctggagcaaattttatgttatcgttcacttggcgtatctcttgaagaaatttctcgcttacttagcgcgacaaatacggaaaaagaacaagtacttcaaagacatttaattgcattgtcagaaagaaaatcacaaatagaacttttcattgaaaatgtgagcaaaacaattttactcttgaaaggagacattattatgacagatgaagaaaaatttaaagtgatgaaacaaactatactatctgaaacagagcaaaaatacggtaacgaattgcgtcaaaattatggcgatgctatcatggctgatgcaaataaaagattatccgatatgagccgagaaacttggattcttcaagaaactttggaaaaagaaatccgtttgttattgaagaatgccgtaaaaacaaaaaatcccaattgcgaacaagctcaaaaggcatgtgatttgcatcgccaatggttatgcctgttttggcctgaaggaatatactctaaagcagttcataaagcattgggcgacagttatgtatctgacagtcgttttaaatcctattacgaccaattaggtgaaaactgcgcaaattttttcagagatgccatcgatatttactgttctaaatagccatcttcattccatatcaaataagtccccccacatcacctccacctaataaacccaaaataaaaagagacagaattatattctgtctctttttattttattcaatttcaggcagttcttctttgatggactcttgttcttcctcttctttcttcatggttttaatgccaaagataaagaacagaatgtggaacagccaaacacatcccagtacaatttgaccaatcggcactctcatcatcataacgcagccgattgccattaatacggttacaacagacatgattctaattttgaccttccaagtcatacctttgccttttacaaaagattccaagttctttttgtatagtttggtattaataaaccaattgtgcaacttttcagaacttttggcaaagcaaacggctgccagcaataaaaagggaaatgcaggcattaaaggaagcactgcgcctacagcgcccaaagccaaaccaatacaccccaatacaataaataggattttctttacttttttcatgtctgcccctccaatttctttttctctgattttgattctactacatgtctgatagcccataccggatgatgcaataacattctgggtcctgaaaaacgcataaccgcacgaattttttcacgcatcaccggcttataacaatgcactttgcagttggaacaaaatgtttttgtctccataaacggacacttatcactgcgcaattttgcgtattcgttcagctcatcacactcaggacataatgctccgccttttgtgtgatgctgctttttacaatacagttttatcatttcggttaccatacgcttttcccgttctcgtttggtttgtaccgttttcatcagctcatccttccgcgctctacattatatacatcatctgctattttcatggtggaagctctgtgggaaattaaaactacagttttatcatcgcttgcctggtgtaaggattttaagataacagcctcatttaagctgtcaagattgctggtcggctcatccagcaaaataaacggcgcattgtgtaaaaatgctctggcaagccccagtcgttgtttttcaccgccggacaaagtatctcccaattctccgacctgagtttcataaccgtttggaagactcataataaattcgtgaatagatgcctttttacatgcttgctccaattcttcctgagttgcgtcttgttttgcaatccgtaaattttgtgcaatacttgcatggaacaagtgggtttcctgtgttactaaactttccatgtctcttaaattatcggtgttgattgcttctatattggtattggagatttctacttttccctgctgtactttccaaaaacgcatcattaatttcagcaaggttgattttccgctgccgcttttaccgacaatgccaacaattttatttttgggtacagccatgctaatatctgacagaactacttctttgtcatatgcaaatgttacattttctacctgcactcctgtaaatgatacttccggttttcccgtaatatcttctgtcaaaggtgtttcttccaaaatatccaatacgcggttgcctgctgcaaatgtattttgcaacgtgcttcccaaatttgccaaagcaacgaccgggccaaatgaactcatcatagcaatgacggaaatcaataacccttcaaaactaatcatgttgtttacgtataacaaagatgccgccgttaacatcaacaaactgaaaattaaaataatggtattggtaattgccatatttcgtcccatatattttttttgcttttcctcttctttggttaggctatccgtgcggctatccaactcttccaaacgctttttacctgtttgatattggatgctctcacccaggccacgcagactatccaacacaaagctgcttaaagagccggattgctcacgaaactgattgcctgtatctccactcattttggatacaatcattggtaccgctacaccaacaaccaaatatgctgccaatgctaccagtcccagcacccaatgaatgctcatgataaagccaatcataataacggacacggaaaatgcaattaaaataggagaaatggtatgcgcataaaagacttccaataattcgatgtcagaagtaattactgaaatcagattgccctttccttttccttctaatttagcagggcaaagtttacgcagcgctttaaacacatggtcgcgaatcaaagccaataatttaaacgcaatatagtgattgcaggcctgttctccgtaacggaggaaaccgcgcgcaacagcaatggaaattgctatggcaaatgcagcagccattggaacaggagattccatatgcagggcatccaacaaagcccagccgccgaaaatggtaatgaaaatagcacataaaaaaccgaccacgccaagcaatactgctaaaatcatataaccggtcaacggctttacaagacctatcagacgcatcattaccgtaagattgcttctctttttcatacggctgcctcctttccgtattgctccagctgtttctggctatgataaagctcatagtaagttccttgctgttccatcaggcgctcatgcgtaccctgttctgtaatactgccatgtttcatcacataaatatggtctgcttgtactacatttgcaagtctgtgagaaatgagaatgactgttttagtctttgccaaatgatagatttgctccataatatcgtcttcgctctctacatcaatattagaggtagcctcatcaaaaatataaataggactgttatgaagcagtgcacggctcagcgccaaacgttggcattgaccgcctgacaagttagacgccttttccaataagagcgtatccaaaccttgctcgctgcgcaaaaatgcagcaagttttgtttgttccagcacatgccacatttgttcgtctgtggcattggggtcccccattaacaaattatcacgtacagttcctttaaataaataactgttatgactaatataagtaatggtctgcattaaattactttcttcaatctcacttagttctacaccaccaatggtaatatgaccctgatacggtgcattgcggcccataagaatgccgcctaacgtagatttaccacagccgctttcacctacaatggctgtaaaactgccttgaggaaactgtacattgatatcttttaaaatttctcgttcttcattgtaacggaatcctacatgactgcatgcaatatcacagttatgatttggaactgtttttgttttttcctgaggctcttctaaatctaacaaatggaaaatcttatcgctggccgccataccgttcattgcgatatggaaaaaactacccaactgacgcattggaatgaaaaagtcggctgaaagcaaaataatgataatacagccggcaaaatcgatattacctgccgccaactgactaaccgccattacgataccggccgcagcgccgccaaatgctacaatatccatgatggaaatggagtttaactgcatggtaagcactttcatggttatttttctgaagtgctctgcctccacattcatttcttcattttttttcgcatctgcctgataaatttttaaagtggtcaatccttgcagattttccaaaaaggtatctcccaaagcagtatattgtccccaatatttagataacagtttttttgcaaatgtttgtaccagagcaatggaaattggaatgagcggaacacaccctaacaaaatcaatgctgactgccagttgataaagcatagcactacgaataaggtaataggagcaatcatgctgtaaaagaattgcggaagataagaggcaaaataaatatccagctggtccacaccttctactgacatttgcaccacttcagaggtagacactttactgttataagaactccccagtctcagtaacttactgtagattttatttctcaaagttttttttacagattttgaggacaagtgactcatacgagcagcaccaatggtacataaaaatcgtacgatgattgcccccaccgcaatagacgctaatacaataatagaagtaacatcttctgttttcgtcaataacttttgtaaaaagaaaccgattgcaccaatcatgacaatattggccgccaaagacagccattgtaacgccacatttaacgcaatatatttttttgactcaggtactgcctgaatcaaacgtttgttaatcatcattgtaacaaatcacctaatttccggagatgcaaatcatctcatcatttttattcattcttctgtatgttgaaactaactaaagttagctattactaattgatacgtaaaaaataaagcggatatcatatcccgcttagcaatttttctgcaaacattacgttttcccatgaaacaaaaaacaggaaaagcaagtatagaaatcatatcatattattttgtaaattgtcaagaaatgcagacacaattctatcttttgattttctttatccatccaccagtaaaaataaaggcagcctctacaacgaggctgtcttattactctgtttttgcaacatcttttctgtcaaattccaatcgaatggaaccgcctatgttatcagaggcaggaattaacaggccaattttatcctgtgtaacgtaaccaaacaaagatggcggaaatgattctgaaagaggatagtcagctgttgccagtttatccgcggaaacagttccgtttcgtaatagattttgtactgcaacacgcgccgtggtatcagattcactgttatctgctacaatctgatacaaaccatattttaattgataaaaaacattgtatactgaagcataatcattaaaatgtttttgttctcctgtttttaaatcaatgaccaaactatgcaaatacgttgtaggataacctgtattctcttccggattggtcagcgtccaacggtaaaccagcgacagagtttcaccatctaaaaaggtaacttcaacagttccttccaaattggccgtatcactgtattgttgcggtcccaattgattgcttgtttgaatcaattgatttactttctcttctacagaggcatcatccatttgtgacacagtaggataaaccaactttgtacgctctgtttcattcgttgtatctgttaaggtaatattatcattcataggctgttcagatacttcactggaagttgctgaagaagcttgagactctgcctgtgatgtaggttcacttacattggaagatgctgtgttcacattctgtgtaccgcagccatacatgacagtacctgctgccaaaacagcacacaaaagtagtagcgctttacgtttcaacaataaatcccctttcagtggacaaatatatattaatgatacaacaatcacaatataaaatcaacggatactctttagatagtatcaacctatgatataaaaataaacatcacacagcaagcctctgtgtgatgttttgataatctcttaatcttcgtataaatagtttcttgtcattggtaaatcgttatctacacctttggtaaataaaatttgatggatatcgcaaattccgttgtggaatacagaagcacatgacaccaagtacaattcccacattcttacaaagcgctcttcgaacatggtatctattacatcacgctttgcagcatagttttttgaccactccaataatgttttttcgtaatggcgtcttagactttccacatccagcgtgtagtagttatactcgccgattaaataaataatttctcttaagcttggaatgatgccgccagggaaaatatattttttaatccaaggatcaccgtcatgttcttgtctgccactgatataatgcagcaaaacaattccctttttattcaaaactttatcaatatttttaaagaacagagggtaattatcgcggctaacgtgttccagcatacctacgcttacaatacggtcaaatgtcataccggatttttcaaggtcacgataatccatcaggcgaatttcaacttgtccttccagaccttctgccttaatccgttcttgtccttttttatattgttcttcacttaacgtaatgccaacgccttttacatgatattttttagcagctgcaatcaatagatatccccaaccgcatccaatatccaaaagggtttgaccctcttttaaatttagtttctttaagatatgttctactttatgtacctgcgcatcataaagagtatctgtttcatgcttgaaatagccacaagaatagctcatggtttcatctaaccacaattcaaagaattcattgccaatatcatagtgggtcgcaatttcttgcttttgattctttttggaagtagatgttttcataattttggttaagccgctgaaatcgcttgcgaaatcttccagttttgcaagcaccatatttaaaatttcaaataaatctcctttttccaattccagcgttttatccatatacgcttcacctaaagccagagatgggcttttcatcactgcacccatatcaattccgccatttgctcgaataatggcttgcggttcaccttcacccactttaaattcttcaccatcaggaaattttactacaaaaggtacatcatcgaattttttcagtagtttttttacaatcatcttatcaaaagccatagttttgaatactccttttcctattgacatacataaagaaacatttttatcacaaacacatgaaaatatatactatctttatatcttacccaatattacggcgttgtcaatatcaaattaacactgttgtttacttttatttattttttacatttttatcacaaatagtagtagtttgaaaccatttaagaaactatgaataaaagcccccaattgggggcttttattattttaatttatgcttgcgtttgactctcagaacaattacaacagttatataagtaacaaatgttacacccgaaatcagtatgcccggaagtaaccacggtgttctgtatttcaacaccacatgattttcaccttctgtgattggtattgccataaagccaacattcgctttttctacttctactgtttctccattcactgttgctgaccagccttcagtatacggaatgctaaagaacaacattttgtcttggtcaacagtaatatttccttctacttttgtatcctctactgttaatgactcaaacttatcttgggcacgcgcctgtacattgggtagatattcttcattcatatccactgcatatacattgatatcatcaaaagtcatggttcctgaacccactgcaagttttatttgcataacatcttccgttgcttctcccaaagaaaccaaataatcatgattaccatagtaatacaaccagtccggatttaaataatggaacatggactcctgttctccgttaacaacagtgacatatctggtggtgtccaagtgcaaattcttaaattgaacatatatcgtttttccttttggaatattgacatttaacagaacttctccatttccacctactgtaatttcgttgtcagaaataatagtactttcgtttgattcttcaaatgtgtacgctgcctcaggtaaactgttaatatctgaagaggatttttccgttaaaccattcgatgacgcattatcctctaaaatcaaagaggacaacaatgtattctttttgtccattgtattgagtttgtcgtattcagaacgatacataatactatcatatgtaaatcctaacggtaatacatattgattttcgtgtacaattccagaatatccttccggtgtttctaccttttcataaccaaacatggacacacctttttctgttatctgatattttgcggacaacaaggtatttaaataaacgtcatttccaaatccaccaaaatagtggacaaagtgcaatccaatatcttgatctacataaaaatcataaatatctttgtcctgtaagctccagtagcccaccgtactatgatacggagtgaccaagctatcatttatcagtgaactagctacagaacgataaaagttatcatcatcagacaaatacgaggctgtctttcccaacccggtttcgtaacttgtacggacctgatctaacttattatatacattagacatctccaaaaagtttttgtcatacactataaagccgttcaacccaagatatatacacgtaactaccagcaacgctgattttgtaaagcgtacatattgcgtttttccaaagaaaaatagtatggacagtacaattaacataaagcccaggcccatataaatataaatattctctaaccctttcagccagaggcatagccctatataaacaacaatgcagcctgccaaaattcctgcttttactttagataattgatacaatttaggtaatacaactactgtgattaacgaaactaaaaatgcatatccaaacatccaacgatttacaggatatccaaaaccattaaagatgcttcctccaattggaatgagcataaatgcggataatacaataaatccaactcgtaactgccagtatttcttttctctggttataaacagaataatcagagcaaaaaaactgattgcggcaaaagacaatgaggtataattatcgccctctcccggaattgcaaattctgtaaaaaagagcttgtaataacccggatagtaaaataaacctgcatccaatagggaactgttacttacacggcagcttgataaaaatccttttatcattggtaaaaacagaaaggctcccatgcaagctcctgtagcaaaaaagccaatgcattttcctatggttgcaaaaaaagcttttactgtggaacgatattcaaataaatagcgtatgattccatatattacaatcaatagtaccaacatatataacatatagaaattattcaaaacgcttaaaaagctcattattacaaaaaaatgaggtttttctttacgaaagattttctccagacctaacaataacagcggcagataaataattgccgtgccaaaaaggctcataggaatgacaaataccactacaaatccgcaaaatgcatacaataagctgcctaataagctttcaaaccatcctctttttaagtaatggacatatgcaaaaaaggcaacgcccatgcaatacatttttgcaagaataataaaactatagagcaattctatttggctttgcggccaaatgcctgctaacaaggcaaacggatcgcctactacataataacctaacgtagtaataacatctgaacccaaaccaatatcccatgaccatgtaggtaacgtcccatgaattaaattgctgaataaatctttcaaccaatctccgtaataatataatgccggatagagttgatccgtaccatcatagtaacccaacaaggttttataatcatttctaaaaagcccaaggtacatgattgaaaatacgaataaaaacatatggaaaatataagtaaaaatgataaaattggtctctgttttctccaagtatcaaatttatttatctgctgacaaaagtaattcttcatttatttcttccttataaattctgattagactttttcttttcatttttatacagaaaaactatatatcctcctaatgcaacaatactgattccacttataattcctccaacaatcagtccgggaggtacaaaagataattctacagtatgcgttccttcagggattttaacagataagaatgtatcaaatactttttctgtttctactttctgcccgtcgatataaacattccaaccattttcatatggcaatgacaagaataatctttcattttctttcgcagtaacttcaccgctaaaagaagaactgctgtttttatttgcgttaaaactgccatctgccaggtaattataatattgttcaaaagtattcatatcttgtctgtaaacatatggtacacctaaaataaagctgttttcttttaattcgattgttatcgtgtacgtatcttggtcatccgaaattaaaacaggatgaatatagtcataatgtaccccatgaagataatggtcataaaatacttcttcaccattcagtttaacagaagcttttaaagcctgttctgaatgttggaaacacatatacacagggtctttctcttcatttcttttataggtgtaagaaatagaagccggagcgtccgtattgattttctctaacacaattgttccatcatcttgcgttacaacatgtaaattttctgtttgtgtgtctagcagttcttccggaacaaaaatatcttgctccagttcgggaacaaaacatttgaatacattgttttgtgatacaaacggattttcatcactgagttctaatgtatccatattttcaggaatggtaaaccctaaaccgagtgcaaaaggattttcataaattgtgtattttgattcttcataaactttttgatactgtgaaaaatattgattctctgagataaagtatttaatattgtaaatactgtcaaatgcgatggtatttccctgaccgttgctaatatatacactgtttgatttatatcctgttttattaaaaaagttcaccaagtttgtttttaaattagaactataatgggtaatagaaggataagaaaaattcatagcatcattaaatgtgtataagtaatctttttctattcttgaaacgctgtttcctgtcaatgcttttgctttttcaatcaccgatgttgtatcttcatggaagtttaagtaggatgcactgtctccataagacatttgccgtaatccggtatatgcattcaatgatacattcgctgtgcacacaactccaacactcattgttaaaacgatttgtatccattttttattttgcaggtacacaaaatacaacaagacaaaaaagaatatgataagccctatatcca

SEQ ID NO: 1580 - DNA, 32759 bp, Unknown
  16S sequences of unknown bacteria
tgcttaccgcgcgcatgaaggagctgggccttaaggaagaggattactggtggtatatcaatcttcgccgctacggcggaaccaaacacgcgggattcggacttggattcgaaaggataataatgtatcttacgggcgtaagcaatatccgcgacgtcataccttatccccgcaccgtgggcaacgcagagttctgacggattaataaaaacgcgcgataactcttgtcattgctttttttgaaaaagaacgaaaatcaaagcctttaaagtataaaaacctccgcttcggataagaaacggaggtttttttattgcacataatcgggtcttgttttttgctgacttttttatggggataaggcttttgcctaagattttaagacaaaggtcaatatcggtttttgtaattttcttttgctaaaagcgtgtatttaagcacaaactcggtttttgcggcagtataggcgtcgcggttgaattcatgctttttccaaagcgacagtttcagtttttcgtactcgcgggcgatgcctgcgtgttcgatgagataatcgcggaagtaaagttcattgttatctccgtaaagacgcaaatgaaggtgaaagactttttccgcaaaaccatgtaccgtgtagccccgattaaaggatttacggttatttccctcgctcattttgatataaccgttttgttcgatagcctttgcggctttttccatcgccgcagggtcatgtgcttcaacaagaatatccacaatgttttttgccattatgtctgctatcgcggtgctgccgatgtgacttattctgtatccgccgccgataaaagaaattatcctttccttttcctcacaaaaccaatctttccacaaagggttgtgcttatgaagggaaacgggaaacagtttccgcaattcctctatggtcatttcggataaagctttacagcgcattaatttgtacccgccgaaaaatattttaataattatactccgatttacggaaaaacacaaacgcattgcggggacaggcgaatttcataaaagcgttgcgcgtcgtttaacggtatagttttttttactgcaaaacaatagatataattaaaaagtcccgaagcgaagtaagcttcaggactgattaatggtgccgccggtcggggtcgaaccgacacggtatcactaccgcgggattttgagtcccgtgcgtctgccaatttcaccacggcggcatggacaacgttagtattttatcatattgcgccgcgtttgacaagcaaatgattgataatttgctaaattcgttgtataataatcggtggaataagtattgtttggcgaaggaaagcttaaacgaggaggaaacgcaatggaaaacatgcttttaatagacggcaacagccttataaaccgcgctttttacgcgttgcctccgcttaacaacaaaaacggcgttcccactcaggcggtatacggatttacaaccatgctgataaaagctatcgaggactataagcccaaatacatcgccgtggcgttcgaccttgcggcgcccacgttccgccataaaatgtacgacgggtacaaagccacgcgtaagcatatgcccgacgagcttgccgtacaacttcccattctcaagcagcagcttcggcttatgaatatttccgtagtggaaaaagagggatacgaggcggacgacgtaataggcactcttgccgccgataacaacgtaatgacatatataatcacgggcgaccgcgacagcttgcagctgatagacgacaccacgcgcgtggtgcttaccaagcgcggaataaccgaaacgcttgtgctggacgaagaaggacttaaaaaagaattcggactgactcctgccgcggtagtggactataaggcgcttgcgggcgactccagcgacaacattccgggcgttgcgggcgtgggcgacaaaaccgctttaagtcttatagagcaatacggcagcgtagaaaaaatttacgaaaacatcgattcggtttcgggaaagctgggcgaaaaactgagagccggaagggattcggcaaaactttcttacgagcttgcaaccataaaacgcgacgtgccgcttgaggaaaaaacggaggatttcactttcgattttcctttttccgcggcggtaaggacgttttttgcggacaacggattccgttcgctcataaagcgggatgacatctttgtagcgcaagccgccgtaaagaacgaagttaaaacggaattcacgcaggaaaaaatcagttccgttgaaaaaataaagcaaatactcttaaacgcgcaatctttttccttcctgttagcggacgatatacgtttcagcacggacggcaaaaccgaatacattgtaaacctcagtaaaacgcttattgacgaagggcttgccgtgcacgaggcttgcgccgcatttaaaccgtttttggaagacgtaaaaatcaggaaatatcttttcgacgcaaaaaaagtaaagcgcgtgcttaaatcggagtgcgcgtcggtaaagggctacgatgacgtaaagctcatgcagtatcttgccgatatgcgcgtaaacgaggacagcgtcgaacttttgatggagtcttcggggtatgacaaaaactttcccgccgcaggcttatatctcgccgcggaaaatcttgatgccgaaataaagcggctcggcatggaaaagttgtataaagaggcggaactgccgcttatcgacatccttttcgatatggaggagcgcggggtgaaagtcgacgtgcatcttctcaattccatcggggaagagtatgtaaagcaggcggcggaacttaacgatataatctgccgtatagccggtaaaaaattcaacgtaaattcgccccgtcagcttgctgaggtgctttttaccgaccttaaaataccttatcccaaaaagagcgccaaacattccacaaacgccgaaatcctggatatgattcaggacaaacacgaaatagtgccgcttataggaaaataccgctttataacaaaactcaacagcacttatatagaagggctgagaaaacttttgtcgcccgacgacgtaatacacaccgactacaaacaaacccttaccactacgggaagactttcaagtgccgagcccaatctgcaaaacattcccgtccgcgaggaggagggtaaaagattgagggggctgttcgtggcgagggaaggctatactctggtatcggcggactattcgcagatagaactccgtctgcttgcgcatttttcgggcgacgaacgaatgcttgccctttacggcgcggacgaggatatccacgcgcgcacggcggcggaagtgttcggcgtacccattgaaaaggttacgccctccatgcgtcgggaagcgaaagtcgtcaacttcggcataatttacggcatgagcgattacggactgtcgcaaagtctgaagtgctcgcttgccaccgcaaaaaggtatatggatacttattttgcgcggttttccgcaatcaaaccctatttcgattcggtggtggaaaacgccaagaaaacgggttacaccaccacgcttttgggaagagtgcgctatattccggagctggcttcccccaattacatgacgcgccagttcggcgagcgcgccgcaatgaacatgccgcttcagggcagcgcggcggatatcataaagcttgccatggtttcggtggcggaaaagcttaaagggctgaagtccgcgcttatacttcagattcacgacgaacttatcgtggaagctgctgacgaagaagtcggaaaagtaaaagccatacttaaagactgtatggaaaacgcggttcagcttaaggtgccgcttaccgtggatatttcgtcgggtaaaagctggatagattgctgataaaacaagtttgcatcaaagttttaaggaagtacttatgaagaagtatgttgttggtataacgggcggaatcgccagcggaaaaagcgcggtaagcggaattttggagaaaaaaggcgcatatattatcgatgcggacgtcgttgcccgcgacgtggttgcgcccggctcggaaggcgaacgtttgcttaaagcggcatttccccgggcttacgaaggcggaactcttgaccgcaaagtcctgcgcgaagaggttttttcggataagaacaaacttaatcggcttaacggaattactcatccgcttattcgcaaggaaatagaaaaacgaatagaaaacgccccttcggaaattgtatttctggtagtgccgttgttgttcgagtcggggttcgacaacctttgcgattacatagcgacggttgtgtcggatgaagacaagcgtataatcagacttaaaaagcgcaacaataacattacggaagaactggcgcaggaaataatacgcgcgcaacttagcgaaaacgagcgcattacgcgttcggacgaggttatcgtcaacaacgaaagtcttgaaaaactggaggcaagagtgaacggcttttacgaaaaaattcagtgtcgggagagttaaaaatttcctatctgattgcgggtgcggctttatcagttcttcttctggtgcttgcctctttaagcgcgctttccttacgctatccgcttgtttaccgcgacgagattctgattcagtcaaagtccaacggcttaagcgcggagcttgttgccgccgtcgtctggacggaaagcaagttcgacgcgtcagccgtatcgggtaaaggtgcgtgcggactcatgcagctgatgccgtccaccgcggagtggtgcgctgcaaaaaaaggaatcgactactcggacgaaatgcttttcgacccgaagtacaatatagagttgggcacgttttatcttaaatatctaatgaataaattcggggacgaaacgcttgcagttgcggcatacaacgcgggcgagggcaacgtgacaaactggataaaacaaaacctcgaagaaattccttttcccgaaaccgacatgtacgtaaagcgcgtcatgagcgcaaaaaacgtatataaggcaagattgaaagacataaaatcaagcgactgaaaccgttgtttgttatggacgtttgagatttttaaatcgttgtgacgttaaaagaaaaaccaaaaaaggcttcccgaaacaaagggaagcttttttgtaaatgattgagttacttgtttttactttttattattatttcagggctttttcgggacgaataaaacattcggctgtccgttattctattcccgcgtttcgtaaaattcgcttgcattccaccaacaattcttctcttaaaaacgacggcgacagcacctttatgcttgacccgaagcttaaaagcttgtttatcagcactctccctgagtacagtttggcttttgcaatatacttgtaaccgcgctcgaaaaccgcgtcgtaaccaagccactcctcgatatcgcccaggatagtggaggaaaattctatttcgagatccacggtttcgaaatcgtcgaagttaccgttaagtttttcgtacacgtcgcaagctttcctctcaaaactctggtcggtgggcagcaaggatttgatgcgcgcaagtttgaacagcctgaaatctttcctgtaatgacaccagccgtagacgtaccatataccttctttaagcacgcggtagtaggggtcgaaaagcctgtgagttttggactcgtatctgtcgacatacatcaggttaagactttttttattgtctatcgccttttgcagaatttccattttggcgcggtaaagcgtgggattgctccatggacccgcgtcgatgattaaagtatccgtttccagaaggtaatgttcgtcgttctttctttttgccatgtatttaagcttgtcggcaatgctttcgttcagcttgtcgtcatacctgtccatcgatttaaggcaggtgatgatgcgcgctatttcctgctcggaaaaaaacgatttgtcaaattgaaattccgacgaaatttcgtatcctccgttcttgcccttgatggagtaaacgggtacgcccgtcgccgcaatggcgtttatgtagcggattaccgtgcgctcgcatatctcgaacttttcggcaagcgcttttttcgtggttttgccgttgttgagaagcgtgattagaatggaaaacatcagcgaactgttgtgcatatatttacccctgaaaaaaactgaaatttctgaaataattttataatggtgacaatacgttgtcaagtatattatgctataatgaagaaaaaacagcggaggaattaaatatgtatatccttatcgacgcatatcgtgacgtaaaacccggggacgtggtggtaatcaaatccgaccgtgcgggcggcataggcgcgtttttgatcggcggcgagaaaataggagaattaagcggctctcagcccgaaggatgtctggatttttggacggtggcaagcaatctttacgataaccgcgtgttgtgcgacgtcgccgtaaagtgcggttcgaccgtaattctgcacaccgaaagccgtcttttcgcgtcgcttaagacaatgcgccgcgtggaaatcgaaggttacggcatggctgtcgccaaataatcaaaaaatttgcttaaaccgcgcttattcgttttgagaaaaatttattttatgctaaaataacttggtaatagtgtaataaaacgaggagtgcgttttaatgaaagttttcaaatggatttattatcctgtgttgcttattctcatcgttgcgtttgtcgcgctgggattcgtcggggttaccgcttccgacaagtcttccgggttcgacgccgcgacgcgtgctgaagtggacaaccacatcaaggcaattacggatttacacagtcacaaagccaactacgacaacaatctcaaatcggtttcggactacatccgttattccgtcagggaagatcagattattcagtatcggcccaccagctatcccgattcggaagaagggcttaacaccgcctcttacgcgcttacaagcgaaaacggcaaaaccgtcccgcgtccgtcggtagtgacgcaaagcgcggtcatacttgcttccaccgccgaaaagatgaacactctcgaggacggtacttattacgttaaccgcacggtaaacaaccttgtcgttgcaattcccggcgcggatacgttggcaaagtatgccgaccccgaaaacgaacagctttcttacggcgacgtaattatgttcaccgctcattacgatacgtccacgctcaacgcgggcgcggcaaacaatacgacggcggtcgccaatatgatagaagttataaatgccgtggctaaccgcgaaacgaagtataaaaacgacttgctgttcgtgtttacttcgggcggggaagaaggcgctttgggcgcatacgctttcaagtaccagttcaaaggtttcgacgacatttattcgcgcgttaaactggcgtttaatttcgacgcggtgggaggcacgggcgcactcatcatgtcggaagtaacctcagacggcgcggctctcgtttccgcttacgcggatttgggcggcaaggcttactctagttcgctttattcctccgttttcgccgccgaaaacaagattaccgatttcgatatttacgacgacatcgcggcttacgatttcgtgacgctcggcaatgaaaattccggtaccgctttcgacaccgtagataatcttgactcgggcgttgtaaacgctttcggaaatatgatgaacaaagccgtatcttatttcggcgacaaaactctgggcgactatgcggcgggcggttccgcgggatttttcaattacctcggcgccacgatttggtatgctgatttcgtcgcctatatcattgcggcaatcataattcttctcgtcgcggcaatagttttcttcgccgtaaggaagaaatccgtcaacttcgtcaaggcaggtttgggtgcagccgttcagctgcttaccatgcttgcgacgcttgtctgcctttacgtcgcgtacctcatagttacgctgcttcttacgggcttcgaggtaatcaatattcacgccatcgccaccgtggttaccgcaaacgtaggcttgcttgtttcttcgattgttcttgcgtttgcgctttcggttattttctatatagtgttcaaaaaagtgttcgccgtccgtgcgaccgacgtcgtccgcggaaacgctttgctcattgcgcttctggcggttattttctgctttgccgcaccccaggtaagctatatgttcttcgtcgtagcggtgcttcagcttgcggttatgcttgtcaccgcgcttaccaaagataagttcaaagcaaaattcggcttcgacatggaaagactgttcctttacgtcattcccgtgattttaatgatgcccgtgctttgcggagaattatatcttgcgtcggccgtgacgcctgcggtaatgcttccgctttatcttacgatgtttactctttgcggcggcgcgattatgccttatgcggactatctcaagcgtcctttgggtaagcttgcggccgcgcttccaatgcgcacgataagagtagagcgcgtcgttaccgaaaaaatcgaagacgccgcgaaaaaaggcaagtttacggaagtaactcatgccaaagtgttcaaggaaaaagtaacccgtacctattccaatgcactgggtattactcttgtatcgtttttaggcgtggtggcaatagtgttgtttaccgctttcggcggcggcttcggcagcggagtttcttcaaactattcctactatgacgaaatttacaaggacgcgcttgtttacgtttgcgacgacgacgtcgaaacgcttgaagtttacgaccttgacgcttacaagtatatcgcgcgctatgtcgacggatttacatgggacgcaggtaagggcgcttacgtcaggacggatacggcaggcggcataggccttaccaccaagctttcggttaccgcggacagcgcaaacaacaagcttttcactgtcaactcttccgagacgggtacaagtcagattaccgttacgctttcgggatttgcggcaggctcgattgacaaagtcaccttcacgcttgaaggcggtaaggaagtcgagtacgaccttacttctcagtcctccgaagttcttacctttatacttccgtatgccgaatcttcaggcttcaccttcgaaatagaaggggataccgacagcgtggacgtcagcgtcgaacagcgcggttccaatatccagcttgcaaacaactactcggtgttctccatcctcagcgaagcttattcccttgatgaaacaataaaagacaatctcaccatgaacattatcatgaagacaagctcgacgttttccttttaaggactgattaattcggtactctgcttaaatttgtaaaagcaaggcgagtaaaactcacttatcgcttgtttgctagtcggcttggctgaataaaacagctgttaaggtgtactttataaaatcgctcatcgtacgcaaggaatcagcacttataaaacagcgtttcgttggcagccgtatacttgataactaaaaaacaatattaaaaaagcctttcctcggttaaggaaaggccttttttaatgtaagttacttataaattttttgtgtttcttagaaaaggcttttacggatattcggcggaaacagccgtctttaatttattcggagcagaagtccgttgccttcaaattttaagcgcgcggcgcaaagcttaaaacaagtttcggatttgtttaacggccggaagcagttatcccggcaagccgcgagttgtgcatactcgatgtcgggcaaaattacacttgttctgtgagcgacatggcgtcgcattaaagcgtgttcgattgcggcaagttctgaagaaagcaagacggataaaccgccgattggtttatttttaacttgcgtcgtctcgcgtcaggcggggagaaaaataaatccgaaaattactccaaagcgtttttcatcgtgtaaaatccgctctttttggtttttatgaattccgcggctttaagcgtgcccgttgcgaatattttgcgggataaagcagtgtgcgataaggtaactatttcgtcggttcctgcaaaaataacgtcgtgctcgcccacgattgtgcctccgcgcacggcgtgaatggttacgtcctcgggatttcttttggacaagccttctcttccgtaaaggaattttgcgtccgtttttacttccctgactttttcggcaagcatcatggcggtgcccgacggcgcgtccgctttctgattatgatgtttttcgataatctctatgtcaaaagagtccttaagcgtctttgccgctttttccacaaggtcaagcaaaagatttacgcctatgctcatgttgcccgatttaagcaccgcgactttttcggaaagcgcttcaatgcgctttaactgactttccgaatagcccgtggtggcgattacgacgcccttattgtatttctccgccaaagcgatgacgttgtcgagaagttcgggacgggaaaaatccacaatgacgtcaaagtcgcaggggaccgcgtcaacgtcggtgtaagtttttatttcggggtgtggaaccctgtcaaatccgcccgttacggtaaaaccttcgccggcgcgcgtagtttccacaattgctttccccattttcccgctgattccgaataagaaaagtttggtcataaacaggtaaatctccttaattgataagccccagctcgcgcatggagtcacgaagtttcaaagcgttttcttcttccatttcggtaagcggcagacgaggaactcccgcgttgaatcccaataagcacattgcctttttggcgggaatggggttcacctcgcagaacaggtttttgataaaaggcaaaagcttaagttgctgaactctcgctttttcccattctccgcgaaaagcgctttccgtaatgtttcgcataagtgcgggcgcggcgttggcagcgacggaaataactccctttgcacccaaagccattcccacgtatgtaagcgcgtcttctcccagataaacgtccattttaccttcggtcagccgcacgagctcctgaagctggtcaatgtttccgctggcttctttgatggcgacgatgtttttgatttcgctcagtttaagcgcggtacggggcagaatgttgactcccgttcttccgggtacgttataaacgataatgggtatgtccacgctgtttgcaacggcagagtagtgcgctataagaccgttttgagtacacttattgtagtaaggcgtgacgataagcaatgcgtccgcacccaacgcctgagccgaaattgcattttccaccgtttcggcggtgttgttgcagccgcagcccgcgacgacgggaactcttcccgcgacttttttcacggcaaaagatattgccgcgcttttttcttctttagtcatggtggacggctcaccggtggtgccgcatacgcacagcgcgtccgccttgttttctataagaaattcgataatgttgccgaacgcatcgaaatttatgccgttttcgtcaaagggagtgattaaagccactccgacgcctttgaaaacgctcattttttctctccttaaaaatcagtaaagattatttgtttctttttgcgataattctttccgcaatctggacggcgtttgttgccgcgcccttacggatattgtccgcaaccacccacatgtttacgccgttttccacgctgtcgtccagtctgattcttcccacatatacggggtcggtgtcggcaatgtcaagaggagtggggtatacgccgtttttgacgtcgtccatgacgactacgccttccgcggatttaagcgtctcaataacgccctcaagcgttacgggcttattgaattccacgttaatgctttcgctgtgtccgtagtaaacgggtacgcgcacggtagtagcggtgattttaagactttggtcgcccaggattttgcgcgtttcgtcaatcattttctgttcctctttggtgtaaccgttgtcgaggaatacgtcgatatgcggcaaaacgttgccgaaaatgggcttggggaactttttgggcgcggcgcctttaataccttcctcaaggtcggtataacccaacacgcccgcaccgctgaccgcctgataggtggagtaaactattctcttaatgccgtatttcctgtgcaggggcgcaagagccacgaccgcctgaatagtggagcagttggggtttgcgatgatgcccttattccagtctatgtcgtaagcgttaacttcgggaaccacaagggggacggaggggtccatacgccactggctggagttatcgataaccaccgctccgcaatcggcgaacacgggggcgaatgttttggaagtgcctgcgcccgcgctgaaaagagcgatatccacttttcttgcgcgcacgttttcttcggtaagctcgattacggtatattccttacccataaactccacttttttgcccgcactttttgcggacgcgaaaagataaagttcgttgatgggaagttttctttcggcaagaacctgaagcatttttcttccgaccatacctgttgcgcctactacggctacgttgtaattcatatatgatttctccttgaaatatgataacttaataaaaaacggattgataaaagcccatgaagtctaagtataaaagcgtgcagaattttttacgtgcttaaatgagtataaaaaagagcgggcgaaaggggttaagcttaaaaagtccaaccgctttttcgcgttaaccgtcctgccgcaattaagctttttcacaagaagaggaaacggcagcgcagcaagcaggttaaaaaaagacagccaatcgggtcaagagtgtgccgtttgactgtcttcggatgtttaacgaaaaacgcgatacgtcaaataatgtgctccactcttacgaatgacagttgcagggtattagccgctgcacccaacgagaaaactttgcccgaaagttatccgtttcggcgtcgataccctttcgcggctcgggtcatacgggcgaccttgatggaaaccgctaataatgttcgacgctcctcattatttactcgttaaggataacacaacaaatcgggctttgtcaatcaaaataaataaacgagtgtaaaaatgattgaaaaaaaagccgaaatgttatataatcgtatgcgtagccgaagtaatgaggttaccgcggaggaaaagcaatcgcatcagtcaatttacaaaacgacctttatcgcataataacggaattttgtttttccgtcaaggacctgaatcagtcgctgtacggtcccgtactgaaagacgcggggtttaagcgcaaagcgggattttacctttacgaaggtcgcaaaaaatcagatttttccgtgattatcgacggagcggacgaagggctttgtaaacttgcgctcagtgccgccgtcgcccttaaggaaacgggcatcaaacccgacgtcattattcccgttcccggggagggagaacttttttgtgcgcccgagcttcgtttcaagcggaaaaactcgcttttcgtaaggcttgtccgcggaaaaacgggattgttttgttcgggcggtaccgttcttagcggcgcgacggaaaccgtgtttacttttcgtgaagaaaaggaagcggattcatacgggactgcttttcaaaagcttacgggtaatctttctaaaagaaatttcgtttgtaaaagcgttcggtcgggaagagagattaagcttaccgctttatggtacgactcggctgaccttgaaacgcttaccatggcggcggcgcggcttacggcggacgcggatacttcggtagcgacaactttggcgtattcgccctttgagcaggacgtgggacttttgagtaaagtattcggtaaaataagacccgacggaccccttgaaccctgtttcgacgtcaaaagatacatcgccgtaaacgaaaacacaaggcgtctttacgccgtcgtgaaagtatcggacgaaaataaagccgcggcggaaattgctaaacttatgacggctgtatttacggaggaataataatggcacagaaaaaaggcctcatttacagacttactatgggcaaggacaatttgcccgattttacccctaacagattgcccggttcgcgctgggcggtatttaaggacgtgtttttcaaccgtttcggggctatggcgaaaatcagcctgcttacttttctgtttacattgcccgcagtcgcgtggcttgtgattatgaatatcgtattgcaggtggacgctcagcttataccgtattcgtccaatatcggcataggttatcccgtggtggtggatgccgcccttatgggacagtatcgcaccttcatgtacaacgtgcagacttatgcgatactgattccgctcatcatgattgcgggcataggctttgcgggtgcgtttcacgtcatgaagcttctcggctggggcgagggcgtgtccgtgggcggcacgtttttccagggaataaaaaagaactgggcgtcttttctgtggattttcctttacgcgggcatatcgcttttcatgttcatgttctgtattatggcatacggatatcttacggaaatcaatacggtcgtcagggtgataatgatagcgcttgccgtggtacagtttgtccttatgctctgcatgcttttgtatctttgcacgcagacggttacttataaacttggatttatggggctggtgaaaaacagtctgctgtttgccgttgcgctgtttccgcaaaacgttttctttatcgcgttaagtcttttgcccgtcataataataatgtttcttcctttgcagatcgggatattcttctggatgattttcctgtttttgggtattgcgtacattgtgcttgtctggacggtattttcgcagtgggtatacgataaattcgtaaacgacaaagtcaagggcgcggtcaaaaaccgcggtatgtacgttaaaaacgcggaggaagagcgcgccgcggaaatcgaacgcatcaaaaccagaaacacggtttacggtgcggcttacgtgtcgcgcagactttccagcatcgacgacggcaaaacctttactcctctcagcaccaatttctcccgtaacgacttaaagaaactcagcgaggaaaaggcggaaatggaggaagagataaacaacgaaatcgccgaggtcaacgctcagattgaagaggagcgtattaagtgggaggaagaacaggccgccgcgaaaaaacgtcgcaaaaagaataaaaacaataatcagaacgcgccggttttaagcgccgaagcgcaggaaaaggcgcagaagaaaaagagcaaaaaagcagttaaatccgcttccgaagacgaaatagctttgcttcccgtatcggaagaggaatacgtcgaggacgaggaagaaaaaaagtaaaataccctaaagggcttaaggggtgacaaggaatatgtacgacgcgcttgccgcatactacgatagattcatgtcggacgtcgattacgacgcctggataaattacttgaaagatattttgggcgagcgcgtacgcggaagggacgtaggctgcggcacgggcagattcacgattgctttaaaagaagcgggctatctcgtcacgggcagcgactcaagtcccgaaatgctgaccgttgcggcggaaaatgcgcgaaaaaagggcgtgcccgtcaattttcttcttcagcctgcggaaaaactcgaggatttttcgccccttgatttcgtaattgcgcagtgcgacgtcgttaattatctcaaaaatcccgatacttttttcaaaaaagcttataaagctttgaacgcgtcgggagtattgacgtttgacatctcatcggaatataaacttactgaaatactcggcaacaacgtgtttaccgaaacgcgcgacgacgttacttacgtctgggaaaacttttgctatgaaaaggcaaggcgcgtggatatgcgtctgacatttttccgtaagaacgagaataattattattctaaaagcgttgaaactcagactcagtacattcattcctcgtccgacatcgaaaagcggcttagggacgcgggattcaaaaacgtccaaacaaggggctttctgaaaaacgttgctccttccgaaaaggaacagcgtattcatttcatagcttataaacaggagtagtatgggaaaaatactcaaattaaataacgacgccgattattattacgggcgcggtatagataaaagcgaggcgggcggttacatagaggctgttgacagcttttatatgtcgcttaaacgcgatcccgaaaacttgtggatttattccgaaatcggctataattatctggcgttggggctatacgagcccgcgcttaaaatatattttaagatattggctctcgacaaatacgcggatataggctatctgggacttatgcagtgctttatccatgaaaatcaggttgccaacgcgctttattatctcaacatgggcattgacaacggcgcgctcgaccaggaatacgaggcggaggaacaggacgtcccggtaagcgagcggcctaaactcagactgctcaacaaaaacgacaacagcgaaatagtcgcgcttgcaaaaaagatgatagtaagcggcgaaagcgattttgcaaagcaaatgctttccgcaatacccgatacaagcaaacagtatgacgaggcgcagaatcatttgtcttttctcgcttattcggaaggcgattacgacaagtgcattagtctttccgaagcggtaatatcaaacaatccggacgatctttacgctcttacaaccatgatgctggcgtactaccgtaaaaacgacttcgcaaaaaccgaggaaatcgcttccgttatcgacgggcttgaattgaaaaaccgctcggagatttacagagtcgccatgtgcttcatggaagtgggggacgaaagccgctgcgtaaagtattttgaaaaacttttcaatctttgcccatatgaaagagatactactttggcgcttgcgattgcctattacgatacgggaaaaacagctcaggcccgcgcatatatgctggctttaagacggctgtatcccgaagacagagtcgtggcttattacgcacgttttatccgcgacgggagcataaagcatattccggttgctgtggatttgcccgacggagaaaaactgaggcggcttcaccgtatcgaagaaaccttttccatgctgtctgacgtcgaaaaagcggtaaaaaggctggaagaggacgaagaattttacgatatggtcacatggcttttttcgtcaagggaagtgcagatgtgccagcgcgtgggagcattcctttgtcagcacgaaaaatggcagccttatttccgcgacaagcttatcgaccccgccgttccttcgcccgtaaaaaaagaatatcttttaagctatctcaagtattccgacgtaaagaaattcgctttgcttgtgggcgacataatgctgtttttcaatccgcgtataccaaagtgcgacgataacttcgacatgcgcgaaacgtattggttgctttacgccacctgcgcgttcgtgacaaaaggatttcagtcaaaaatcaacaaagtttacaagaatttcgtcgccttgatgagcaagcctgatttcaaacctttcaaaatacgcgtgcccgtcatggcggcgcttatcgcgtacaaagccaaaatacataaaattttcgagtcggaagtggagtgctgtgaaatcttcggttgcaccaaggaggattttcacgattacgcgcgtaagttgggacttgaaaaaaccgaaaaagaaacgaccgacgagacggaggaacaaaaatgacagatttcgacaaactgtttgaagactacataaaaaactggctggaaagtcataagggcgaatataccgcagacgaggcggaaaacatgatacccgatctttatgaaaagtttgtcacctctccgtgcaaagaggcgggcggcaagactcccgaagagtttttcggagaagtcagggatgcggcaaagcttgtttccatgtttaccgagtcctgcaaggagggcggcgcatgttcgcttttgttcgaccgcatggctgaggtgcccgagtgcgcggctttattatacgatttgcttgaaaaggagactgaccctaccgtaatcgcgtccgccatggattttcttgaggacagcggcgccgatcagccttatcttaaatacgccgaatggcttaccgaaacggaaaaggacgaaagcgtagtggaaaaggcggcggaaattcttaaagaacatccgtccgaggaaataaaaaaccgtctgttaaacgcgcttgaccgcgccacggaagagcaaaagcagataattgcggacgtgcttgtccgtcagggtaaggacgaacgcacttacgcgcttttgaaggaacttttcctttccggtaaaaatattccctatattgcggggcttatagctaaatacggggacgagcgcgccgccgagtttctttatcccgcgcttgacgacagcaattatctcgaatttatagaaataagaaacgccatcgaaaccatgggcggagtggtggacgacacttatcgcgatttttcggacgacgaatattacaaagctataaaacatcttaaataatatgttttcaaattgtttcgtttgtcaataactttggggtgagtatggaaaagattacgcttgaaaaaataaaatcagacaaggatttccgcgcgctcatcgacagcgccaacaacaatctcgaaaaaatggggtataccgagcacggcttaagacacgtcggatacgtcagccgcactaccgccaatattttaagggagcttgggtatgacgaccgcatagtggagctgggtgcaataacgggttggattcacgacatcggcaacgccgttaaccgcaagaaccacggattgtcgggtgcggcgcttgcttttccgttgcttacgcgcatgaaaatggatatgcgtgaaattgcgcttatattgggcgcaatcggcaatcacgaggaagaaacgggaatccccgtcagcgaaataagcgccgccttaataattgcggataagtcagacgcacaccgctcgcgcgtgcgcaaaaagagtttcgattataccgacattcacgaccgcgtcaatatgtcgataaagaaaaattctcttgttgtcgaccgcgaaaaacacataatacggcttgtgattttcatggacgaaacttccgcattgatggagtatctgcagatttatctgtcgcgcatgattttaagcgaaaaggcagcggcgtttctcggctgcagtttcgagctggtgataaacggcgcggtcataaaccgtcatacgggtgtcgccaagaaaatgacgcttaaatcttcggaaaaggaagtcagcgaagaaggcaattaaaaggaatcggcaactgcttttcttttaccctccataccgaatcaaacggtttgattttaaatttttttacaatgcctttgaattaggtcaaactatttaaggaattaaaataaaaaacggatttttttgtcgccctgccctagccttcggcagggcttttttttacaaagcaaaaactcatatattcgcgcgccgtaaagtatattataatatgtttaagattttttctgtatccatgcttataataggcacgattataggtgcggggtttgcctcgggaagagaaatcgtggcgtttttcggcacgacgcctgcgcctttagtggcgcttgtctgcgccgctttggtgttcgtcatgtgtcttgtgtttctttttgtggggcaaaaggctgaagcggacgatataggtaccgtaaataaaaaactcgcgggaaaattcgacgtagtcctcaatattttcctgcttttcaacagtgtaatatctttaagcgcgatgcttgccggattcgacagccttttcgatgggatatatccgttaaagccgttgtattcggttttgttcggcgcggtttccgtgcttgtggtgacaaaagggcttaaaggacttttaaggtgtaatgccgtccttgtgcccgcgcttatcctgataatcgccgcggtcacccttacaaacgtaaattcgccctcgttttcttcgtttaccgctaaaaccgcttatcgcagctttacttatatttccatgaatatgatgcttgcggcggcggtgcttaccaccgtacacgggttaaccaaaaaacaaataatcgccgcttcagcggttacggcggttatagtgggggcgcttttaatgatgtttatgcttgcgctgggttcgtcttcggcaggggaagcggatatgccgataataaccatgtccaaagaaacgggcaggcttatgtacgggctgagcgtatcatgcgtcgccgcgggtattttcacgacgatgctgaccgctcatatatccctttcggaatgggtcaattcgttttgctcaaaccgcttgttttccgcggttgtgtccgtaattttctgtctggcgcttagttttataggcttcagaacggtggtggacactctctatcccgtcctcggcgttttgggaagcctttatttcgtcgtaagtcttgtatggctatttagaagttcttctctttctggcaataagcttttcgcaaaggcaaacggaaaagtacataagcgctgcaagcaggcaaagaataacggttgacgccatgacgaggtccagcttaaacacctgaccgccgtaaatgataaggtatcctaagcccgcgcccgacaccagatattcgcccattatggtgcctacccacgacaaccccacgtttatcttaagcaccgaaatgaaattggggacggagtagggaagtataagcttggtcagaatctgaaatttggttgcgcccatggactccagcagaaatattttgcccttgtcgcagctcataaaaccgttaaggacgctcatgatggtaactatgatgcagataagaaaggtcatcatgatgattgcgttcatgtttgcgcccgcccatattattattacggggcctaaagcgattttcggcaatgcgttaagcaccacgagatagggctcggcaactcttcggaaagtttcgctccaccacaaaacaatcgcaactattacgcccacgacggtggaaataagaaaacccagcacgcactctaaaagagttatgcctatgtgtttcatgatatcctgtttccataagtccgcaaaagtttttattatgcgcgaaggagagcttacgaaaaacgaatccacccagcccaaaaaagtggaaagctcccacaatcccacaaacgcaaccagcaccgctatctgtataatgactattttgcttttgtcaagttttatttttctaaggtaaagctgtcgcggcgacagtgtttttttgttttttttcataagttatacctctttggtttaattttacttcacgcatacctcggaccatatcttgtcaaaccatgccgaaaaacccgggtcctcgcgccgctttaacggcgtcggggcatttatgtccatggtaaagatgtttttgacggatgcgggacgcggggaaagtaccaccacgcggtcggacatggaaaccgcttcggatatgtcgtgcgtaaccagtaccgccgtctttttttcctgccgtattatggcaaaaacgtcgtcgcaaaccgaaagcctggtctggaaatccagcgccgaaaaaggctcgtcaagcaagagaatttttgggcggaaggcaagcgtccttatcaaagctaccctttgccgcataccgccggacaattcgccggggtaatgtttgaaaaaatctttaagcccgtattttatcaaaaggttttccgcgtattcgacgttttcggcggtctttttcttctgaatttccagccccagcattacgttgtcgcgtatggtgcgccactcgaaaagctggtcgcgttgcagcatatatcccacgtcgcagcccgctttgccgtcaacgctttttccgtcaacgaaaatctttccctcggtggggcggataagtccggctataagcgacaaaatcgtggtttttccgcatcccgacggacctacaagcgaaacaaattcaccttgttttacgtctaaagaaacgtttttaagcgcgtcggtttccccctcgggcgtctgataacaaagcgaaacgttttttatcgaaagcatatccataatttttttctccgtaaaatgcaaaagaaagctttgcgggcagtacctttttaagagggtaaaacccgcaaagttttattcgcttattgcgttatcgcaagcgcgtaagtgttgtcaaccgccgcggtataggtcacgcgcgtttccaaaaatcccgcgttttccattacgtcctgaagttttatataagactgctcggtaaacacaaggtcgtcgcaccatgcgtcgatttcaagatagcttgttaccgaggcggcaatggaacttaaagaagtgcccgcaaaagagggttcaagcgactcggcaaccttttcggcggtgttgtctttgatataatcgtatccttttttgaccgcgcgtaaaaaattctttatcagctcggtattttcctcaataaaacttttgcttgcggaaaaagaagtataggggatttcgccgctggcttcgcctaccgacgccactatataaccttttccggatgcttcaaattcggacgccgtgggctcgaacaaagtggtgtagtccaccgtgtcgtccgactcgaatacgggcgccatcatgttgaacgctacgtccgtgttgaagttaaggtccgtttcttcgtctaagcccgcgttgtttacaacatactgcatggtcatcgcgggaacgccgcccactctgcccgcaagtacgtgtttgcctttaagcatactccactcgaagtcgggttggggagttttggacactaaaaaggagccgtccttttgcgtaagctgcccgaatattatcggatagtccttttgtccctgtgcctgacagtaaatagttgcctcggggcccattaagccgatgtcggccgatttcgaggtaatcgcggtcattaccttatccgcgccgccgccgttggaaagttcgatttccataccgtactcctcgaagtagccgttattgattgcgacatacaaaggcgcgtaaaatatggagtgcgttacttccgacagccgtattttgacgtgaccgtcgccgtcatccttgcagcctacaagcgcaaaactcataagcgccgttaccgcaatcaaaaaaagagcgattgtttttttcattttttcctccgttaatgaaaatgtaagtagtgattaattttgcgcgcccgccgtcaggggggatcgatcgcatagtccattttatgcatatagccgtaagtatgttaaacttacggattaaagaaaatttaatcggattaagcgcgttatttttatgcttattgccgtaaattaaacttgcttaagacgtttttttgtgttataatcgtatccgtaaactattttttcggagcaattatgaacaaaacatacgacccgaagtccttcgaggacagaatctacaaaaaatggctggacaaaaagtattttcacgctaagcccgataagaacaaaaagccgtttaccattgtcattccgccgcccaatatcacggggcagcttcatatgggacacgccctcaacgataccattcaggacgccataatccgatataagcgcatgaaaggtttcgaggcgctttggcttcccggtaccgaccacgcttccatcgccaccgaagtcaaaatcgtggaaaaaatgcgtcaggaggggcttagcaaagacagcgtcggcagagacggctttttaaagcgcgcttacgaatggaaggataagtacggcggcaggatagtggaacagcttaagaaaatgggcttttcctgtgactgggaccgccttgccttcacgatggacgagcgtttaagtaaagccgtaagggaagttttcgtcaatatgtacgaaaaaggccttatttatcagggcgacaggattatcaactggtgccccgattgcaaaacggcgatttccgacgcggaagtggagtacgaaaccgaagaaggacatctttggtaccttaagtatccggtgtccgattacgaccaatacatcgtcgttgcgaccacccgtcccgaaaccatgctgggcgataccgcagtcgcggtgaatccttccgacaaacgctattcttcgcttgtcggtaagaccgtcgatttaccgcttaccgaccgtaaaattcccatcgttgcggacagatacgtcgataaatctttcggcaccggcgcggtaaaaattactcccgcgcacgaccccaacgacttcgaggtgggcataaggcacgacttacccgttatccgcgtgatgaacgacgacgccacaatgaacgagaacgcgggcaaatactgcggcatgacgcgcgaagaggcaagaaaagccatagtcggggatttcgacaagctgggacttttggtcaaaatcgaaaagcacgagcataacgtaggacactgctaccgctgtcacaacactatcgagcccatagtttccaaacagtggtttgtcaaaatggaggggcttgcccgtcccgcgatagatgcggtagttaaaaaagacatcgaatttttacccaaacggtttgaaaaatcataccttcactggatgaacaacatccgcgactggtgcatttcccgtcagctttggtgggggcatcgcatacccgtgttttactgcgacgcctgcggataccgcgccgcgtccaaggaggacattacggtctgccctaaatgcggcaagccgctccgccaggacgaggacgtgctggacacctggttttcttcggcgctttggccgttttccacactgggctggccggataaaaccgaggacctcgaatacttttatcccacggacgttttggtcaccgcgtacgacatcattactttctgggttgcgcgcatgattttttcggggctggaacacatgggcgaaaagcctttctccaaagtgcttattcacggcattgttcgcgacgctttgggcagaaaaatgagcaaatctttgggcaacggcatcgacccgctggaaataattgacaaatacggcgcggattctttgagatattcgctggtcaacggaatttctcccggcggcgacatcaggttttccgaagataaaatggaaagctaccgcaatttcatgaacaaaatctggaatgcttcccgttttgtgcttatgaactgcgaaaacgcgaaaataagggatataagcgaagttaaaaacctctcttacgccgacaagtggatactttccaaactcaattccgccgtcgtcgccgtcacgcggtttatggataagtacgaagtcgggcttgccgcatcgcgcatctacgagtttatatggaaccagttctgcgactggtatatcgagttcagcaaaaccgcgctttactccgacgacgacgaaaagcgttccaacgccgccagcgtgctggtgtatgtactgcgcgaaacgcttaagcttgctcatcccattgtgccgtttatcacggaggaaatttacgacgcgttgcccaataaagacgcggaagacatcatgatttcgccgttccccgaagctaacccgaagcacgcataccgtgccgattcggcacagaccgacgcagtgatagagcttatcaaatccgtaagaaatctgcgccgcgagatgaacgtcagccagaacaagcgtacagccgtgtacatcgtacctaaggaaggcaaggaaaaacagcttaagaaaatggcgggctatatcgagaaactcgcgtttgcaagcggcgtttatttcggagagccttccggcaaaaacgcttctttggtgacgactttaggcaatgtgttcattcccatgggtgaccttgtggacttcgataaggagcgcgcaagactaaaggcggaaatcgaaaagacggacgaggaaatcgcccgcgcccgcggtaaactggaaaacaaaggctttaccgaaaaggctcccgccgcgctggtggaaaaggagaaagaaaaactcgttaagtacgaagagcttaaaaaaggacttgtaaaaagcctcgaagcgcttgactgattgtattgtgttaattaaaaagccgcagcctgtttcagggctgcgactttttttgagttttttataaattctgttaaatataatttccgaaggaaagtgtctgattgtctttttactgcaaacagataaaatgtcgatttatattgaatcctttgcttgggttttgttaaagaaaaaattttgaggttggcgtaggttaaattccgcttaaatatttgccgtttaagttgattaatttttcactttgccgtattccgttgcatacaatttgcataggaggaaatttttgaaatggcaaatgcatcggattattacataggcgccaacgacgagcacgggcttaatccgcccaccgcgggaaaacgcacgcccgtcatgccgtatattaaccgcagtttttacgaaaatgagtttaaccgcaaggcaaaatattattttattctggcatgcttaaggtgcggcttccgcgtttacgacgtcaagcccgaaataggcgacgtgtctatttccacaagagtggcacgcgtcaacgcgcgcggacttactttgcttgtaacctttgcttacaatgcgttcggcgacggtatagggttcaataacgttaacggttatttggttttttacggtgcggacggatatcggcccaccatgtcaagactgctttcgttcgacttgtcggcaggactttccgaaactattaccaccaaaaatctgggagtaggcactctttcgggggtgggagttttaaggtcggtccgctgtacttccgctttggtagaggcgggctttatgaccaatttcgaggaagcaaaacttatggtcgaccccgatttccaacgcgcggtgggagaaggggcttgtatcggggtgtgcaactatctcggcgttccgtacgtcagcgacgacgtgatttatcccacgctcaggcgcggcagccgcggcaattacgtaattatgctgcaatacatgttgagaaacgcgggctatgacgtggatacggacggaattttcggttcggcaacggaaaccgccgtaaggtcgtttcaggcggaaaacggtcttgccgccgacggaatagtgggcaaaaacacctgggcggtattaaggtggaagtttaatccgctgcctgttttaaggcgcggaagccgcggagaagccgttaaataccttcaaagcaaactgctcagcaagctttatcccgtaggcgaaatcgacggaattttcggtgcggcaaccgagcgggccgtaagggaattccaggaagaaaacggactggcggtggacggaatagtgggcaaaaacacctgggcgaaacttactcccataggcggcggcagaccgcttccgcaatgagagaaaaacaaatccgttttttttcatgaaataagggcataatcctattatttcgaggagtgccttatacatgttcggtttttcttcaaaactaagccgtctgaggacggaagcccgttcgtcggatgctgtcagctacgacgaaaaggggcgtggcgtgatacgcatgacggtgcgggacgaaagcgagtttctgtcgccttacgccttaagcggtatgcccgatttgaattcggaagttgcggattttctcgagggcgccgccatgaatttacgccccgaggaggaaatcgtcgttgaagtaagcggcagcgtaagcgaggagaaaaaatcggaataccgtgcggcaataagaaatcattaccgcgcaggcgtcagggaagcggaccgtaaactgagcgaaaacgcgcgtatgtcctttatttttgctttaattgcggctgttgtgttaagcgtttacgtcgctttggaaatcaaatttgacaatttcgtcgttttgcagcttatcgacattacggcatgggttttcatgtgggaagcggtggaccttatttttctggaacgtaaaattctgaagtcggaacttatacgttcggcgtcgctgtattgttccgaaatagtgtttgcggtgaaaggcgaataagtaattgcggtagtttagcggctgacgtaaaacagttaaaaagatattcgggcaataaatcggcggcataattataaataataaatcgtcgcgggttgattaaaaaccaaaaaaccctttgctccgattccggggtaaagggtttttgtttgtttttgcggcgtcgtcaagtgttgacaagcgatgacgcgttttttacttgtgtcttaaaaggttcagcgttctttcgggcccctgtaatcttcgtcgataagtccgattctgcggcaggtgggcaaaagcagcaacattatgaccatattgagatatgccatcggcaactgagtcagtctgtatgacacgaggtacacaagataattgatgccgtcgtagtacatataataaaggcctaaagagttaagccccagcgtacccacgataagggatgcggtaacggcgacaacggcgcggacggtgacgtttttaaacggcagctttctgaataatatgccgaacactaccgtcgccataaagttacccgcgacaagtacggggttgggcggagcaaaattcacggtcatgaactggccgaggatatcggtaaccgcggcgacgacgcctcctccgaacggacccattattgctgccgaaatataccagccaaggtaagaaagactgattttcagcgtggggggcagggcggcggaaacgttgtttgaaatagctttcagaagcaacgaaagcgccgtaagcgtggcaaggtaagtaatccttttggtggcggacagacttttgtgtttttctttgcaacttttatcgggggcaatatcgctgtcggcaattttgcggatattaggagttgcaatttcctgttgatttttcatcaatgtcgggcttctccttatattaaattttatatgcggtaactcttaaaaagcttgcatacaaaattaattatacatctttcagtccgcttttgcaagcgattgtatcgttttttgtacttttgtttgcacggcgtttgcgtacggattcggtttttactttcgttttgaaaaagtccacgtctgccagcccgaaaacatagcctaaagccgcgtaaaaaataaggcttaccaacgaagcgacggaaatagaccagaacaggctaagcgacgacagcagcgaaaaaacgcatttcgtcacaaaacacgcgggcacgataagcagcacgctttttaataattttgaaagataagaaaacccgagtcccgtttttttgcgtatgcaaattatatgcagcgcgcacgttacgcaccagcctgtgcccattgccgcgcttaaaagaattatattgaaattaccgtaaaacgcgaacagaatggcaaacatcaccaaggagcccagcatataatttataaaactttttatttccaggtccaaagaattcatgacggaagaggtaatgttttccacggacagcggtataagcagccatgcggacgcggctaaaaatcttcccgcgtctaaattgtcgtaaacgaattttcctatgggctcgccgagagcgaaaaacatgggcacgaaaagcgaggcgataataatcgcaaatcccgtcgcgctttctatctgagcgttgacgtgttttaaattgcctttgcctatgcccgtggaaactgtgggaatcattacgaacgccagtgaacccacaacggttatcggaaggtaaagaaggggcattgccatacccacgccggagccgaaaagcgccatggattcttcgcgcgtaaatccgcttgagataagaaggaagggcacggcgattgccactaaagaatttattacgctgcttgccgcacgcgatacggtaatgggagtggaggatttaagcagcggaattatctgccctttagggttattcagtctgcctttcatggcgaaaaagcaaagaataacgcccaccatgcttacaaaacagcctaacgaaagcgacaaagcggtcatgtaaagtttgttgaatcccagcgcaaaaagtacgatacaaacggttattctcgcaagttgttccaaaatttccacaagcgaaacggcaaaataccgctgtctgccccaaaggttgccgcgaaaggcggaataaacggaggaaaacacaagcgcgggcagtaaaaacagcagtacaatagcgctttccttgtcggcaaacaggtttcctataggcttgtaaagcaagatgacggcgcccgttattaccaaagaaatcacaagtcccacgataagcgccgccgccgttaaagagcgttccttttttatctcgccggagattctgtattttgcggtaagtttgctgacaataagcggaataccgctggtggtggcggtaagaagcacaaagaaaaacgaaagcgccacctgatatatacccaaagccgcggcgccgatttcacgcgacagaaaaattttaaaaacaaaccccagcgcgcggtcggttatggtaaaaacggacaaagtaaaaacggcggaaaaaatagtttttttcattataaggtccttatttgtacaggtatattataagtatattttgcgtttgattttaatagaacgtcacggcgcgctgccgaaaaaagaaaaccttgtgaaatcggaacgaaaataatttcaataatgcgcaataagcttaattctgttgtaaaatttttatacttttgatataatattattatgaaaaaaaggacgcgttttttcataaacgtctttctgaccgcggtaatctgtttttcggtgattttcgcgggcgttttggggtgcgccggcggctgcggcggcacttacggtaactacgagttctatttttcggacagcagaatggggatgtttataggcgacggaaaggagttttcttcgtcagattttatgttcgagccttctgcgcccggtaatttttcatttacgctttcttcgtctgatacgactgttctttcggtttcgggccaaagcgtttacgcccgttcggaaggcgtagccaccctgacggctacggacacccgcggaaaaagcgccgagtgcgttgtggaagttacaagtgagattacgtctttcgaactttacgcttctacgcgctctcgccatgtgggcgaaaaccgcgaaatcgaaatttacgctgtaataaacgacggctcggtatctgcaagcaattatgccgtcagctggaaaatcaataacgtcaaaagtaattatacaggttcggtttacacgcttttgcctgcttccgcgcccgtaacgcgcactgtttctgcctccgtgacaagcagggacggcaaaacttttactgacgatattaccgtcaactgggcggacgcatttgtttcgtcgcccgtcatgaatcttgtttccggtctgcgtgagcaatcttacggcgcggtttcacaagtggtgtatgctcttgactacgacctcggcagcggcaactcttcgcccgtaatagagtggtttgcggacggggtgaaagcgcaggaaggcggcgacgaatttattttcgttccggattcgccaggcattcacgagataaccgcaaccgtcaacggagttgcggcggcttcggacgcagggaaggtttatgtttcgggtccggtcgtgcccaaaaatctcaaaatagatttcgatacatattggcctaacgtaatggtggattggtctgccgcttcggataatgaaaagtttactgtaagcgttacgaatttaagcgataaaaccgaaaaaacttacgaaaccgtaggggcgggattgattcttacgcgcgaacaaatggatttactttcttcggcgtattccgtcaaggtaaaatctttgggcgacggaggggtgtttaccgaatctcaatactgcgatgccgtttctgtcggcaggcttgaagccgcggcggaaagctatctcgaaagaaaatggttgggcggcaattattatatttcttccgacgaagagttctatgcgatttacgactatttccttctgtaccgcgagcagcccgtttcggaagctactgttgcctattacgacgtatatatgggttatgaaaatacctataccaccaaccgactttccgaaattgctttcaatcgcgcgggctacaccggctcctatgaaatagaagcatcgagaagaggtaacgtcatctcgctgtctttcaagttttataccgtcagtacgcctgataaaaaacattctgtcagcaaaagttcttccgttgcccttaacggcattgtgccgcatataagcgctacgggcaggggcgaggattacgttcccgccatagaatcgattgaaaagacggtcgaggtttcgtcgaccgatcagctttaccgcgccgccgaaaacggttacagacctcttccgaaggcaggcacttccgcttacgagtgttacgagtatgcgaaaagattgcttaattcgatactggacgaagatatgtcggacctcgaaaaagcgcacgcaatttacgactggataatgtggcgcgtactatacgacgactccgccgcgaatataacggatatttccgaggcggtccgctacgaatctttttatcttgaaagcgtgttgacggataccgatt

SEQ ID NO: 1581 - DNA, 32759 bp, Unknown
  16S sequences of unknown bacteria
tctgtatgaactcttttatttccctaaagtgttgcacttaatagtataattcacctttggtaaaaaaaggcggacggcttaagccgtccgctctttgcttgctgggggccgcttatgcttccagcgcacgttccagccagatgacgccaatgtccatggcgttgtacaggccggttttctcgctctttttgagaatgcgctccttcatgcgcagctccggatcggtggacatgagctgcacctgcaccttgtccgccatggtcatatcccccaccgttttggtggagagaatctgaaacattaccacacacttgtcggccatgttgccgtaatacagcgtattgccggagcgcaccagcgggcggcccttatacagcagaaacccgtttttcttctctttggctttttccgttgcagccatatatccaacctcctgaaagccggcgtaccggccattttgactcacttaaccatcagtataccatatttcagggctgctgtaaagctttgccttctggttcgggccgaaaaaagaacggcgcggataccccgcgccgttctcaggctcaattattcagatatgaacgaaccagtgcgcggagcaactcgtcccgatccagcttgcggatgaggctgcgggcgttgttgtgggtggtaatatacgtgggatcctccgacaggagatatccgacaatttgattgatggggttataccctttttcccgtagagcgtcatacacggtggtcagcaccactttcatttcctgctctttgtcgtcacccagtgaaaatgtcatcgttttgtccagcatgacgctccctccagtctgccgtagtacgcggcatggacattcgttaatatgaccggatacggccggaattactcgcttgtgtctgaaaataaacggaaaacaagtctttctgttttccaaaacgagttgtccatgtttttcattatacagcagtctatgcatattttcaagggattatgagcggagaatgcaacctttttcatgcagactcttgaagattttcttaagcgccggctcaatttcggcgtcggtcagcgtcccttcaggagagcggaacatcaggctgtacgccacgctctttttcccggcggtaatctgcgcgccgcggtaaacgtcgaacagctggacgctttccagataccggccgccggcggaccggatggctttttcgatttccgcgaccggcaggtcatcgtcgcacagcagggccaaatcccgttccaccgccgggaagcggggaagaggcttgtatacaatggggccgccggctgcggcgaacagcgcccgaagctccacctctgccacatacacccgctcgtccagcccatatttggctgccacgtcgggatgcatctcgccgagggtggccagaacagtgtcgccggagcgggcagaagcctggcgcccgggatgaaggtacggctctgccgccacggcgtagtcggcttgtacgccgaacgcggcgaacagattttccagaacgcccttcagggtgaagaaatcctcgccttcgccatacagtccgaggcagagcaccgggatctcgtccggctgctcggtcagcggcaggctcttggcgacgaaccgcttactgacctcgaaaaagcggacggccgggattttccggctggcattggtggccagcaccgtaagcatgctggtcacaagctgggtgcgcagggtggagtattcctctcccagggggttgagcagggtgatggcctgccgacggggatcctcggccgacaggttcagcgtttcaatggctttcccgctgataaaggaatacgtggtgatttcccgcatccgttcggccaccagcgcggccttgactttatcggtgtttttccgttccggcaggcgtcgcccgcggacgatggtcccgcgcatgggggtggccacgatgtgatcgtagccgtacacccgcatgacttcctccgccagatcggcgcgcccctccacgtcgtcccggaacgaggggacggtgcaggtcagccagccgttttccagcgtggtggtgatgcacaggctgttgagaatatccaccatcgcggtatagggcacctccacgccgagcagggcgttgatgctgtccgccgtgacatggatggtgcggggctcgggcagaccctgatgccggtcgatggcgccctccacaatgtcgccagcgtttaattcgtcgatgagctggagcgcccgctccatggcgtattccaccccggcgatgtccacgcccttctcaaagcgggcgctggattcggtgcgcatccccagggcgcgggccgtacggcgcacgctgtcccggcggaatttggcgcattcgaggaacaggtcggtggtatcggccttgatttcgctgttcagcccgcccatgatgcccgccaggcaggagggcgcttcggcgtcggcgatgaccagcatgtcggccgtcagggtatggagtttgccgtccagggtggtgatggcctcgccgtccttggcgcggcgcacgatgattttgcccccccgcacatcccggagatcgaaggcgtgcatgggctgccccgtctccagcatgacatagttggtgatgtccacgatgttgttgatgggccgcatccccgccgcccgcaggcaaagcttcatccactcgggggattcggcgatccgcaggttcttcaccacccggcccagataccgggggcagagatcggtatcctccacggtgatatcgatgtgatcgcggatatcccctcccttggccgtataaacgggcaccggcggatggaattctttttgcagagccaccgccacctcgcgggccacgcccagcacgctctggcagtcgggccggttggcggtgattttaaaatcgataaccgtgtcgttcaggtgcagcacctcgcgcatatcggtgccgggcgcccattccccctccaggatgagaataccgtgcacctccgcgccgggatagtccccttctttcaggcagagctcctccccggagcagagcatcccgttggagaccacgccccgcagcttgccctttttgatgtgcatcccgttgggaagatgggagtcgtgaagggaggcgggcaccagggccccctcaaaaacgttgtccgcgccggtgacgatctgcaccggttcgtcctggccaatgtcgatttggcagatctgcaatttatcggcgtccggatgtttctccagcttggcgatccggcctaccaccacacggtccatggtggcggacagatcctcgatgctttccacctcgaagccgctcatcaccattttatcgcacagctcctgcaccggcacgtcaatggccacgtaccgcttgagccagcttaaagatatattcatactcgcatactctcccttctcagaactgctccagaaaacgcagatcgttttcaaacagcaggcggatgtcgctgattttgtacttggtaatggtcagccgatccaggccgatgccgaaggcaaagccggaatacacctccgggtcgatgctgcatccggccaaaacgttgggatgcaccatcccggcgccaaggatttcgatccagccgctgcccttgcagacccggcagcccttgccgccgcactcggagcaggacacgtccacttccacgctcggctcggtgaaggggaagaaggagggacggaatttcaccttggtttccggcccataaatttcgtgagcgaactgttcgagaattcccttgagatcgcacatggtgatgcccttgtccaccaccagcccttccatctgatggaacaccggggaatgggtggcgtccacctcgtcggcgcggaacacccggccggggcagactatccggatggggggcttgcgggcttccatggtgcggatctgcgccgacgaggtctgggaacgcagcaggagattatccgacaggtagaaggtgtcctgcatgtcccgggcggggtgatccttgggcacgttcagcgcctcgaagatatagtgatcggtttccacctccgggccgtccaccacatcgaagcccatggactggaagatatcgagcatgtcctcaagcaccgcgttgagaggatgaagccctcccgttttgcaggccttgccgggcatggtcacgtccagcttttcctcttccagacgcttgagcttgatggcttcctggatggcggcctcccggctggccagggcctcctccagcttttggcgcagctcgttgaccatctgccccacccggggacgctcctccgccggaaggccgcccataccgcgcagtatctcggtcagcgtgccttttttgcccatgacgcggatacggaattcctccaggtccttgggcgcgctcagggtttccagttcctgcagggccttttcccgcagggcgtcgagtttctctttcattgcgtcataacctgcctttctctgttgtgcgggccgcccggatagcgtccggtttttcgggggaataaaaaaagtctccgccccctgaaaagggacgaagacacattctccgtggtaccaccctactttttgcccgaagcaaacacttctgcggccggtaacggtgcctgccgtcgccgcctaccgcgccgcggaagtccgggcgtttgagcggcgccgctccggagtgaacttcagccgttcgctgccacagggcgctttcagctgcggcaagctgccgcaacgcccctctctgcggtggaagaaaaaacggcctactctctccatcactgcgttgttgtagtttagtatagcacaaagaaaagaaaaatcaagagagtttccgcttttttacgcatcttcccgccgaaaatggtctaatacggaccaaccctcttctatgatgccgactggagagccaagagggactttcccttttattgcagagaatttccggcggcttggcaaccgtcccttaagggaaaattcatcggattctttcttgacagaagctgtaaagtttcgtacaatgaataggaataccaggccgatacgacaggggcatttccctggcttttttaagaataccgccgccggatgcggcataagaagggaggtttgccgctgatgaatacgtatcccccttacccgcccgggcagcagccgcagaacggacagaacccggttcagcccgcgggggcgcagcccgtgccgccggcccagccgaacggccagtggcagacaccgccatacggctatacccagaacaccccgccctatgcgccgcccgcccggcagccgcaggctccgccggcgtatactccgcggccctatcagcagcccgcgccggtcgtgcttcgtcccatggtgacccagcaggccgcgccgcccatggccatgaaatgggtgaagaagaaatccaaggcgccctttttcctggtggggctgtggtggctgctgtacgcgctgttcctgcccctgtaccgctggcaggattttgccctgtgcgccgcggcttcgctgatcctgttcatcgtttcccgtttgctcattgcggataagaccgtggccgtgcggatgacgccgaaggatttggcggagctggaagcgcagaagcggctggagcaggaggaggcgcggcgccgggaacaggaagccctggcggcgcaggagaaatcctccgtgatccccaaggaggcgcgggagtacctgcagcagatgcggcaggccgacgtggccatccaggatgaggcggtttccgcgaaaattcggatactcgaggctcgaaccaatcagattttccaggtggtttctgaaaatccggataagctcccggctatccgcaagtttatgcagtattatcttcccaccctgctcaagctcctgcgttcctacgatcatatggaggaacagggcatccggggtgaaaacatccgccgcaccatgcaggagatcgaaacggtgctggacacggtggtggaggctttcaataagcagctggataacctgttccaggaggaagcgctggatatatccagcgatatccaggtgctggaaaatatgatgtcccaggaggggctgctgcaaagagatgtgttttccgccccggtggatacgggcgcgccgttgaggcaaatcccgggcggaccggagcaaacggaatgaaaaaccggtagtttcaagagaatagaaaggtttggtgcagaatatggctgacgaattgatgaatcttccccccgcggacgcggccccggtgctgacgctggatcccatgaccactcaggcgccggtgatggcggagctggcgcccaagccggaggaaattcccgaggatttgagcgagaataatctgacgcccgaggaaaaaaagatggtggaggactttgccaagaccatcgatgtgaccaacagcaacgtgattctcacctacggcgcggcggcccagcagaagatcgccggcttttctgaatccgccctcaaaagcgtgcgcaccaaggacatgggcgagatcggggagatggtgtccaatctggtgaccgaactgcgggccttttctcccgaggaagaatccaagggcggttttttcagcctgtttaaaaaaccggccaataaaattgcggcgatgaaatccaaatacgacaaggcggagaccagcgtggacaaaatctgcgcccagctggaggcccatcagattcagctgatgaaggacgtggccatgctggatcagatgtatcaggtcaacctgaactatttcaaggagctgtccatgtacatcctcgcgggcaagcgccgcctcaacgaggtgcgcaccactatcctgcctgagctgatggaaaaggcgcggcagtccggcctgccggaggacgcccaggcggccaacgatatggacgcgctgtgcaaccgctttgaaaagaaaattcacgatctggagctgacccgggtcatttccatccaaatggcgccgcagatccggctggtgcagggcaacgacaccctgatgaccgagaaaatccaatccaccattgtcaacaccattccgctttggaaaagccagatggtgctggccctgggcctgtcccactcgctggacgccatggaagcgcagcggaaggtcaccgatttgaccaatgacctgctgaaaaagaacgccgacgccctcaaaaccgccaccgtggaaacggccaaggagtcggagcggggcattgtggacatcgagaccctccagcataccaatgagagcctgatcagcaccctggacgaggtgatgcgcattcaggaagaggggcggcagaagcgccgggacgccgaggccgagctgggccgcatggaaggcgagctcaagcaaaagctgctggaactgcggaaataaacggcggagcaatcgaatacgggcggggaagacgagcagtcttccccgcttttttacagcgggaggcaggcatatcgaacggtatgcctgcctctatttattttcgaattatattgggaaaaattggatcaaacaaattatttagtccgtcggtaggcgtccgctttatcctgcagttccagcagattctgcagttctttaagcacatactccttaaattcgggacgaagctgaccgaatagatgtttcagctgttccagctcctgctccaattcctgctcgaacatgctgccttcgccgttccgcagccaatcttcccgcacatgaaacgtggcgcatatcaacataaccatgcgatcatttacagtccgttttcccaattcgattcccgcaatatagccgttggaaaccgcaatcgccttggcgaatttcgcctgcgacagctgtaaggattgacggagttccttaatccgcagattaatagacgtaacatcaccttcttaatcagtcatttacttgtcgggcggaaaaagcggccccgcggaaaaacgcgtttggtaccttagggtttcccgcagacgttcagatttattctttataaagataccatagcctcgttgacaaagcaagcgtcccacgtgcttgcctctcataaaagagggcaattatattcttgacatttttactatgttatgatatattgcttacatagttagtaacccgattgaaataagagggtgagaagcatgatgaacgctcccaggcaaacagacaagctctgcgcgggattctgccggctgggcacggagaataagcggctgctgctcgccgtcgccaaggcgatgctgtatgcgcagtcggccgccgataagaagccctcatccggaaaggagccgccgcgtgaaaaaagcgcttgactggttccggcgcgtatggagcagaatcgccgcgccggaagctgcttcaaaaaagcgctggcggcgctggctgccgacggctttggggctcgtgctgtgcgtcgttctgctgcccgtcctcgtcatcaatctgctcctgctggtagacggcgccctgcatccgaaccaggttccatcggttttcagcgtggcgccggtggtcatacaaagcgatgccatgcagccgtccttcggcgtcaacgatttggccttggtgatccgggtggaaccctccacgctgcaggagggagaggtcatcgcctaccggatggccgatcggctgttgttcggccgcatcacggcccggtcgataggcaacgacggcggcgcgcagttctttgtcaaagcggacagcgccagtgccgaagcgatttatcccgtcaccggcgaacaggtgataggccgttatcggatgcggttgaggggtatgggcggcgtggctctgttccttcaatcgccggcgggcatcttctgctttctcatccttccttttctcttgctgctggggtgggatgtcctgcgaaaacacctgcgcggccgcaaaaaagccggcgatactctcacggactccccgccgccggccgaaccttgacccgaacgctggtgccggccacacggctatcagtataggtatatacaatctgaaacggaggactgacctatggaaaccaaacgcaatcccctgccccgtctcggcgcggcggttctggttttgaccctggcgaccacagccttgctcagcggaaccatggccaagtataccagcaccgtcagcggcaccgataccgcccgagtggcgaaattcgactacaccgtgcaccaaaacgaggaaaccgtccagctgctggaaacggccacgcccctggacatcttcgggacgtctgccgacgataccggcgtcatgggcgcggacgacaccaacgagcagaagctggtggcccccggtatggaaggctatttcggctttaccttcaccaacaagagtgaagtggccgttcaggcgacgttcgacagcctcggctatgaaaacgaaaacggcctgccgctgatttactatttcaacggcggctattacagcgatttgtatgacggcgcctatggggcgtacaccttcttccgccacgaaggcgatgaaaccggcgtcatcctggacggcgacatggacgatttgctggccgcgctcaacggctatcaaaatatggcggctgtcgccggggagccgggcggcgtcagccgggaggccgcatccttcctcgcgccgacggataaggtgacctatacccaagcctccgtccagctgaactggttctgggcttatgaggcccggttgaccacggacgatccctcctcccagccgctcctgatggacgcctatgataccgcgctgggagagaacggtacgtatatggtcaccatggctcccgtggtgcgcatgacgcagatcgatacatataacacggacggcatcaccgccgacgcggcgggtgctcagacttgggcggacggctacgcgcccgcttatccggatattcccacagtctccggctgagcaagcggttgaattgcgcgcacgtgtggccgtgcctcggaggctgaacatatcgttcagcctctgtcggagaacacgggcggctgcgttttccgacagaggctgaaaagaaaacgagggatcctatcgatgaaggagaaaatgtggatagcggcggtgagcctggcgctcctgctgacgggcggcgctttttccgcggcggcggagagcggcgcggtggcggtcgcgccggacaaggcggcggacggcttatctgtgacggagaacggcgtcagctggacacaaatggattatttgaatattttcaacaacccggcgtataacggtgaaaaaatcgtggttcccggccagtccggccaatacgtcttcacggtggaaaaccataccgcgtacatactggattacgatgtggctgtatcggaagtcaaccgttgggagcttcccatggtctgccgactgcgcagtgaaaaaggctataccggcggcgaagagtggggttccccggagacgctggccgtccgcgccggccaattgccggcgggcggaaaggaaacatatacgctcgaatggcagtggctctccgtgtcggatgaacaggacacgctgttgggagcgggagaggatgttcagtataccattcgcctggatatcaccgccgagcagaacggtcccgcccctgccacgggcggcccggagccgtctcttctggccgccatgacggcagggctgacggcggcggtgtgcctcctgctgttccggcgtaaacggcggcgggaatgaaacggctgatagccggcatccgggcgatctgcacgggattgcttgtcctgctgctggtctttagcgtgttcagcctggcggtttccctgcggggaacgggcccgccgaagctgctggggttcaccggggcggcggttctgtccggcagcatggaaccctatatgaaaaccggcgattttatcctcgtgcgggaacaagcggattacgccgtcggcgatgtcgtcctgtttcatgacggcggctcgctggttacccaccggattacccgccggaccgccgccggctttgtcaccaaaggggatgccaacaacgcggaggatgtgtcccccgtgccgccggacgtggtggagggccgggtggtggcggttattccgcggctgggcgctgttctgtccttcttcaagtcgccgtcgggtctgctgcttttgctggcggccggcatcctcctctacgtatacccttcgctaatacacgccttgaaacgacttcgccaatcgataacctcccggttcaaaacgaaggagacagaccatgatgagacgtgagaaactgtggcggcacaccggctggcgcgcgtgcctgctgctgaccctgtgcagcctgctggccgtgccggccgccacgtggggccggtatgacacgcttgccagcggaaccgacagcgcgcgggtcgccaggcccgtcgttgtcctcaccgatacagcggctggcgcgcccttatcggtcaacgaagtcggcacctatgcgtttgccgtttccaacaccgaggcgggtaaaatcaacgagacggccatggcctatcggattacagcgcatgtgttcacggacgggcagccctatgcggggcgattgacatggagcctatacaccggcgactcccccgaacggaagtcggcgcggctgctggcgggaacgccggtaaaagaggcgctgacagccggaacacacatcctagcggaggggcagcccttgccggcgggggaaaaccgtacggtgtattattggctggactatgtgccggacacaccgggcaggttcgatatacaggtgagcataaccgccgtgcaggcggatacataaggtggtgaataggatgcgcaaacggcggctggctcctgccgtccttatcctgctgctggcgctggcgctggcggccgtgaccgcgaccggtgccaaatatgtggtgacgcgggaggggtccagagcaaccatagtggtaaccgcctcatccggtacataaggacaacagaacaacataattggagggtcatgacatggcagcaaaagagaagaaaaacacggcccgcgccggcgctctgctgttggcggcggcgctggtcaccacggtgctgaccagcggtacgctcgcgaagtacaccgagacggtggacggcaccgacaccgcccgcgtgtcgctgtttgatttcaccgccgaacaggtggaggaaggcacgcaggaactcaccaaaaccggatccaccatcgatattttcgggacctccgctgacgacaccggcgtgttcggtgaggatgacaccaacggcgagaagctggtggcgcccggtatggagggatatgtccaattcaagttcaccaacaaaagcgaggtggccgtcaaggtcgacttcgacaccctggggtatgagaatgccaaccatttgccgctgatttattatttcaacggccggtattacagcgatctgtacgataccctgaacaaccgggcctatgtgtactatttcaacgagggcgatacggtgggcatcaccctggacggcggcatggacgatctgtccgcggccgtcaacgcctatgccgtcatggcggcgacgacggaacctggcggtgtggagcggcgcgcctccgcttttctgaatacgttgggtacctctcagaatatgagcgagaacctcgcgatcaattggttctggccctatgaggtgcgggacggcgagagcgtcatccgcatggatgcgcccgacaccgccatgggtaaggacggcacgtacaccgtcaccatgaccccggtcgtccgcttcacccaaatcgatacctaccaaacgccagccacctccaatccgggcgatcaggagtggcatcccgtacagcccgatccgggcgacgaggatatcacggatccggacaacggcccgatcgcgttcaagctggcctactatgattcctacaacgaaaaaagcgccggggaattcactttctatctgaaggacgattcccactataccatcctttacagcgattactttcccggctacagcgtgcccggtttctcctaccgttttgccgccgatgtcggcacggagtttacggtggataccgcggacggcgcggccgtgcccgcctccaagaccgtaaacgtggagctgtaccatgagggttatgaccacgccattgataccaaggcgggcctgctgcatattgcggacgatatggacggcacctttattctggccgccgatgtcgataccggcaacagcaacggaaactactggaatcccattggctggacagacagcgacgacgtaccctttactggccggatcaatggaaacgacaagacggtttcgggtctgcacgcggtgtacggcacgggagccacctatatcggttttgtggccatcaaccagggcacgattcagaacctgaatctcgatttcgcccagtttgagggaggccgctttgtgggcgccgtgacaggcagcaacgccgagggcgcggtgatcgaaaacgtgcatgtgaaaggggacgccgtctccggtatttcgggatccggctacggcgatttcgcgggcggcatcgccggccagaatcatgggacgatccgtcgctgcagctccgatatcggcaccggcaccacgcagcaggtgagaggtgttatcgcctacaattacgcgggcggcatcgccggcggcaactggggcgtcgtggaggagtgctatgctctgggcggcatcagcagcggctaccgcaacgccgtgaatcagggacagctgagaacctactacgccggcggcttggtgggcggcaacctgggcactatcaaaaactgctacaccaatctgcaggactgggtggtcggctaccagcgtgtcggcggttttgtcggctggaacggcgcggacggaagcatcgccggctgctatgtggcgcacaacgaccgggcgtacggcgccgtacaggcagccatcagcgtaggggagaacaaaggctcggtcagcggcagctatgcggtctccgccacctccggaactgttaacggcttcagccggataagcgactccgctctgaaatccgccgcttctctctccggctttgatgcggctgtctgggatttcagtcaggccgcttcctatcccactctgaaaaacaatccgcagaaataaccggtacatccgcgaatggacatcgaaggagatgcttgcatgatcggttttttcgtgggcctgatactgggcggctcgtttggcgcgctgtttatggcgctgttttgggccgcccgcggcaggaaagaatccgacaagccgtaaggcaaatgaacggcagccgccgtgtttgacaatcagaaagtcgccgcgcatcctgaaattcggatgcgcggcgatttttcgatcccattgctgttttatacgaaaacagttgacgaagatccaactatttagctgtctaactttttgaggctgtctttttgttaaagaattatgaaatcttctggaaagtcttgcaattaaaaaaggaaaagtctaaactcatgcttagtcacctaactaaatggcggccttcgcacagcggatgcgcggagagctgccgcagagaggagcgcgggacgtggacagagaatggacgatggaaaactcctttcatcggatcgtcagccagaccatgcggctgtattttgcccgcaattaccaggtgatggaacggctggatgttcatcctggccaggtgccggttctgttcgagattcatcgcaagggcgggttgtatcagaaggaactgtgtgacagtctgtgcctgcgggcctccaccgtcaccgtcatgctgcagcgaatgacgaaaaacggcctggtggaacggcggcaggacgaggcggatcagcggcgcacccgtattttcctgaccgaaaagggggaggccgccatccgggatttgcgtgacgccactcaaaaggtggaggaggagtgctttgagggcttttctatggaggaaattctgctgctcaagcgctttgccatgcaaatccgggataatcttgccaaaagaatgaatgatatgcctgaaaatcctaagagagaagggaacctatgctcaagctgatcaagtatttgaagtcgtctgtcgcgtctatcctgattatcgtcgtcctgctggtgggacaggcggcatgcgacctgaccctgccccagtatacttctaacatcgtcaacgtgggcattcagcagggcggcgtggaaaacgcggcccccaccgtcatccgggtcagtgaaatgaacaagctgttcctgttcatgtcccaggcggagcaggatacggtgctgcagtcctacaagaagctggataaggccgacatgacggcggccgatgccgacaaggcgctcaaaaagtatccgcagctcgccaaggagccgctgtatgagcgcacggccaaggatgacgaaaccatagacgcgctcagccgcctgctcagcaagcccatgctggtggtcatgggcttctcgggcgacaacgaggaaatgggcgccatggctaaccagatgctctcgagcctgccgccccagatggcgggcaaggacgtcttcgacgtgctcgccatgatgaccgatgagcagcgcagccagatgattacagccattaacgacaaaatgaaggagatgccggatagcatcctggagcagagcgccgtggtcttcgtcaagcaggaataccaggcggtgggcatcgacaccgacaagctccagaacaattatgtgctgcttaccggcgcgaaaatgctgggcctggcgctgctgagcatgctgctgaccgtgctggtgggcttcatcgcctcccgggtggcggcttccctgggcaaagagctgcggggccgggtgttccgcaaggtggtatccttctcgcacgccgagctggatcgcttctccaccgcctccctcatcacccgcagcaccaacgacatccagcagattcagatgctgttcgtcatgctgctgcgcatcgtgttctacgcgccgatcatcggcatcggcggcgtgatcaaggtgctgaacaccaacacctccatggcatggatcatcgtcgtggcggtcatggccgtgctgaccttggttatcgtgctgttcgccgtggccatgccccgcttcaaaatcatgcagaagctggtggataaggtcaacctggtcacccgtgaaatcctcaccggcctgccggttattcgcgccttcagcacccagaagcacgaggaagagcgcttcgacaaggccaacaaggatttgacccgtaccaacctgttcgtcaaccgggtcatgaccaccatgatgccgatgatgatgctgattatgaacggcatcaccgtgctgattatgtggaacggcgcccacggcgtggatgccggcagcatgcaggtcggcgacctaatggctttcatgcagtacaccatgcagattgtcatggcttttctgatgatttccatgttctccattatgctgccccgggcctccgtgtccgccggccgcattgaagaagtcctgcagaccgagccggtcatccgggatccggagcaaaccgtctccttcgacgatgccaaaaggggcctggtggaattcaaaaatgtgtccttccggtaccccggcgcggaggagaatgtgctggagaatatcagcttcaccgccaagcccggtgagaccaccgcctttatcggctccaccggcagcgggaaatccacccttatcaacctgattccccgcttctatgacatcaccgagggcgagctgctggtggacggcgccgacgtgcgccgcgtgtcgcagcatgacctgcgcgccaaaatcggctatgtaccccagaagggcgtgctgttctccggcaccatcgccagcaacctgcgctacggcaacaacgacgccagccaggaggagctcgacaaggccgcgcaaatcgcccaggcggcggatttcatcggtgaaaagccggacggcttcgattcggaaatctcccagggcggcaccaacgtctccggcggccagaagcagcggctgtccatcgcccgcgccatcgccatccatccggaaatttatatcttcgacgacagcttttccgctttggattataaaaccgacgtggcgctgcgcaaagccctgaaggaggaaaccgctggcagcacggtgctcatcgtggcgcagcggatcagcaccatcctccacgcggagcagatcatcgtcctggacgagggcaaaatcgtcggcaagggtacccacaaggaactgctgaaaacctgcgaggtctaccagcagattgccatgtcacaactgtcaaaggaggagctgggcaatgagtgaacatgcgccaaaaagaagaggccccatgggcggtcacggcccgatgggcggcatgcacatggccggtgaaaaggccaaggatttcaagggctccttcaaaaagctactgaaatatctcgggaaataccgcgtcgctatcgtcatcgtcatgattttcgccattgccagcgccgccttcatggtgctggggccaaaaattctgggcaaagcgattacggaaatgatgaacggcctcatcgccaaggtgaccggcgtggagggcggcggcatcaacttcggccggatcggcgaaatcctgctgtttatgctggggctgtatgtcctcagcgccgccttctcctttatccagggtttcatcatgaccggggtgtcccagaaggtcgcctacaacatgcggcgggagctgtccgagaaaatcggccgcctgcccatgaaatacttcgattcccgcacccatggcgaggtgctctctcgggtgaccaacgacgtcgacaccctgtcccagagcctgaaccaaagcctgacccagatcatcaccgccgtcaccaccatcatcggcgtgctgatcatgatgctgaccatcagctggctgatgactctcattacctttatcatcctgccgatttccctgggcctcatcgggctcatcatgaagaaatcccagaaatacttccaggcgcagcaggaatacctgggccacatcaacggccaggtggaggaggtctacggcgggcacaacatcgtcaaggccttcaacaacgagaaaagcgtcaccgacaccttcaacgaaaccaacgataccctgtaccattccgcctggaaatcccagttcctgtccggtatgatgatgccgattatgacctttgtgggcaacctcggctacgtggccgtctccattctgggcggctggctggccattaaaaaggtcattgaggtcggcgacatcgtgtccttcagccagtatatccgcaacttcacccagcccctgacccaggtggcccaggtgggcaacctgctccagtccaccatggcggcggccgagcgggtcttcgaattcctggacgaggaggaagaggatcagacggtggagaaccccgtgtctctggacggcctggacggcagcgtgcagttcgcccatgtgcacttcggctacaaccccgacaagatcatcatcaacgacttctccgcccagattcagcccgggcagaaggtggccatcgttggccccaccggcgccggaaaaaccaccatggtcaagctgctcatgcggttctacgatgtcaataccggcgcgattctggtggacggctacgacgtgcggcagtttaaccgcagcgagctaagggaaatgtttggcatggtgctgcaggatacctggctgttcaacggtaccatcatggagaacatccgctacggccgcctggacgccaccgacgaggaggtcatcgcggccgctaaggccgctcatgtgcaccactttgttcagaccctgccggacggctataacatggttctcaacgaggaggccagcaacgtctcccagggccagaagcagctgctgaccattgcccgggccatcctggccgacccgaagatccttattctggacgaagccaccagctcggtggatacccgtaccgaggtgcgcatccagaaggccatggataatctgatgcgcgggcggaccagcttcgtcatcgcgcaccggctgtccaccattcgggacgcggatctcatcctggtgatgaaggacggcgacatcgtcgagcagggcaatcacgaggacctgctggcggcgggcggcttctacgccaatctgtacaattcccagttcgagcaaagcgaagcgggctgaactaaagcgggccatgttgcatggcccgcttttcctgcccataaaaaagggatcgcccgagggcgatccctttttacgctatactggaaaacctcccatatctatatcaaacacgctcctattcttcacgagccggcatgttggacgtcaaacgagggaaaggtaatcatctgctgctcgttgtccacgatggtcatcggcgtttcgggcaagagccccttgatggtttcgataaaggtgttgctgtcggttcccggtgagccgctgacgatatgaacggcgttgatctgccgcgcgtgcaccgccacggtcagcgcggggctgtcgttaaaatatacggtcatatcagctcccagccgcccggcgatattgtatagagtttgcagcacatcggcggttttggaagaaaccagccccggtttcaatacggtgacgactttgacgggcacgttgtatttctgggcgatggcgtcgccggcgagtatcagccggcggcagctgggctgatcggtgacacacacgagaacgttcgcctgacctgccgggttttccgtattcaatcaggttgcgcctcctttcgttcttggtacgaatatatgataacgcaggcttgtgtaataaccataaacaaaaaatgtacaacttcttaaatttcggaaacaattccgacaggaaaccggcagggaaaagcaaagaaaccgcaaagtcttgacttttttcagacgtgtgctatgatgccagaggaagaaaaaatggggaaaaatccccattcccgcggaggaatgactcatgaaccaaccgagcccccatacgctgaacagccgccgatccccgtttatgcaaacggtgctgatcgccatgttcgccgccctgtcctttgtggccatctggcttatccggattccgtatccggcgccggtgggcaatccgtttatccatttcggcaatatggtcaccatcctggccgccttgctcatcggcggctggcaggggggcttgtccggctccatcggcatggggctgttcgatattgtgggggggtatggcatcgactcccttaaaacctttatcctgaaattcggcatcggcctgttcaccggcctggtcgcccgcatcggccgccgccatccggaacgcaatccccgcgtcggtctgggcgtggccggcggcatctcgctcgccatggggctgacggtgctcatcggcaagctggcgggctggtcgctcctggctaaggcggcggatatttcctatgtgctgctgctgatcatcggcgttctcctgaccgcgctgaccgttgccgcctgccgcacggaaaagctgaccaatgaaacgctgttcgccgccttgggagccacggcggggatcgcctttaacgtggtgggagagttcgtcggcggggtgatcaccaaggtgataagcggcgccgagctgcccgccgccatgctggcttcggtgatgagcctgccggccaccttcatcaacggcacggtctccattgtgggggcggtgctcctgtatgtgccgctgaaggccgcactgataaaagcgcgtttcggccatctgctggcctgaccgggctttaaaaatcggggttgacaagggccgaaaaaaggcgtatccttatagaaaatacagttctaaacgctgtgacggggttgtcccgccgaaccttttttcagagagccgccgggtgctgtgaggcggtaaaaggccggcaagaggaccatcgcccccgagcggatcgctgaaccgcccagtgcccagtaagcggatacggggtcttcccgttacaggagagcgcattaccgccgggagatccggctcgatgcgggcgagggccgcttgcggccgcagtagggtggtaccacggaacagaagcttccgtctctataaagaggcgggagctttttatattacaggaaagaggccatggctatgctgactctggataaggtgtatcatgcgtcgtatgtgctcaaaaacgtcatccgcatgaccgacctgatacacgcgcccaacattaatcccagcggcaaggtgtacctgaagacggaaaatctgcaggtgaccggctccttcaaggtgcgcggatcctactataagatttcccaattgaccgacgaggagaaatcccatggcgttatcgcctgctcggcgggcaaccatgcccagggcgtggccctcgccgccaccaagaacgggatcaaatccatcatttgtctgcccgatggcgcacccatctccaaggtggaggccaccaaaaaatacggcgcgaaggtggagctcgtccacggggtgtacgacgatgcctacgatcgggcgctgcagctcagggatgagaaggggtataccttcatccacccctttgacgatgagaacgtcatcgccgggcagggcactatcggcttagagctgctcgatcagctgcccgaggtggacgcggtggtggtgccggtgggcggcggcggcctgattgccggcgtggccttcgccatcaaatccctgaacccgcacgtcaaggtgtacggcgtacaggcctgcggcgcggcctccatggtcaacgcgctgcaaaagcaccagaaggaaaccctgtcccaggtgtccaccatcgcggacggcatcgcggtcaaaacgccgggcgatttgacctatgagctgtgcgagaaatacgtggatgaaatcgtcaccgtgaccgacgacgaaatttccaccgccatcctaaccctgatcgaacagcagaagctgatcgccgaaggggcgggggccgtttcggtggcagcggtgctgttcaataaaatcccggtggagggccgcaacgtggtctgcctggtgtctggcggcaacatcgacgtgaccatcctgtcccgggtcatcagccgcggcctgctcaaggcgggccggtcggcggacatcaccatcgaattggccgacaagccgggccagctcagcggcgtgtcggagatcatcgcccgggagggcggcaacgtggtctcggtctaccacgatcgggcggatttggataccgacatcaacgcctgttacctccggctcgtgctggaaacccgggatcacgcccacgtggagcaaattaaaaaggcgctcgtcgacgcgggctataccttaatcgtaaaggagagaacctactgatgaaaaccattcataccgcgaaagcccccgaggccatcggcccctattcccaggcgatcgtccacggcggtctgctgttcacctccggccagattgccatcaacccggcctccggccaggtggaggcggacaccatcgagggccagaccgagcaggtgatgcagaacctggcggccctgctggaggaggcgggcgcttccttcgacagcgtgatcaaaaccacctgtttcctcagcgatatggcggatttcgccgcgttcaacgccatttacggcgcctattttgtcagcaagcccgcccgttcctgcgtggcggccaaacagctgcccaaaaacgtgctggtggaagtggagctcatcgccgccgtctgacagctggatatttccccgccgggagagccgtttgggtctcccggcgtttttttatgcctggatctccgcttccagccgcagggtgagggcttccagatggtccagcgtgtcgggatggatgaaatgctccacccgttccacctgctccagctcgtcgacggactgattgagcaggcagaaaaagcggtgcagaatgtcgtgacggcgcagcagggcctgcccgacggcccgcccctcctccgtcatgccgattaacccgtatttttcaaaatccagcaaacccagctccttgagctttcccaccatcttggaggcggaggatggccggacatgcaacttttcggccagctggtttatccggacatagccggcttcccccgcgcagcgcgcgatcatttccagataatcctccatggtgtcggtcagcccgccggcgttctgcagccggtagcccatctgcgtataaaatcccttgtccccgttcaaaaaatcgtctccttatctgtcacccacccggacatacctgcataagttggtagcaggaaacaagttttgcatctggaaacacagatgctttccgggaaaaagagtttcccgcgcccaacactgtttcctgtttatacttattattaggagacgagttttatgagtaaaatgtcgctgaaccacgtggccgaggggcagaccgtccgggtggacgaactgctggccaccggcagcatccgccgccgcctgctggatatcgggctggtggaaggcacagacgtgtcctgcctgcagaaaagcccggcgggcgatccggtggcgtatctgatccggggggcggttattgccatccggtcggaggattcctcccagatcgtcgtcgaaggcctgctgaattagcttgagcgaggaggatgggagatgggattaacagcaggttccaccggccggggcgcggcggataaagggcttttcatccagcgggaggacggcgataaggtgattgctctcgcgggcaaccccaacgtggggaaaagcaccgtgttcaacgagctgaccggcctgaatcaacataccggcaattggccgggaaaaaccgttaccaacgcccagggccactacacccataaggggatgcacaccattttggtggatatccccggtacatattccctcatggcgcattccgccgaggaagaggtggcccgggattttatctgcttcggcggagcggacggcgtcgtggtggtctgcgacgccacctgcctggagcgcaacctgaacctggtgctgcaaaccatggaaatcaccgaccgggtggtggtctgcgtcaacctgatggacgaggccaagaaaaagaatatccgcattgattttgaccagctgtccgagaatctcggcgtgccggtggtgggcgccagcgcccgcagccggaaggggctggatgagctgatggacacggcggcgcgggtggtcgccggggagaaaacgcaccccacgaaaatccgctataccaagcctatcgaatccgctatcgaggagctggagccgctgctggaggggcctctggccggccgcctgaacagccggtgggtggcgctcaagctgctggaaggggacgataccctgctgcatgccgtcggcgagtatgtcggcgtcgagctgatggaaatccccggcctgccggacgccgtcctgttggcgaagcagcacatggcggatgcgggcctgtcggcggagcgctttaaggacgtgatggtctcctgcatcgtgctgcgggcggaggaaatgtgctccgacgccgtgttctgcgatcgggcctgctacaacgcgcgggatcggaagctggatcgtatcctgaccagcaaacgcaccggctttcctattatgctcgcgctgctgctggtggtgttttggctgaccattaccggggccaactatccttctcagtggctggcggacggcctgttctgggttcaggatcggctgaccgacttcttcacctggatgcacgcccccgactggctccatggggccctggttctgggcgtctaccgggtgctggcctgggtggtgtcggtgatgctgccgcccatggcgattttctttcccctgttcaccctgctggaggacttcggctacttgccccgtatcgccttcaacctggataaatacttcaaaaaggcctgcgcctgcggcaaacaggcgttgaccatgtgcatgggcttcggctgcaacgccgccggcgtggtgggctgccgcatcatcgattctccgagagagcggctcatcgccaccatcaccaacaacttcgttccctgcaacggccggtttcccaccctgatcgccatcatcaccatgttctttgtgggcacggcgggcggcttcgcctcctccttcctctcggccctggggctgaccctggtcatcctgctgggcgtgggcatgaccctgctggtctcccgtctgctgtctaaaaccattctcaagggggtgccctcctccttcacgctggaactgccgccctaccggacgccccaggtgggaaaggtcatcgtccgctctatcttcgaccgcacgctattcgtgctgggccgggccgcggcggtggccgcgccggcgggcctgattatctgggtgatggccaacgtgacggtgggggatatgagcctactggcccattgctcccagtttctcgatcccttcggccgcctgctaggcctagacggcaccattctgatggccttcatcctcggctttccggccaatgaaatcgtcattcccatcatcatcatggcctacatggcccagggcagccttaccgacatgagcaatcttaacgagttgcacaccctgctgaccaataacggctggacctggctgaccgccgtgtgcactatgcttttctctctgatgcactggccctgctccaccacctgcatgaccattcataaggaaacccaaagcctcaagtggacggcggtttccttcgccgtccccaccgtcatcggcatgctcgtctgcctgctggtggcaaacggcgcccgcctgctgggcctggcgtaaattccctgaggcagctcacgtcccgccgcgggctgcctcatcttctttacgtttgccaacgggttgtaaaacttgccgaggcaccttgtgcccggccccctgctctggtataatgaaggtatgtcgaaaaagcgaggaagtgtgaatccatgatcgataaacgctgggccctgccgacggccctgctgcttttcataacgctgattctttccgcctgcgcgccgggcggcgcggcctcggacggcctgatcatctccgaggtgatggccaagaataacggcgcgctcgcggacgacgaggggaattaccccgactggatcgagctgcacaaccccacggataaagccataggcctgaagggctattccctgaccgacgacagccggaaaaaaggaaaattcgtcttcccggagatggagataggggccggggactatctggtggtcttcgcttccggcacggagcgggtggacgcggagaaccgggtcgttcatatgcctttcagcatcaattcccaaaaagaagatattgttctctacgatccccatagccgggaaatcagccgcgtggaggtgcgggatctgccggacaataccacctgcggccccgacgcacagggcaaaaccgtctacttcaagcagcccacgcccggcgccgccaatgcggaaacctacacccccgccgtgcgcggcgacggggtggcggccgccgacgcgaaggtgcgcctgaatgagtacgccaccaagggcagcgtcactctcgccgacgaggacggggagttcaccgcctgggtggagctgcataactacggggacaaggagctgtccctggcctccttcaccctgtcggacgacccggcgaaaaccgataaatggacattccccgccgtctccatcccggcgggcggctatcaggtgatctacctgtcgggcaaaaccaaaacctatgccgccggcggccccctccacgcggatttcgtcctgtccggcaaggagcccagcctgacgctctacgcggccgacggcaaaaaggtggacgactgcaccgtcaacgacctgacctcgaatctgtcctgcggccgttcggcgcaggacgcgggaaaatgggtgttctatcccaagcccacccccggcaaggctaacgatacccagagcttcgattccatcgacagcgcccggtatccgaaaaataaggaggccgttatttccgaggtggcggcggtcaaccgcacgggcgtcaaggcagccaacggccagtattacgactatatcgaactacataaccccacagacaagcctgtaagcctgaacggctacaggctttctaaaaaggaggatcccgccgcatacaaaacccttcccaacgtccaactggcgccgggggaatacaagctcgttttctgcggcgacacggatagctacaatacccgcaccaaggagattttcatcgccatgggcctgggccggtacggggagcatctctatctcctcgcgccggacggccgggtggtggacgatgtgcagtccggccgcctggacgacgcccagtccagcggccgggtgtcggacaccgacccgcaggtgtactatttcgataagcccacccccggcgcggccaaccccgccgtcggcctgaagggccccgcgcccacgccggtgttctccgtgtccagcgggtatctggagggcggcggcaaggtgtccatcacctgccccggcgccaccatccgctacaccaccgatggcagcgcacccacggcgagctctcctgtgtatcagggggaaatcgccgtgtccaagaatataaccatccgggcccgggcctttatggacggccgcctcccctccgaggacagcgcgggcagctacctggtgggccgccggcatgccatgccggtcatcttcctgtccaccgatccggccaatctcttcgactataacaccggcatcctcgaaaagggtcccggctataccgacacattcccacacaccggcgcgaacttttggaaggactgggagcggccggtccatttcgaatatgtggacgaaaacggcgtggcccagctggaattcaacgcgggtgtcaaggtgttcggccagtacagccgcgcgatggatcagaaaagcctgtccatcaacctgcgggatcggtacggccccaaggagttctgctaccccctgttcgggcaggacgccgccaccaacgtctattccgagttggtgctgcgcaacgccgggcaggacggatcccacgcccatctgcgggatgcctttgtggcccggacgattaagggccaggccgacgtggatttcatggactatcgtccggtggtcgtgtatatcaacggcgaatattacggcctgtacgatctgagggagaaaatctgcgaatcctacgtgtccaaccgcaccggagcggacgaggataccatcgatatgatcaagggcgaaagcatcctcatgtccggcagcctgaccgcgtataaggaactgctgcagtacgtcaagacccacgatttgtccaaacaggagaattatgatcacgtggcctccctggtggatgtggatgaacttatcgattactggatcgccatctcctttttcggcaacaccgataccggcaatatcaaattttaccgggaacgcgcggacggcgcgaagtggcgctgggtcgtgttcgatcaggactgggctctctggcccggcactcacacctggaacatggtggaggaaatcatcaacccgaacggccacggcgtgggccatatgttcagcaccgacctcatgcgcggcctgatgcacaacaccgccttccgggacaaatttatttccacctatggaacgcggttgaaaaccacctattccaccgagcgcttgctgagcgtatatgacgccatggtggcggaaatccgggccgaaatgcccgcccattttgagcggtggccgggtctgggcaatatggccacctgggaagccaaatgccggatcctgcggggtattatcgagaaacgccccgcccaaatccggcagaacgtcatcgaaaccttctcctgcaccggcgtaagcgccaagagccggtacgcccagcccttcaagctctccgtcgaacaggtcgaagccttattgggataaaaatccggagcgttcgcgctccggatttcagcttgtcgaaaaagtccggctcacgccgtccatttacgccaagctgagcaaaagtggggaaaatcgaaagattttccccacttttgacgcctgcgggcgagcgattgttgcgcgaggagggaaccctgacgtgttcccagcacgaaggctctgccttcgtgccgcacacctccccctccctccgctatactttttcgacagtctcaattcttaaattccaatgaagcccttgacaaatgggaaaagagatgtattattgtattagatgcttaatacaataatacgaaagggaggtgtgcggatgtttgcagataaccagttcgattccggcgcaccgatatatacacagattatgaataagattaagctgcgtatattgtcggggcaatgggcggctggtgagcgtataccggccgtgcgggagttggctgtggagttcggggtcaatcccaacaccatgcagcgctctctgtccgagctggagcgggacggcctgctgttcagcgagcggaccaccggccggtatatcacgcgggacgcggccttgatagagcggacgcgccggcagatgggggaagagctcatggctgccttcgtcgagcagatggagcacatgggctacaaaaccaccgaagacatcctgcgggagctgcggcagtacctgcagggataactccgcttttccggcgcgacgcgcgtcgcgccagaggagggcggcaagaaagggttgacaagaatgagcagcgcactcgttacgattgagaatctcaacaagtcctacggccgcgggccggtgctgcagtcgctgaacctgacggtgaacagcgggcggatcgtgggggtcatgggccccaacggatgcggcaaaaccaccctgtttaaaatcctgacgggcctcatcagcgattatcagggcaccgtgaccatcgacgggcaggcgccgggcgtgtataccaagtccatcgtttcctatctgcccgagaaaacctatttgagcgactggatgcgggccaaggacgccctggatatgttccgcgatttttacgcggacttcgaccggcagaaggcggctgagatgctgcagcgtttccgcctggatgagaagatgaagctgaaatccatgtccaagggcatgcaggaaaagcttcagctgattctggtcatgtcccgggccgccaagctgtacatcctggacgaaccactcagcggcatcgatccggcggcgcgggattccatcctggatatcattctgggcaattacagcgagaacgccaccgtcatgctctccacccacctggtgtacgacgtggagcggattttcgacgatgtgattattatgagctacggtcagctgctggtggcggacagcgcggacaatatccgggataagtcgggcatgtccctggacgcttattttagggaggctttcaaatgctgaggaaactgctgaaatacgaattccgggcgagcctgctcatcctgcctatctgccttgtcgccatggccctgctgtacggcgcgggctgggccgccaaagccatcggcatcagccagctggccaccacctgtgccgtgttcctggccctggtgggctgcgcctccgtcgtggtggctctgatcaccgccattctccgcttttataagggcgtgttcggcgccgagggctacctcattcagaccctgcccgtgggcaagggctcaatcatcctgtccaaggcgattaccgcctatgtcctgctgttcgccggtatgctgatggccctgctcgctatcctgggcaccatgcagttgatgggcgcacaggagttctttaaagggctcaatgaacagttgggcggctctctggtcacgatgggcgtctacgtcggcgtgtccatgctgattggcctggccctgaccattggcgagctgtactttgccatcaccctggccaataccaagaccttttccagcaacagcgtcctgttctccgtgctcttttacttctgcacgacgatggtggccggcttgctggaggtggtggccatgctgattgtccccctgggcttgcgcatcggcgcggacggcgcctccttcgtctttgaaaacatgtgggggactctcattgagagcctccggatttccggaggcggatcgtctgacctgatgaacgtcaccatcggcatgggcaacctggcgatggatctcctccttgccgccgctttcctggtggcggcccggtggctgatgaccaaaaagacctcggttaaataggatatcctgtgacaaggaggcgctgccgttcggcggccgcctcctttgcgctttttatgaaaatctcttgctatttgtcagggaagtgtgtacaataaaaaagattgggaggggacggcatgcctttggaaaagaatcaggagattgagctggccatcaccggcatgtccgcgcagggcagcggcgtgggccgctgggtccaggaggacggcgcgccgggcctggccgtgttcgttccctttacggctgtgggcgatcggatccgctgccatatcgtcaaggtgcagaaaacccatgccttcggccggatgagcgagctgctggagccctccgccgaccggctgccggcggacgaggcggcggactgcgcggccttcggccgttgcgggggctgcgcctaccggcacctgtcctatgaggccgagctgcgcgtcaaggagcagcgggtggccgacgcgttaaagcggatcggtgccctggagttgacaccccgtcccatcgtgggcgccgccgcccccgatcgataccgcaacaaagcccagtatccggtggcccagggcgaataccgcctcctagccggcttttacgctccccgcagccaccgggttgtcgagcagcgggactgccgtctgcagccggagatcttccgagatgtgttggacgaggtgctccgctgggcgaaacgggcgggcgttcccgcctatgacgaggagagcgggcagggccttttgcgccatgtctatatacggcaggcccgggccacgggggagatcatggtctgcctggtgtgtacctccggcaagctgcccgataccaagggcctggtgagcgccctgcgggagcgggcgcccggtcttgccaccgtggtggtcaatatcaaccgccgggacaccaacgtcattctcggggaggagaccttccccctgtgggggccgggtaccatcaccgacgaattgtgcggcctgcgttttcggctgtccccgcattcgttttatcaggtcaaccgggagcaggcggaacggctctacgccctggccgccgaggccgccgcgctgaccgggaaggaaaccctgctggatctgtactgcggcactggcaccatcggcctgtccatggccgcgcaggccgcgcaggtcatcggggtggaggtggtgccccaggcggtagaggacgcccgccgcaatgccgcggacaacggcattgaaaacgcccgcttcctctgcgccgacgccggccaggcggccgcccgcctccgggcggaaggggtgcgccccgacgtggtggttctcgacccgccccgcaagggctgcgatgaggcggtggtggataccgtcgccctcatggcgcccgaccgggtggtttatgtttcctgcgaccccgccactctcgcgcgggatctgcgggttttcggcgagcggggctatgccgtgagacaggtgacgcctgtggatatgttcccccgcaccgcccacgtggaatgcgtggcgctgctgacacgcacagacctatgactggagaatgggtacggcaatgagactaacgggccaaagcgataccgaacaaatcgagccgtacaaagagcggctgcatattgcgctgagcgcggcgaaaatctgtattttcgaggtggatctgctccggcagctgtacaccttttttgaaaatgcggaaatcattttcggcgtgtccggcgagaaaatcctgcgggatgtgcagccgttcagccttctggagccggaagag

SEQ ID NO: 1582 - DNA, 5539 bp, Unknown
  16S sequences of unknown bacteria
ctcggtcagggtcttatgcagcgtttcaaagtactcccaagcagttccttaactattttgaagagcccgaccgtcctcagattcactcggaaagagagcttgagcacggaatggccatttccatgggcagacttcgcgaagatacgcagtatgactataaatttgtttgcctttcccacaacacccttcgcggcgctgccggcggtgctgtgcttcttgccgagcttcttgcggcaaagggctatatggactgagtgcccattaagtaagtatttaacgatattttaactccgcgtcgcgggaataaaatcccgtgcgccgcggtctaatttcagggaggaatttattatggcgtcaatttttacgggagtggcgaccgcccttatcacccctatgaacgaggacggttcggtaaatctttcgaaaatcgatgaaattgttgaagagcagatagaaggcggagttgccgcaatcgtttcctgcggaacaaccggcgaaggaagcaccttgagccgcgatgaacacgttgaggtcatgcgccacaccattaaagccgttaaccaccgtattcccgtcattgccgggaccggaagcaacgacaccgcttttgccgtcgagctttccaaagaggccgaggaaatgggtgccgacggtctgctgcttgtttcgccttattataacaaggcctcgcagaagggtcttgtcgagcactacacctatattgccgaccgagtcaatattccgataattctctacaatgttccctcccgcacgggcacgaatattgcctgcgaaacatataaggttctgtcggctcacaaaaacatcgtggccgttaaggaggcaaacggtgatatttcgagcgtagctcacaccgtttcgctttgcggcgacagtcttgacatttattccggcaacgacgatcaggttattcccatgatttctctcgggggcaagggagtaatttcggtgttttcaaactttgctcccaaaaccatgtcggaaataaccggtcttgctcttgagggaaaattcaaggaagcaaccgctttgcaaagcaaatatcttgagctgatgaacagcatgtttatcgacgttaaccccattcccgtcaaagaagccatgaatcttctcgggtataatgtcggcccctgccgccttcccctttgctccaccactcctgaaaagcttgaaaaaatcaaggcggctctcaagggagtaaatcttctttaaattaaacggatgtgaaaactatggtaaaaatttttctttcgggctgtaacggccgtatggggcaggtcatcatttcctgcgttgccgcaagagacgactgtgaaattgtcggaggagccgatattttcaatgagcaaaaaaacgaatttcccgtctattccgacataaaggagtttgacggcgagtgtgacgtgattattgacttttccaaccctgcggctctcggcggcttgcttgaattctgtcttgacaaaaaggtgcccgccgtgcttgcgactacgggatattccgaggagcaaaagcagcagatttccgaggcatccaaaacggttccgattttttacacggctaatatgtcaatcggcgtaaatcttattgccgaactgtgtaaacgtgccgccaccgtgcttgaggacgattttgacattgaaattgtcgaggctcatcataatcaaaaactcgacgctccgtccggaacggcgaatatgcttgccgacgcggttatggaaggctgcaacaacaaaaaagagttggtatacgaccgtcacgagcgccgcaagaaacgcgaaaaggatgaaatcggtatgcacgccattcgcggcggtaccattgtgggcgaacattcggtcatctttgccggcagagacgaaataataaccgtttcccattcggcgcgttcccgtgaaatttttgccgtcggagctcttaacgcaagccctcgggaatttataacatgggtgatcttatcggaaagtgttaggtgaacagtatgggatataattttacctttaccgaagatattactcttgtggtgctcgatgaagcgcccgccgatctgtgctttgtggcctctgcctttgaagcgctgtctgtcgggaagataaatattgatatgatttcccaatctccgccaaaaggttcatcatcgggtctcgcatttaccctctcagacagcgatctcggagcggctctcgagaccattgcaaagcttcgcgaaattttcccgaaaatcaaaatttcggtcagcagcggtaatacaaagctgctcataagcggagacgacatgaaaaataactacggaattgcggccgaggtttttaacgccgtcgccgcaacccatgccgatgtcaggatgataaccacctcagaaatcgacatttctcttctgattaccaatccggatgttgagctgataaaatcaaagctcagcatggcacttaacgcttaataaaaaaatcaccgtctgaaatcggccttgtgaacactcggcctttgcagacggtctttttttgcctttaccagcataaaaatataaaaaatgaaagtaagtgaaagtaaaggtgaaaaaatcctatgttcccgcccttatgtttttcgccgtcttttcggcaataatatttttcggcggcgagatgacaaatatatcacgatctctgcttaatgcctcggtgaaaattcagcttttatcggtgggatataaagcggagaatataaacgtaaatacagaaccgccgtcggacggcgaaagagttgctctgcagcctgaggtttcaagtgtcgggcagagcgatgcggccgtcgaacgcccgacagacgtggaaacgggagacataaagaccgtcgcgcttgaaccgtcggccggaaattccttttccgagggaattcactataacaacacggccggtgtcgatattgacgtatcttcccttctgtccgaaggacttccgtttaaaatcgaggacagctccgagccgcaggtgcttatatatcacacccacggaaccgaaagctattccgactccgacagcggattttatgttaaaaacgacgacggctcccgttcgaccgacacgtcgaaaaatacggtaagggtgggcgacgccattgccgaagtgcttaacaataacggtattgtgacgattaacgaccgaacaatgcatgataaagacagctataccggcagctattcccgatcggaggccaccgtcaggcaatatctcgagaaatatccatcaataaaggttgtgattgacggtcacagggattctatcacacagtcaaacggcacaaaaatcaagcctacagccgaaataaacggaaaatcggcggcgcaggttatggttctcgcagggtgcgaaagcggcgatgtgacaaattatccgaattggatggaaaatctccgttttaatctcctgctccagcgtcagcttgaaaacgattatcccggccttgcaagggccatgagctttaagtcctgcaaatataattttaacattatgaacggttcaattcttcttgaaatcggcagcgaggccaataccctcgacgaggcggtatattccggacagcttatcggcgaagccttggttaaaatatttaagcaataaaaatgccccttgggagaagtttactctcaaggggtttgtttatccttcgattatttcataaagctctttggcgccgtccttggttacaaattcgggaacggcgagaacctttgcggttatggggtgctgccccatccttattgtcataacgtctccgaccttaacgtcatatgacgctttgacaacacgtccgttgacctcgattctgcctgcgtcgcaggcctcgttggccacggttcttctctttatgatacgggaaattttcagatatttatcaagtctcatatttaactccttttggcctcctcccaaagcctgtcaagaacttcgagggaggagcttttcatgtcgatttctttttgctccgcaagcttttcaaccttttcaaaccttttgatgaatttgtcagcggctccgtgcaaagcctgttcggaatttattttgagaaaacgggagacattcaccatggaaaagagcaaatcaccgtattcttcaaacatttgctcctgattaccgtttctaaccgtttccttaaattcggcaagctcttcatcgatttttttggaggcatcctccgcattgtcccaatcaaaacccgcttttttggctcttttttgcaccttttcggcgcgaagcagggcaggaaaagccatcggaacgctttttaaggtatcggtgtaggtggtttgatttttggatttttgcttgattttatcccaattatcgagaacctcgtcggaattattaacgttaaccgagccgaaaacatgaggatgccgttcaattagttttttacaaattccgtcgcaaacatcggtaaaatcaaaggacttcttttcggcttcgatttggctgtgaaaaacaacctgaagaagcacgtccccgagctcttcgcacatatccgttgcgtcgtctcggtcgatggcatcgattgcctcataggtttcctcgataaaatcatttctgatcgaatggtgatcctgttccctgtcccaagggcagccgttgggacttctgagctccttcattatttcaagaagatcgtcgatattatatttttccttgtttatttctatcatgagaatttacctcctttgagtatctctttgggagaaatgaccttgaaaagtaaaataaaaatcaaatatacaaaaaccgcaagtgcaatcgaaagaacggtcgaaagctttggcgaaacaaagcccgaaagcagcaaatgcccgaaatgagccgaaaggccggaacacgccgccgaaataacgggaaaggcaaaatcctttagcaagttcggcgcaaagcctgttgtcctaacaattgcgataaaatcggcaatgaaaatgtagagataacaaacggttgttccgattgccgctccgttaacgttaaattcggttcttggcacaagaaaaatgtttacggcaagctttaacactaccccgacaaacatatttgctacgggaattttttcttttccgacggcctgcaaaaccgccgtgaagggaacggaaaaacccgcaaaaacggcgcaaaggcttaaaattctcagctggtgtgaagcaatttcggcaccgtagggctttgacgaataaagcagctcaagcaacggacggctcagcacaagaattccaacggcggtgggaaaagcgataaccgacgtcagttttaccaccgagtgaagagttctgtttgccgcctccctgtcccccgtctcccaaaagcctgtgagagacggaacgagccccactccgataactgccgtaaggttcggaacaagggcataaatcggagtggcaaagccgcgaaaacacccgtaaagataggcgggaacgtctgtcgcaccttgatttatcagcccatttgaaaggccgggataaacctcaaatatcccctgcggatcggagaaaagcatggaagaaagc

SEQ ID NO: 1583 - DNA, 5377 bp, Unknown
  16S sequences of unknown bacteria
caagccgcacagaatcaggccgtgcagaccgactcgccagcatacaaaaatagacgcagccagaatggccacgtccagtacaacgccagtcatattcgcgttcgatgcataagaacaagacgatgcagcgcaatttgccgcagcgttacaagacattgtattagaattagaattcgcattcaacttcatagactgcgccatttcgtgcatctcccttctgcttattgactttcctattttattatattttccccgccctgtcaatccgccaccattgacaaatccggcggcttgtttttggcattttctgatgaaataatacaattccttgtagatttttccgtcaaaaaatatcgaatttccaccattggccgaaagcgccagaactttccgtcgttttcccgggataatgccgcggccgcaggtcatactagcactgaggcaagcgaaagaaaatatccgctgcctgaaataagaagaaaaggagatgcaacaacatgaaaagcaacaaccagatcaatgttccggaagcacgcgacgcgatggacaagtttaagatggaggccgcttctgaagtcggcgtcaatctgaagcagggctacaacggcgacctgacctcccgcgaagccggttcggtcggcggccagatggtcaagaacatttggcccgaacgaaccgcggtattccaccgccccagccgcaccgcgccgggccactgccgggccgtacgctaccgggcctttctgactacataactgccaagcacagcgcccggcggcagtcatggaaaatctgcaaaacgttcacaatttatttaaaaacaactattgacaacagcggagggcggtagtatatttagtttagcactcagagatgtcgagtgctaaatcaataagaaagagggccgctggtttggaactgacagatcgaaagaaaaaaatccttcgggctatcgttgaaagctatatccagacggccgagccggtcggctccaagtatatcgcccaaatgccggacctagcctactcctctgcgactatccgcaacgagatggcggatctgacagccatgggctatctggagcagccccatacctccgccgggcgcgttccgtcgcccgctggttaccggctctatatcgacgagctgatgcaggactaccgcctctccgtcgatgagacccagagcatgaatcaggccatgcagctgcggatgcaggagtttgacacgatgatttcccaggtcggcaagattgtctccaatctgacgaacctgcccgcctacgccatggcgacccactgcggcgcggtgacagtcaaacggttcgagatcattatggccgacgccgggagctttatcctcgtcgtcatgaccagcaatgatgtcgtcaaaaacaagctcatcaagctgcccctctccatcacggaggcggatctgaagctgctctcggccgtgctcaatgcgagcttggccgaggtcgcgccggatgggatcacccaggagctggtcagccgcatcacccgcagcgccggtccggcagcaagcctgatccccatcatcattgatttcacgacccaggtgctgctgcagcagcagcgggatgaaatttatctgactgggcagatgaagctgctcaagcagccagagtaccacgatgtggaaaaggcggaggagcttctgacaagtctggacgaagagatgctctccaacctcccggcggccattgaccgcagcagccccgtacaggtgctggtcgggccggagaacattgcgaaggaattgaaagacacctctgttgtggtgacccgcttcgatattggcgacggcatgcagggcatgatcggcgtcgtcgggcccaccagaatggattacgcacaaatcacagcgcggctttcctattttgccgaggggctgggccggatgttcgggaagaacgagctgccggcgcccaaagaaccggaaaaaactgagcaggaggatcgttgatcgtggcgaagaaagaaacaaaaaaagcggaagacgcagcgcaggatgctgcccaggcagcccaggccgagacggcccagcagccggaagcagccccgcagcaggatgatcctgccgcgcagctggctgccctgcaggcaaagcttgaccaggagcatgacgcatacctgcgtctggccgcagaatatgataatttccgcaagcgcagccaaaaggaaaaggacagcttgtatcaggatgcaaaaacagataccgtcagcaagatcctgccggtatttgataatttggagcgcgccgtcaatcagccgacggaggacgaagcctataaaaagggcgtggagatgaccatgagcggtctacgcgaggtcatgagcaccctgggcgtcaccgaattcggcgaagcgggcgacgccttcgatcccaatatgcataacgccgtgatgcatattgaagacgagagcttgggcgaaaatgtgatcgcccaggtcttccagaagggctttaagatcggcgaaaaggtcgtgcgatttgccatggtgcaggtcgctaactaaattttgtaaataataaagatttctataggaggaacagactatgagtaagattattggtattgatcttggcaccaccaattcctgtgttgccgttatggaaggcggcgagcccgtcgttatcaccaacgccgagggcaaccgcaccaccccatctgtcgtggcattttcgaagaccggcgagcgtatggtcggccaggtggcaaagcgccaggccgttacaaaccacgagcgcaccatcgcctccatcaagcgccacatgggggaggattacaaagtcagcatcgacgacaagaaatacaccccgcaggagatttccgcgatgatcctgcagaagctgaaggcagacgctgaagcttatctgggcggcaccgtgacggaagccgtcatcaccgtccccgcatacttcaacgacgcccagcgtcaggccaccaaggacgccggcaagatcgctggtctggatgtcaagcggatcatcaacgagccgactgccgcggccctggcctatggcgtcgataaggaagctgagcagaagatcatggtctacgacctgggcggcggcaccttcgatgtctccattctggacattggcgacggcgtcattgaagtcctctccacggcgggcaacacccacctgggcggcgatgactttgacgaagccatcatcaagtatctggtcgaagaattcaagaaggccgagggcatcgacctcagcagcgataaggtcgccatgcagcggctgaaggaagcggcggaaaaggcgaagattgagctgtccggcgtgacctcctcaaacatcaacctgccgtatatcacggcggacgccaccggcccgaagcatctggacgtcaccctgacccgggcaaagttcaatgagctgacggcgcacctggtcgaagcgaccatgggccccgtgcgtcaggccatgtccgacgcgggcctgaaggccagcgacctgagcaaggtcctgctggtcggcggctcctccagaatccccgccgtgcaggatgccgtcaagggcatcaccagcaaggaaggcttcaagggcatcaaccccgatgagtgcgtcgccatcggcgcagccatccagggcggcgtcctgggcggcgacgtcaagggcctgctgctgctggatgtcaccccgctgagcctgggtatcgagaccatgggcggcgtgttcacccgcctaattgaccggaacacgaccattccgacgaagaagagccagatcttctccaccgcagccgacggtcagacctctgtcgaggtccacgtcctgcagggcgagcgtgagatggcagcctataacaaaacgctgggcaaattccagctgacgggcattgccccggctccccgcggcgtaccgcagattgaagtctccttcgatatcgacgccaacggcatcgtcaatgtctcggcgaaggatatgggcaccggcaaggagcagaatatcaccatcacctcttcctccaacctgagcaaagaagatatcgacaaggccgtcaaggaagccgagcagtatgcggcggaggataaggcccgcaaggaagaggtcgacgcgcacaacgctgccgagcaggtcatttaccagacggaaaagacgctgggcgagttgggtgacaaggtctccgaaagcgagaaggccccgattctggcagcagtcgaaaagctgaaggaagaaaacaagggcaataacgtacaggccattaaggacgccacggatgccgtgcagaaggccttctacgccgtctctgagaagatgtaccagaacgccgcgccgcagggcgacgccgcgggcgcagctggcgctgccggcagcgcaccggatgacggtgttgtagacgctgactttgaagaggtcaacgactgattccaggcaaaaacgcaatgcgccccccggagcatcccgctccgggggactgtgcggtttggctcccgccgggccgcggcattgccaataaagcgaggtgcgtgattccatggcaaatgagaacaaacgagattattatgaagtgctgggcgtcgaaaagggcgctgcagatgagcagatcaagcgggcttaccgtaagctggcggcaaaataccatccggatgtgaatcacgagccggatgcggaggcaaaatttaaggagatcaacgaggcctatgaggtcctgtccgacgcggaaaagcgcagccggtacgaccaattcggttttgccggggtcgacccgaattttaaccccaacgccgggttcggcggcgggtttggcggcggcttctccggcttcggcgatctgggcgatatcttcggcgatttcttcggcggcggcagccgcagcagccggagcgccaacgctgcccggcggggcgagaatatcgtcgcccaggtcagtattacatttgaagaagcggcctttggcacgaagaaggagatcaatgtctcccgggtcgagacctgtgataaatgcggcggcagcggcgcagccgccgggacagagccggagatctgctccaactgtcacggcaccggcaccgtccggacgacgcagaatttcatgggcatgacgatgcagtcccaggccccgtgcccgcgctgtaagggcaagggcaagatcatcgccaagccctgcgaccgctgcaagggcaagggcaagatccgccgaagccacaagatcctagtagatatccccgccgggattgatgacggccagtccgtccgggtccgggagcagggcaacgccggtgtcaatggcgggcccaacggcgatgtgctcgtcgccgtccgtatcacgccgcatccgctctttgagcgtgacggcgcaaacgtcctgtgccagatgcccatctccttcgcccag

SEQ ID NO: 1584 - DNA, 2730 bp, Unknown
  16S sequences of unknown bacteria
attattttattttcttattctgccgggtgttactccgcgctttttcttaaaaacattgcaaaaatagtgctcgtcggtaaaattcagcatatcagcaatttgctttaccgtaagtgaggaattttgaagtaatttttcagccgtagctattttttgctcaagaatatagttataaactgtagccccgtattcccgcttaaaaagtctgccgagttgtgaaactgaaaagccgaatttttcggctacaagctccgcgtttatttttctgtaaatattgccgtcaataaagcttttaacattttgggcagtgcccgtgtgttttttttcggaattttcggctaagcgctgtatcatacggtgaaaaataattgcggaatagctgtttatttcgttatcggcagggtgctttgcaagataatcaaacagctcgtcaaataaaccgcctatatcggttttcggaaaatgtacccgcttgtcaattccgtatatctccgtaagcctttcgcaaagctcgcctgatacgttcatccattttttcttccacggctcctttttatcggaataataacggtgctcaaaaccggcaggaagtatatacacgtcccccttttctatacggtagctttcacctccgcatataaccgttcccgcacccttttcaacatactctataacataaagctcagaacattcgcggtatattttatagtccgcgtcggggcaggttattccggcaagagtaagtctgaacggaagcttatcgctcatatccgacgacggtattaaaaagattttctccatatgcttaaaatcctcacttttgtgcgcaaaatccctatttaaaaacgtctttctcaatgatattatacaataaagaaaacttgatttcaagcaaaaggagcaaatattatgagcacaaatattatcccgcgccccgagcacccacagcctataatgaaaagagaaaactggcaaaatctcaacggcgaatggctgtttgaatttgatttcggtgtttccggtgaggaaagagggctttacaagcccgaaaaggcaagcgagtactccaaaaaaataaccgtaccgttttgccctgaaagcaagctttcaggaataaattataaggattttattccggcagtatggtacaagcgcacaataagcattacaaaggagcagcttgaaaaccgcgttttactgcatttcggcgcggtagattatgcctgcaccgtatatgtaaacggcaataaagccggctgtcacttcggcgggtacagctcgtttgtgcttgatattaccgatttattgaagatcggcgaaaatgatctgaccgtcaacgcaagggataatgtacgcagcggcaaccagcccaagggaaaacaggcgggactgttttattcaagcggctgcgattacacccgcacaaccggaatttggcaaacggtatggcttgaatttgtaccctcaggctacataaaaaccgcaaaatattaccccgatattgaaaacggctcgtttgatattgagcttaacgttacccgcggcggcaggcttaccgccgaagcattttttgacggcagagcggtaggcagcgctacaaaagagattaagggcagatatgcaagatttaccctaccccttgcagaaaagcatttgtgggatttaggttgcggaaatctttacgacctgaaattcacgcttgaaactgacggcggcaccgatattttgtcaagctatgcgggcttgcgcgaggtgcggattgacggctttaaggtgcttattaacggcaaaagcgtattccagcgcaccgttctcgaccaaggcttttaccccgacggaatttacaccgcgccaaacgatgaggctttaaagcgcgatattgagttgtcaatgcaattaggctttaacggcgcaagactgcacgaaaaaatgtttgagccgcgttttctttatcactgcgataaagccggctaccttgtttggggcgagcacgccaactgggggttggatattaacagagaaagctcacttttaaacttcctgcccgaatggagcgaaacagtcgagcgcgatttcaaccacccggcaataatcggctggtgcccgtttaacgaaacctgggatcagacaagtcaggcggcgcaccgaatattaagggctgtttatgacgaaacaaaacgccttgaccccacgcgacctgttatcgacgtttcgggagcataccacgaaataaccgatatttacgaccagcacgattatgaccaaaaccccgaaagcttcggtaaatcctataccggctataacggtgaggaggaaagctttaatttgttctttaaggataaacaggtatatattccgcagctgccgttctttttaagtgaattcggcggaattaaatggattcccgaaagcaaccgcggcagcgccgccgacaactcctggggctacggtgacgcacctacaaccgaggaggaatttttcacccgctatgaggggctgaccgccgctcttttaaatgctcccaatattatgggcttttgctatacacagctttacgatgtagagcaggaggtaaacggtctttacacatatgcgcgcgaaaagaaatttgccgattattcaagaattatcgccgcaaaccgtaaaaaagcagctattgaagaatagccgcacagtataatttatccgcccgtcggcagactgctctgtcagcgggcggatatatttata

SEQ ID NO: 1585 - DNA, 3017 bp, Unknown
  16S sequences of unknown bacteria
aacaattgcatggacagaatccataaaacagagattcggataaagaacacaccaccagttgtgcccctgtgcctttccgatcttgatccggagtgcatcgtaccagcctgcagggaaggtaatgtctccgtaagttttgtccggaaattcacaccgcacaacctctgccgtcactttgtcgctgcagccttctgcccgcaggacttcctccgaaacccggaccagttcctctttgtggcggatcgcccatgcctttgcctctgccgcattctctgcaccggacagagtctcccgcatataagccacaaccgcctcttttactttcatcttcagttcctggtcttcttcgctgtcactgttggcaatcacgtggaagcggaacacctcaccggacagcttttcctgcactgcattcgccttcgcttccacctgcattacccttgtaaatgccgcaccacacagaatcacgatcagtaccagcgccactgcttttatttttttcatttccgtatgtacctcctgtctttgataacaggagtattgacatcatacggaaaactatacatttttatctgtgatattctgcctgatctctccggataacatccgatactgtagatgcctgattgtcaatatgacgtcccatgagctcacatgcctcttcaacctctccgcccgaaatcagtgcgatcagcttatcatgttcttccaggagctgtggataacattccttctgcttcaggtattctacgcggaaccggtacatctgttcccgcaggttgttcagcagcgtgatcagtctctggttattggttgcagcaaaaataatatcatggaattttacatctgcttcagcgatcttcgtcacatcaccactctttaagactttacggaaatcttcagctgccatcttcatttcttcaacctgctccggcgtgatccgttcacacgcaagctgtacggaaagctcttccagtgcctttctgacttccagcacatcctgcatattcttctctgtgatctgtgctacttctgctccttttcgcggaatcatcaggaccagaccttccagctccagtttacggattgcttcacggatcggggtacggctcactccaagcttgttggcaagctggatctccatcagccgttctcccggcttcagttctcctcttaaaattgccttccggagtgtattgaatacaacatctctcaacggcaggtattcattcatatttacttcaaaatccatatccattcttatctcctcctgacgttatgcacatttgcaagataaatctgttttgccagattctgtgcttttactttggtaaacgcttccttcgctgtcctgcgatccctgaaaatcccaaatacagtcggtccgcttccgctcatcatcgccccaagagcacctgcttccatcatacattctttgatctgtgcaatgaccggatatgcttcaaccgtaaccttctccagcacattgcccatggatgctgccacctgctcaagatcctggttcttcaatccgtccaggataccatctatatccggatgctccttgatttcacaggaatccagcttttcataaaccatctttgtcgatacactgatcggtggcttggcgatcagaatctgacatttcggcatcggaggaagcggtgtcagcttttccccgattccttctgcaagtaccgttccgcgcataatgcagtaagggacatccgccccaagcttcacgcctctttccatcagctctttttgagaaagtcccagccggaacatctggttcattccgtaaagcactgccgccgcattggaacttccgcctgccattcctgcagcaaccggtatatgcttgtccagatggattctgatcccgtctttgatatcaaattcatcgatcagaagctttgccgctttccatgcaatattgtcctcatcgttcggcagataaaaaagatttgaatcgatctcgatacctggggccgacttcttttgcaacgtcacattatcgtacagatacagcgtctgcatgaccatgcgcacatcgtgataaccattctcccgccgccccagcacatcaagtccaagattgatcttcccaagtgcttttaactccagtttatccatgcgtgtatctccttattgtattttttcgacctttttttgtatcttgtatacatcatttcattattatagtatactcaaactctcccgaaaaatcaatattttatcacccgttttcagttcttttgataataattcattattaagcagaatgctttcttccgtggtcgaatatttctttgccagactccacagatcatctccgtcttttacgatatatcccacaattccaggctggttcatccgctcttctttttcataatccacaagtgcagcctctgtcaccatctgtattttttccgcctttcgcatgaaacttctgaacgccacgaccgctttgatctctacttcatcatttccggcaagatctaccgcaagctgctccactgcatatgtgatgtcatatttcatatcgctgcttccttcccggcattcaagcattgccgagaacggtaccattcccttccacacaccaaatggtacttcatcatttgcctttacatacaaaaagctgacatggagaatcccctctgccagaattccgccatcctgcacttccattttttccatctgcaggtctgcgctgctgtggcacacctgaaggatctcatctttcagctccggcagacttaatcgttctgcgatcttactttttgaatgattctgcatcagaagctcctcaacaacagcttcttctgtctgcaaaacacattttttatcaagggaatacgcatcctctaaaagctccagcttttcttccccatagacaaaaaggcgtacctgaagtgccgcttcaatgccaagcgcacgcatctctccgtcctcatccatccgcacctctacactgatatcatccagctgatcatagacatgatgatacatgc

SEQ ID NO: 1586 - DNA, 21445 bp, Unknown
  16S sequences of unknown bacteria
tccaaaaccataacggcttttttatgtgcaagtgttctggcaagagctattctctgctgctggccgccggatagcataactccgccactgcctatatgggtatctaccccatccggcattgacataacctcgtcataaatttcgcagcatttaagatagcggtttatatctttgtcatcgcccataagcacattattttttacactatcacttaaaagttccgggttgtgtcccaagtaggatgtaatctcgtttacattattcggcgacatctgcgaaagttcctctccgccaaacttaatagagccgagatatctgttttcctgtaaaaaagctttgcccaacaaactcttgccgccggcgaccgggccggtaatacctattatctgtccaggatgtgcgttgaaagaaatatttttaaatatttctgtgccgtcatctcccacaaaaccgagattttcaacttcaatatcctttgctgtaggtatattatcctgtacatcgtaattctttttattgagatacggctttattctcacccaggaaacctgtgccttatgtaccgcattaaaaagttttgcagcctttgaagatttttcagccaatttaagatagcaagccaagaatgccgtaaatgtggcaatattccaaaagttgtttgaaacattctgtgcgccgaaatacataatgaaaacaacgccgagagttgaaattattttgtacaaaggcggcattgcagaaacccatatattggctttcacggcttttttctcgtaatccgtcaaataatcttcataatttttgttttggttcttttcaatgcccaaaattctgtaactcatggcatttgtaaccctttcaagagtccgccgatttagtttgcccgcactctccttgctttcggcatttgtcttttgcacaacactcttcattctttccgctaacatataggaaataggcggaaagataaggcacagcaaagccagtttaacatcgtatcgcaacaataaagccacatagcctgccattgcaacgccggtatcgaaaatttcggtagtaaatttgcgtatgccttcggaacaggcatcaacatcgcctacggcttttgtcataatactgccggcactttcgttttcgtaatctctcttggacttagtcacaatatttgaatatacatttttacgcattgaaagatttactttgtttgcaaatttacgcacataaagtctttttatatatcttgcgccctgtacaaaagctattacgcctatgtatctcaaaacaagagcaaccatatctttaaagactttactgcctgtaaatatgtcggcaaggcattgagcaagcttgccctcgtaaatagggccggccaaaagacccacattgtatatgataccccggacggtgataaccagcagctctttggtgccgatcaaaaagtaatatccgattttatcggtactccttcccctgttatttaattgggtatttttcatattcatacctcccatgcttagttgacttgtcaactaaataatatcatttgttcctacgtgtgtcaataccaaaatcaaataaatttcactcttgcggaattcttttaaaaatcccataaaatcagctgattttaccggttataagtatattttaaatttatcaaaatcacttgatttgccctctgtaaacttgcacagtttataatttaaaagcacatataaaatcgttgttttgtacatttacaaagtgataaaaatatgttaatatcgtcaatcgaactcaataattttatttaaattttaagcagcgccggcggcaagattttgcgtcacaacggcgctgtgtcaaattttctataagaaaggaagttgtatatgacagaaaacaaaattacaaatggcaacatcacacagcggttgctttcgttcttttttcctataatgataggctcgttttttcagcagttatataacaccgttgacagtgtggttgtcggcaactatgtgagcagcgacgctttgcgggcggttggcggcacaagccatatcgtaaatctgcttgtaggtttttttgtcggccttgcctccggtgccaccgttgtaatctctcagtattacggcgcatccgacaaaaacggcataaaaaaagccactcatacatcaatggctctgcggatatggggcggccttataatgacaattataggcgtggccatttcccgtttttcccttattaaaataaatatccggccggaaattttggatatgtcggattcatatctcaaaatttacttcttaggtatgattccttcaatgatatacaatgtaggctccggtatattgcgtgcggtaggcgattcaaaaagaccgcaaaattatttgataattacttgtattataaatattatcttggacttagctttcgttgtaggtttgcaaatgggcgttgtcggcgttgcggttgcaacaattatttcccagattataagcgccgcccttattatgaaagcccttaccaaaacaagcgatatatacaaagtaaatgtaaaagaaataaaatttgataataacaacctttcaagaattgttaaaatcggtttgcctgccggcgggcagtctgttctttactcaatgtcaaatttggttatatcctcggccgtaaacagtttcggtgccaataccacccgggcatggtcggcatttagtaaagttgaagctattatatggatgatattaacagcctttggcacatctgttataacatttgtcggtcaaaactacggtgccggcaaaaaagatcgtgttcgcaaaagtgttaaaatcggtcttgtactcaccgcttcggttgtggcgttcttctctgctttgctgtatgtgttctgccctgtatttataaagctgtttacacaaaacacggaagttatagatataggtgtaagtgtacttagaatttgtgcgccgttctatgctctttactcatttacagaagttttgtccggcgctgtaaagggttccggtgaaggtcttatgcctatgattatcacggtatttaccgtttgcattatgagattggtttggatttgggcggttgttcctcacttctgtacaattcaaacagtaacattaagctaccctatcacatgggcgctgtcatcatttgtgcttattttgtactatatgaattacagcaaggtgaaatttcactgataaataaactttcggctgtgtcgcttttgcggcacagcttttttattgttaaaaatattaaattttaacgacaatacacccgatatttaaaacctgtaaatgtgtattctataaaaacaagcctcttccaaagggaggaggcttgtcttgatatattgattttaaccgaataaggcttaaatcttagccttgattgtctctgcaatgctgtctgcatcttcgtccattacaaaaataacatagccgtctttttcgtcaataacagctgattttgcaatctcgtactgatcttcaagatatctttcaaagtccttttcggtgcgagccttgtaatcggcaaagtactgtttaactgtttcggtctgaccctcggcaggcttaacaacggcaattgtatatgcctgtacattcataatggaaaacgaaacagcgccccgttcaaagtttgccttgtcccattcttgccgttccataaatgcgtcaaggtcctcgcttttgctgtcaaaagcaactgcaggattgtactcggtcatttcgctgccactgttgttaacaacctccgcaagctgttcgcttgtaagcgctgtctgtgagttgcccttagatgagcaagcggtgaaaacgccaaatgccaaaaccgccactgttataattgataatatctttttcataaaatattccttcctttttattatcgtagatagtatagcaacaaaatgtataaaaaatgcggtagaattgtgaaattccaccgcaaaattataactttttacaaatgattagccaacaagtctttttgtttctcttgcaatagccaattcttcgtttgtaggaataaccataactttaacatttgaatcagctgttgagataactgtgttttcaccgcgttttgcgttttcaacatcatcaatcttaacgccaaggtagccaaggtattcgcaaacagccttgcgagttgtagcgctgttttcgcctacgcctgctgtaaatgcaatagcgtcaacaccgttcatagctgctgtgtaagcgcctatgtactttgcaactctgtaatagaaagcctgcaaagcaacctgtgatctgtggtcgccgttgtctgctgcggtttcaacatcacggaagtcatttgaaacacctgacatacccaagatacctgacttcttgttaagaatgttaagacattcatttacatcaatatgttccttgttgcagattgtctgtacaactgctgcgtcaacatcacctgaacgagtacccatgataaggccttcaagcggtgtaagacccatggaagtatctacgcacttaccgccgatagatgcggaaacagatgcaccgttaccaaggtggcaaacaataacttttgccttttcagggtcaaggccgccgaacttaatagcctcgcctgatacgaacatatggcttgtgccgtggaagccgtatctgcggatgctgtacttatcatagtattcataaggaatagcgtagaggtatgccttttcgtccatagccataccgaaacctgtatcccaaacagctacattaggtgtacccggcattgcttcttcgcaagcttcgatacccataaggtttgcagggttgtgaagagggccaaggtcgaaacattcacgaataacctttttaacttcttcgtcaactacgattgactggctgtaaaccttaccgccgtggagaacacggtgacctacggctgcaatttcgcttgtatctttcaacacgccgtattcagggtcaacaagtgccttcataacatgcttgatagcgtctgtatgcttaggcatatcttcttctataacaagctttttatcgttagccttgtgtgtgagaacagaacctgtaaaaccgattctctcaacaagaccttttgccaaaacttcttcattgtccatatcaataacctgatatttcaatgagcttgaaccacagttaagaaccaaaatcttcattgtgtttatcctccaaataatctaattgttaaaattgcttttttattatataataatattgttgaattttcaaggaaaaaggagaattttatgtataaaagtgtcggtattattgcggaatacaacccttttcacaccggtcatctatatcaaacggaaattttaaggtcaaaagggtatgaaaacatagccgttgccatgagcggcagctgtacccaacgcggtgaatttgcactttttaccaaatttgaaagagcaaaagccgccattgccgccggcgtggatttggtctgtgagataccgtaccccttttcttccatgagcgccgaaggctttgcaaccgccggtataaccgctttaaagaatataggggtggaggcggtttcttttggcagtgaatgcggcgatgaaaagataataaaaaacatagcggaatacctcctatcccctttgtgtgaagaaaggcttaaatccaacctgtctgccggtatgccttacccacaggcaagggaaaaagcaattattgaagaatttgattacgataaaagcattttatccgcctcaaatgatattttggcaatagagtatgccaaggcctgtataaagctaaactggaacccgaaatttgaggtcattcggcgacagggggcaaattacaatgataaaacattaaatcaaaaatattcctccgcaagcggcatcagaacagccgtagcaaattacagatttgatgccgccgaaagatatatccccgaaaaaactcttgatattttccgcaaaaatattgacaggggcagttactttttaccggatgaccaaagttatgaaaaagccgtgatattccgtttgcgcaaaatgacaaaagccgattttgtctctttgccggactgcaacgaagaaattgccggcgcactggaaaatgccgttataaaaagttgctcactggcacaaatttatgaaaatctgccaaccaaacgctacacaagggcaaggtttaacagaattatacttgccgcacttttaaacgcaaaagatttgccgatttcactgccgtatttaagaattcttggcatgcgaaaaggcaaggaacacttgatgagccggataagcgaaaattccgcattgccggtttctcactcgattaaaatacttgccgaaaaaaacgatgagtgccgcaaaaccgctttgcttgaaaaccgagcaacagattgccaagccgcattttttaaaattatcggcgaggcaagaaaagactacaccgaaaaatttataaaaatataaaaacactccctgtctgcgactgtatatcattgcagacatggagttgaattttttagtttttcttatctttaaaaacaaatatcttacttaaaaagtagtttgcaacagttacaagcaccagcgaaatgcaatttgaaatcatatcgttaattcccatttttgtaaccaacacggccataacaaacatatcaagaaacagtgtaatcacccttgaagatgcaaacacggtaaattctttaagaatatttttctccttgcttttaaatacaaatattttgtttgtaacataggcaaacaaaacgccggttatccactttataaggtttgcaatttgcagctgaaccggattttccgggtttaaaaatgttcttgtgcttaaatagtaaaagaaaaaactgacaatggtggtaagcacgccgactatcaggtaattaactatttcttcatgctttttgtatatatcccaaatttttttcatcaaaatttcctcttaacccattgcccgtataacaaggtacaaaacttctatcaaaacagccataatgccgaacattcccggaaaagttttataatagctgggggctgtggagtactttttcttatgtcgtctgtctatgtacatcaaaaggataaaggccgtagggcttattgcgcaaagaactgtaaatatctgcgctataagtcttgcaagctcttgattttgctcacctgcaccatagaatataatcggtattgccataaacataattataacatttaatgcgccgtacaaaatcgggaaccaaaacccgaaatttgtaaacttcataggccgctgtacttcggcctgctttttattttttgactgatttttactcataactttttccttttaatattcttaaataaaatgataaacataataatacattatttcatgttttttgtaaagggattattacggcaaaaccgattatttacaggatttataaaatttatattttccgttaaaacacccattcgccgttttcaaaaattttaacggttgtaccgtctgcccttgttcctataatgtttgtgtctttatagcctatcatcaaatcttcgtgtacaactgaatcatttacgcctttttccaaaagctgccgggttgtcattttttctccgccttttacggtgcccgggtagccctgacccaaggcgatatggcaagctgcgttttcatcaaacaatgtgttgtaaaacagcaggttttctttgtttatggggcttgaagccggtacaagggcaacttcgcccaatcgacaagagccttcgtctgtgtttataagagccgcaagcaaatcctttccttttttggcgtcatagtccacaactttgcccttttcaaatttaagccagaaatcttctattaaatccccattgtaaacatagggttttgtaacatatacaataccgtttacattttctctgtggggcgctgtgaaaatttcttccgtgggcatattcggaataaactcaacacccttttcggaaagttcgcttaccccgccccaaactctttcatctgcaaggccaactcgcaaatccgtgccgttagagcttgtaaaatgcacctcttttaagtccaatccgtttataatatctcttctcactgcccgcttttcggcgtaatcacgccagttttccactgcgtcaccgtaaacacggctcaccttaaaaattgtttcccacaatttttcaacggctttatccacaggcaattccggaaatacctttttcgcccaccgccggcccggcacggcaacgatacaccactgtattcttgacgccattgtgtaatcacggtattcggccatggcgttcattcttgccactccggccttgtttattttgtcgctgtcaagtcctttgtagatttccgggtcggaacctatgattgaaagtatagcggcgcttcccggtgccttgatgtattcaaggtaagaattttgctgccagggttttacatcgcataaaacagacaaatccgtcatctccatttttatacggcttagctgttcgtcactgtagtgaacaacaacttcccttgcgcctgcctcataagccgttttggcgcaaagtcgcaccaaatccgccgcataaataggggcgttgattatgagagtttgccccttttggatattaacgccggccaaaaccgccattcttgcatattgcaaaagtaatttttcatccatataactgtacctctttttatttatatattacatattaccacaaactgcggattattgcaaaagtatgaacgctttaaataaaatattgtttttcaaaatatttttatcgtttttcgataaaaatatcttgacttttgataaataacgttttataatcaagccataacacaaaggagattaaccatggaaaaacataatgcaagcttaaaaatttcaataatctgcgtaaaagtattcactcttgcaatgattgttatcgccctatttgcccctaaaattttttctcggcttatagaagtaagaattgcctatttaggcggcaaactccactgctttttacggagcacatatattttgtgtgtgcctcgggcggttgtacttgccggtctttacaaattgcttacaaatatacaaatgggtgatgtttttacagacgaaaacacctgtattttaggcagaatttcaatttgctgctttgtggctgccgcaatctgccttgcaagccggttgtactacctgccgtttttgattttatttttcgctgccggatttgtaggccttattttgcaggttgttaaaaatgtttttcggcaagctgtggcaattaaagccgacaacgattttacaatataggtgactgccatgagtattatagtaaatattgatgttatgatggccaaaagaaagatgagcgccggcgaattaagcgaaaaaataggcattacccctacaaatctttcaatattaaaaaacaacaaggcaaaagccatcagattttccacattggaagccttgtgtaaagctttgaactgccagccggcggatattttggaatattcccctgaggactgattttaggaggtacttttattatgagcgaaattaccgtaaataaaatagaaaagaagaaaaacaccgctgaacttgataaatatgactgtggttttgccgttgtatgcattatgctgggcaaaatgtacacaaatctgatgttttatggtttggattacttttggagcattttacagtcaaggcaaattgcatttgcactatatacattcctgtatgttgccgccgtagccctttacggcaaggcaaaagccgccaaaccggccaaagaaacgatattttggctttttgcaatgtttttaatgtgtacatttattccgatgcaaaacgccgatataccttggttacttttgcaaacaatgcttgccatgtatttttcatacagtttcggcaacggattcttcaaaggtgaaacatcaaattattttgtaggggattgtttaaatatagtctatatgtttttctcacggtttttcggcatattcaaaataattttcctggtaattaaaaaagccataaaaattacagccggaaaaatcaaagaaaaaaacaattttatcactgttttggcagggcttttaataggtcttgtgtgccttgccggaatactgccccttttatctcaggcagacgaaaattttttgtcctcatttttgggattgagaaaaattttatcccatatttttgcaaggctttcttcaaatatatttaaccttatttttgatttattcaccgccctgccggtggcctgctgtattttctccttaaactacaacagctttaataaagacgatattcactgtttaaaaaaagaaaaattagataaatccgccgaaacggctaaggttatcccaaaccttaccattaaaaccgccatttgtatgataaacatcgtgtatgccatatttatggccgcccagtttaggtatctgttttccgcctttgcaggcaaactctacggcggtatgacgtatgcccaatatgcaagaagcggatttttccaactttgcgccgtatgcgccataaacggctgtgtaatcgctgccgcacactttacatgtaaggagagaaacggcagccggctgaaaaggcctgtgattgttatatgcctgttatcccttttgttactttgcaccgccggggcaaaaatggcaatgtacattgccgcatacggactgacaccaaaaagaattataagctcattgtttttgctgtggcttatggttgtatttgccggaataattgtaagcagataccgccaatttaatcttgtaaaaatttttctctttacccttgtggcaatgtttgaacttgtcctttgctttaatttacagaccataagcgacgatttcaacaaaaaagcaggctttaacgacgatcagggcaattctgtcgagatggcggcgtatgaagattatcacgaaaattggtaatttattcaataagcgattgacttttccctcggaagaatatacaatgtagctatattattgattaaggggtacaaaatgaaagcaagaataccaaaacacagagaatttattatttcctttgcggaagattacgaaaagcaggacgaatgttgggaaaagttgcaaaaaattcttgacgattacaaagcagagggtaaatccgtttatacaaagacctttattgaggacaatgaggacaaagtaaaagctttgcaaaaggaatatgaattcaattacaccattgaggaaaaataaaactatgcaggcataaagtatgcctgcattttttggaggaattatggaactttttgacagccacgctcactatgaggacgccatgttcaacggtgacagaaaagaaaggcttgaacatttaagagacaccgatgttaaatatatactgaactgttgcagtgatgtatcggtttttgacacggtaattgacattgtaaacaactttgattttgcttacggcagcataggcatacacccccattgggtttgcgaaacaccggatgattatcttgacaaaataagagaacttgccaaaaacccgaaaatcgtagccataggagaaatgggtcttgactacttttggcaagaaccgaaagatttgcaaaagaaaattttcacccggcagttggagcttgcaaaagagcttgatatgccggtaattatccatgaccgtgacgcccaccgggattgtcttgaaattttacgcaagtacaaaccccaaggcgttttgcacaggtttggcggcccggtagaaatgcttaaagaagccatggactggggcatgtatgtcagctttaacaacgaccttacctaccctgcctggaacaaaccccacatcgactgccttatggcaacaccttgggacaaactgcttatagaaacagactgtccttacgcaccgccttttgagagaaaggacgacagatgcgaatcttacgatgttgcaaatgttgtaaaagaaatagccaaactccgcaatgtaagcgaagaatttgtggcaaaaatttccctggaaaacgcaaaaaaaatttacagaatagacagataaaattaagcgcccaaaatttgggcgcttttagttttatatacgtttgctttttataagtcttatgtctttgccgaagaaatttaagaacacgcatgtacccagtattctggaagaaattttttcgccgtatctcttggacaattcgttctgggatgcaatgttagttgtataaatcgtcgggcgattttgtatcattcttgtgtttacaatgttgtacataattcccaaagaataagatgtcagagtttctgcccccagatcgtctaaaataaacaaatcgcagtccaaaatatccgacagaatgtcatcctccgtatatcgagcctggtcgattttgccgaaaagcacctgtgccgatgcatacataacggtgtatttcttttccattacctcttttgctatggagcatgccaaatgggttttacccaagccggaagaacctatcagcaaaagacttttgctgtttgggctgaaattagccgcatagtctttacaataattgtaagccgcctccatggattggtaaggtattatactcctttttcccacttgcaacggctctttcgggtaatagctcaaatcgaaactctcaaaatccgccttgggagccggagagagttttgtaaatttgttctgtttcagctttataatctcatcggttacacagctgcaaaccttgccgtttacaaaaccggtatctttgcacttattgcaataaaacttgcgttcaagggcggtttccgggtagccggcagctttcagcagggctttttctttctttctcaaagcctcaattttcttttttatttccgcctttttgccgtcgtccttttttataatggcccgggcgctgtccgcaccgagggttcgtatctcctcttctatatccttgatttccggcacagattcaaatattctgtccctttgttcggtaaagtcggccaagacttcaagtcgcttaaaatccacatcggaaaaaacctgtgaatatccctcagccataattactctcctttgtcataaacaggtaaaatgtccattccgttaagcataacatcatcctcttcgggtatgtcttttaccgccgggcgccgagaatattcctttacatcctccggctttgtgtatcccttttgtgaccaagattttaaaataccgttgcagtacctgatattgatgtttatgccgcatgcgtcctttgcccgctttatcatctcattggacatattcagcttttcgccccagccgtcaataatggttttctcgctggttgtaagcttatcttcgtcaagcccgaaaaatcttgccacttctctgtatctgatttcacggtcgtgcataattttaagatattcttccgccttgtccaaagttttgatgccttttttctcatataaatttgaaataatttttgcaatatatgacgggccttttgagcgtggcgcataaaacattgtcaaaaccaatatgacctctaccgggatacccttccgcagataaagatccatatatgtattcgtcaccttttcgttaagcgggccgccgaaaattccctgtaactgtgaaagcagaattccgacctccggataatcgtcggaaattttcaaaatctcccgccgggtcaaaagcctctttctcggcttgtcaaaagatgattctattggcaaaacaagacccttatcccgccaaaacagcaaagccgactgggcggccgcaaccgtaatttgcagcctgcctgttatgtccgccaaatttatctcgcctttttttagcacatacaatataactttgaggtcgttttccttggcggaatataaattgtcaaaaacagccataggaacctctggtcctatgactgcctgtttcaaaagttgaaactccatattatttacttacccttactttttctggcagcctgtttttcgtgcattttatcggcaatgtcgccacgcctgtaaaacagatacaagccaaagcacacaaacacgcctgcaataagacggaacatatactgtatgccgttaaacgccgacatatccaagttgaaaataccgtttccgcctgcacccataacaaatgcaaatatggcgtaaaccacaaagacgattgtcattctcaactccggtttcattttaattttactcataaacataataataaaagcgcaggttataaaagctgttatcggcgctgttataatgtaaagctgaatgttgttcatttaatatcctccgaaaatcttctactgaatattgtataatttttttgtcgttatgtcaatgtaaaacctcctttcctttgtgaatatttaatgttaattattgttcaatataactaaatgtgatttaatcaccgaaaaaagtcggttattggtgttaatatagaattgcaaaacatataagagaggtttgattattatgacttatacaagaagaaacaaaggcacatgttcaagacagacaacagttgttattgaagacggcattttgaaagatattgaaatcgtcggcggttgcgacggcaatatcaagggtgttatttccctttgcaaaggcatgaaggcaacagatgctattgaaagacttaaaggcatcacatgcggtttcaaatcaacatcttgcccggatcagcttgctttgtgcattgaagaagctcttgcacaggcttaattcactgttgaaaagaggcttttatgcctcttttttatttttaaacaattttgtatcattttgcagacaaaagaagcaaaataaactaatttttgtataaaatgtattgcattttgggtaatattgtgttaaaatattatcaataaaaaaatattttattccatgaggaggatattacaatgggatattttacaggtaaaaccgttattatcacaggcgcaggccgtgccgttctttcagacggcaaatgcggctctatcggttacggcatcgcaacggcttatgcaaaagagggtgccaatttggttatcacaggccgtaatgttaaaaaattgacagacgccaaagaagaacttgaaaaactttacggtattaaagttttggcagttcaggccgacatcaacgcaggcgcagacaacgaagccgttgttgcaaatgttgtaaaacagacaatggatgaatttggcagaattgatgttttgatcaataatgcacaggcatccgcatccggtgttacacttgccgagcacacaacagaacagttcaatcttgctttgttctcgggcttgtactcaacattctattacatgaaagcttgctatccatacctttgcgaaacaaagggcagcgttattaactttgcatccggcgcaggccttttcggcaactacggccagtgctcttacgcagcggcaaaagagggtattcgtggtcttacccgtgttgcggcaacagaatggggcaaagacggtgtaaatgtaaacatcgtttgtcctcttgcatggacatcacagcttgaacagttccagcaggcatatcctgacgcattcaaggcaaatgttaagatgcctcctatgggtcactatgcagacgccgaaacagaaatcggccgtgtttgcgtacagcttgcttcacctgactttaagtacatgacaggcgaaacaatcacattggaaggcggtctcggtcagcgtccataatgtgattgtcggtgaattttcaccggtacacaaatatttaaaataaaattccccggaattttgatatgcaccccaaaggctagatacctttggaggtgcattttttatgggcaaaacaagaagaaaacagtgaaaaatttaaaagcgttaatactctcattgataaattaaagaaatatatctgttactgcaacaattaacctatttacttaaaactaaaaggaatgagcccggtagaataccgaactcattcaaatgcaattcaatatttaattttttctaaaccttggggtcactttaaaaatcgagagattttattatacaaaaacatcaaggtcctgtccgttacaaacttcaccgtcgtaaacagagcgaatttcttccaaaattgcatattctctgtccttaatatgttttgtcatatttatactgttgtcaaaaatcatcgtgtgatatattctgtgatatgtaataagctgtttaggcttaatttcattgcacatcttgcctaaggcaacagatgaagtatgcactgatgaatggtatttctgccaatgctctgccctttgggccaaaccgccgtcataataagcttcatgaagaagaatatcgcatccctttgccttatctaccataagctgtgtgggacaggtatcaccggaaataactataaccttatccggtgtcgtaaatttaaaactgtaacattccagagttccgtgaagggctgtaaacgcctcaacggtcacaagctcgtccttgtacacatatccgttatatatttcggtaacatcggttttgtatccgttttcatttccctgttcatcaccgtgtaatctaaaatcaacatcaaccttatacgcatccgagatgcagtccaccatgtgcttcattccctttggcccgtaaattttaagcggttcgtttcttgtaagcacccatggcgtgaaaatcaaatccgcaaggccggtggtgtggtcggaatgcaaatgggtgcagaaagccactgtcaaatttcgaggatttaaccgttctatgcccattgaaaacgcctttgtgcattgccttacaactcccgcaccaaaatccacaagatatgccttatcgtccaccgttaccgccacagccggtccgcttgcccacggttcggcgttaggtgtgccggtgcccaataatatcaattttgttctgctcatattttccccatttaaacttcttataatattttacacatataataacacaagcggtaaaaatttacaaacttttttaaatacaaaaaccctgccttgcggcagggttaaaattattttgtaaaaccgattatctgatgttcggaatatgaattgctttaacaggacattcgtttgcacactgttcgcaggcaatacaaagttcctggtcaattcttgcaaggttgtttacaacggaaatagcgtttgtaggacaaacctttgtacacttcatacaaccgatacagcctgttgagcaaacctttctggtaagggcgcccttgtctgcattgtggcaaagtacaacaggatttacatcgtccggtatcatgtcgataacatgtttcgggcaggctcttgaacaagcaccgcaacctgtacacttgttgttatcaaccaaggcaacgccgtttacaatgtggattgcatcaaactgacaagcggcaacacagtcgccgaagccaacgcagccgtaagcacatgcagatgggccggcaaacatttttgcagcggcggcacaagatgtgataccctgatattcgtactttttagttgtgttaaagttaaagccctggcaggcaacaacggcttttttagcctctgtcttacctgctttaacgcccataaccttacttacggcttcggctgcatttgcaccgcccggaacacaacagttagttggggctctgccctcaacaactgcctttgcatagtcggcacaaccggcgaaaccacaggcgccgcagtttgcgcccggaagaacttcggtaacaagaccgattctttcatcctccggcacatagagaactttggcggcgataacaagcatcaatgcggcgataatacccattgcgcttataattataattgcagtaacaatactattcattatcctaacccctccttaaatagcaccaaagaggctttcgataagaccgccgaaaccgctgaatgaaagagcggcaagtgaggcggaaaccaaagtgattggcaaaccctcaaatgacttaggcggttttgcatattcaagagtgcttcttacgcctgtaaacagcaccattgcaatcaaataacctacgccggcgccaagtgaacctatcatgctttcaacaaagttgtaaccgttgtcgatgttaagcattgtaacacccaaaatagcacagtttgttgtgataaggggcagataaatgcccaaagcactgtgaagagctggcaagaattttttcaaaataagttctacaagctgtaccaaagcggcaataacaagaataaagctgattgtttcaagatattcaagcttgtttggaacaagaagtttgtagtagatagggtatgttacggctgttgccataagcataacgaaaataacggcaactgacatacctaccgatgaatccaattttttggaaacgcccaagaacggacagatacccaaaaacttaaccaaaatgtagttgtcaacaagaaccatgctaaagaatatagctgcaagtctcatcattatgcgttacctccttcaaccttttcctcaggcgcacaagcgtaagagcaaccgaggcaaccgcccgggcaagcctgaccgtctgcaagttttgacggcttggcaatgtcgagtttaactgccgcagccataagaacaccgaatacgaagaagccgcccggtgaacgagccaaaatgcccaaaggtgcaaagttcaaaatctgaattccgaaaagtgagcctgcgcccaagaattcacgaattgaacccatgattgtaagtgtgagtgtaaagccgagacccataccgagaccgtcaagtgcggagtcgataacattattttttgaagcgaaagcttctgcacggccgagaataatacagttaacaactataagcggcaggtaaacacccaaagcggcgtcaagttcctgggcgtaagctttaacaaacatttgaacaatgctaacaaagcctgcaataactgtaatgtaagcaggaattcttaccttgtcaggaataatttttctgagtgcagaaatggcagcatttgaacaaataagaacaaatgttgcggcaagacccataccgataccgtttacggcaagtgttgtaacggcaagtgtagggcaagtaccaagtaccaatcttaaaaccgggttttcttttataaggcctttggtaaccaagtgcaatttattgtttttttccatagtttccaacttcctttccgattatttgcttgcgattgctgcggcaagtgcccgcttaaatccgtctgatgtaaatgttgcacctgcaacaccgtcaatatctgcagaattagcccgttttgcctcttcaatcaatttagggagaacctcgcctgccggtgatgtgtcttccatatcgcctttttctacaacaatttcgttaattgtgccgtcatcattaaatgacacaacaactgccaatgtatcaccgccgaaaccggttgcttcgccccttacgccgcctgcaagctcaacttttgcagagccgtctgcataagcggaaagaattgtcttaacggcattcttaatgccgtctgatgtgattgttgcccctgcaagaccgtcaacatctgcggagttgttccgaacaatccgttctgtaacaggtgtgattgcatcaccggcaggtgatgtgttttcgttgctgtcgccattaacattaacagcggtaattttgccgtcctcgatagttacggtaacggtcatatctccgccaaagccctctgaaaccgttgagtaatcattgcctgtaacggtaacagccggagcatcatcctcaacaacgcccaaggcgtactggttaaatgcttttcttgcggcgttgagagccttaattgtggcctttgaggaaattgtagcgcctgaaatcatatcaatattatcaggtgtaagttcatcattgtggcctttaaactgagcctggaaccaatcctcttccacctttgcgccaagacctgctgtttcactctgtgaaagaacctttgcgcctacgattgtgccctcggcatcaaatgcagtcatccattcaatatctccgccgtaaccctttgcggcagatgtaacaacataacctacattgttgtcagagctgtaaaccttgtttacattttccatttccacgccttctacctctgtgaagcttgtggcgtccggaagaagctccaaaagagctgcctgttctgctttaagagcattttcggcaataataggagcagtgatgttgtttgtaacagccaaaagacctgaaacaacaagacatattgtaaagagaaccacaacaggtttaatcatattatcccatgttgagtttttctgtttgttagccattattttgcctccttaacttttttaggagcgcccaacggatgctgtcttgaagcacggtttacataaggcaacaaaaggttcataagcaaaattgcgtaggaaacgccctctgtcatagagccgaactttctgattataaccgtgataagaccaagacatacgccataaatgagcttgccctttgttgtgtaaggtgtggttgtgtagtctgttgccataaatacggcacccaaaagcaaaccgccgcccaaaacatatacaaccgggtttactcccaaaattgccgcaaatacggcaactgttgcaacatatgttaccggaacaaccgggctgataacctttgtggcaacaaggaacacaaagccgataaggattgcaagtgcgcttgtttcacccaaaacgccgcctgttgtaccgataaacatatcggcaatgttaggcactgtgcctgcggcatactgtgcaagaggtgttgcggatgcaactgcgtcgcctgagaatgtcttagggaacacgaagtttgtcatttccgttgcataagaaatgctcaaaacaattctgccaaccaatgcagggtttgcaaagttgaagcctataccgccgaagagctgttttacaacaacaatagaaacaagtgcgcctacaacaatcatccaaagaggcattgttgaaggaacgttgaatgcaagaagaacacctgttacaacagccgacaaatcggatacggtaatcggtttcttcataagtttttcatatccccgttcaaatgcaacacaagcaataaccgatgttgcaattctgagcaaagagccgataccgaaaaacaatacggaagcgatcataaccggaactgtggcaatgattactttaagcataattgactgtgttgtctctttgcttgtgatatgtggtgatgatgatacgataagtttcattcttatttagccgcctttctcaaaaagtcttttgcctctttcatagtctgggctaccgggcgttttgccgggcaaacataagagcagctgccgcattccatacaaaggtcggcatacaattctttgattgcgtctgcgtctttaattgaaagagccaaggcgatttcaacaggtgcaagacccatcgggcaagcggcaacacatctgccgcagcgaatacatgggttagccgcagg

SEQ ID NO: 1587 - DNA, 5874 bp, Unknown
  16S sequences of unknown bacteria
gcacaaaccggcgcatgaagcgcggcattgttcaaaatcaggcgcaggggcttcttctccgccgcaccgcgctgcacccggcactcgatgcgccacggcccgagcaccgcttcgcccaccggcgaaagcgccgcacactgccaaggccggctgccgcccgctgtgagcacaaagaaatcacagtcgttcttcgccacaacgccccggggcagtgagatctgcgccgtcggcccgctccggcgcaccaagtccaacacagcccggatatgccgggcgccaatgtccttttttgaaatttgcagcagatccagcatcgatcgcaccacgcggccctgcagcgccgcaggcagctccagcagcgccttgcgctccagcgccgcactttcgccgcgccgttccacctggcggcacacccgctccgccgctgtatgaagatacgcgtcctcctggcgcagaacgcctgcagtctgcaccagtgcttcctccacccggggattgagctgccgcagcagcggcagcacctcgtggcggatccggttccgcgtgtgggccgggtcggtattggttcgatcctctacatgaggaatcccacgcccggccaaatagtcttcaatctcctgacgcggtgtatccagcagaggccggacgaagatcccccgcaccggggcaatgccggacaggccggtcagccccgtaccccggatcaaattcagcagcaccgtttcggcattgtcgccgcggttgtgggccgtagccacccgcagcgcgccgatttgttccgccgtttcgctcaaaaaggcatagcgcaggttccgccccgcctcttcaatggaccagccgtgctctttcgccgccgaagctacatcgccgcggccggcgtaaaacggcacgctgtgcccagcgcaccaattgcgcacaaacgcctcgtcagcatcgccctgtgcgccgcgcaggccatggttgtaatgggccgccgccacggcacagccgtacttcggccccagctccaaaagccaggcgagcagacacatggagtccgctccgccggatacggcacacagcaccgtgccccccgatggcagcatatcataggtttggatgagatcctgcttcattgccctcacccctcaccgaaacgcttttccaatgtatcgaaggtcgtaaattccggcatccatttcagctccaccttcccggtttcgccgtggcggtttttcgctacgatcagttcggcaatgttgcgcttatcagaatccggactgtaatagtcctcgcggaaaataaacaaaacaatatctgcgtcctgctcaatggcaccggattctcgcaggtccgaaagcatgggtcgcttatcgtcgcgcttttcgttggcacgggacagctgggacaggcacagcaccggcacctgcagctcttttgccatgatcttcagcatacgggaaatgtccgacaccgcctgctggcggctctcgccggaatgcttcatgctgccgccggcggagctcatcagctgcagatagtcgataaccaccaggcccaaattgtccagccgccggcatttcgcgttcatatcggacaccgtaagcagcggattgtcgtccagccggatgtcggcccgggaaagcaccccggccgcctcagccaccttcatccaatccgattcccgcagctcgccggtgagcaggcggttactctccaccagggcttcgctggacaaaaggcgcagcgccagctgttccttggacatttccagggagaacatggccacggttttgcccgagtttttgcccacgttcagcgcaatattcagcgccagagacgtttttcccataccgggacgggccgccagcagaatcagatcggatttgttcaggcccgagagcttggcgtcgatggcggaaaagcccgaagaaatgccaggcagccgaccgccctccgccgaaagctgttcaatgttttccagcacaccggaaagcaccgtgccgatggacgccatatcctgagaggaccggccctgccgcacagcgtagatcttctgttccgccacctccagcacgtcttccggatctccgctgccctcgcgcaccatggaagtgatctcccccgctgcggtggccacgctgcgcagcagcgatttgccccgcaccagcgccacatactccatcacattggccgacgtgggcgtaatgtccatgagctggatgatataattctgcgtggtgttttcgtcgaaggtgccgttcttctgcatctcccccaccaccgttaccgggtcgatgggccgggaatagctgaacatggtatacatggtttcaaagatatcccggttttgctgcaggtagaaatcaccgggctgcagcttatccatcacatccttgatacagttctggtcgatcagcatggagccaagcaccgcctgctccgcctccaaattgtgcggcagctgccgcgctaaaaattcatcttccagcgccaagtccaaccgcctccctccacttcaaattgccacggctcatggattttcgtgtgatatcccctggttcatatggatgatttcgtatccattttccaattttcccccggctgcgtcataggcgcacagggaacggcccacgccttcttccacatggataaacgccctgcgcggcgtcgcgggacggtaaatctccgcgccatcgcccatccggtacagcgcccaagccgccgccaggcaaacatgccgcgcccgaagcggcttttcccaacgcttctatgcaccagcaccctcagcgcatccctctcccggaggaatccgaaagtctctctgtcccttctttaatgtttctcctcggccaccatcacatggatcgtgcctgtaatctcaaagcccagtttgcatttgatttgatagccaccgcaggctttgatggcctcttcctgaacgattttctgcttggcaatgtcgatggcatgctgggctttcagcgcgtcggaaatctccttgctggtgatggcgccgaacaggcggccgtcttttccggttttggcatagattttcaccgtcaggcccttgagccgctcggcgatttcttccgccgcagccctttgccgggcctcctccgcgcgccgggctttctcctgcagcttcatggtgttcaaattgtcggacgtggcctccacagccagcttccggggcagcaggaaattgcgcccgtaaccgtcggaaacttccaccagctggccttttttgccctggcccttcacatcttgctgtaaaatgactttcatggttctgacctcgtttcttttctcacataaattgccttcatagaatatgacatatggtacacaacagaatatcttacttgcggaaatactcgtcaatggccgccagcagctgttcgcgcacatcggccaccttggcatgcttcaccagaccgccggccgccgccgcattgccgccgccgccaagcttttccagtatcacctgcacgttaatctcacccacggagcgggcggacagattcacatcctctccaatcggcgtgagtacaaaagacgcgctgacgcctgcaatctgcagcaactcgtccgccgcctgcgcggcgatcacacggcccaccggaagatccaccgccgccagggcgatattgccgtgcactgtttccgcccggcggatcacgttatagcggttgatggtggaatccaggtcgttctggaacaggcggcgcacctcgccggtgtctgcgccggcgcggcgcagataggccgccgcatcaaaggtgcgcccgccggtgcgcatggtgaagtttttggtatccagcacgatgccggccagcagcgcttcggcctccacctccagcacgtcgctgggatcggtcagatactgcagcagttcgctgaccagctcactggccgaggaggcatacggctcatggaaattgagggccgcgttttcgatatatgtcgccgcccggcggtggtggtcgatcacagcgacacgcccggcgcgctccaaaatattgggcgcttccaccatatcggggcggtttgtatccaccaccaccaccagtgcgccggcgcgcatttgcagcagtgcatctgtgggatcggtcaggaacgcatcctgatactccggcgtttccagcagacgggagatcatcggctccgccgcgctgttttcaatgtccatgacgatactggctttcttgcctttcttgcgggcaatgcagcaaatgcccaccgcagcgcccagggcgtccatatcggcaaaccggtgacccatgacatacacctgtccggcgtcgctcatcagctcgcccagcgccgtggccatcacgcgggatttgaccttggtgcgtttctccgtctctttggcacggccgccgaaaaattcgaaattcatatcggtgcgcaccaccgcctggtcgccgccgcgggacagagccatgtcgatggaaagcgtagcgttgtggaacagctcctccagcgtagcgtccccgcggcccacaccgatgctcagcgtggccggcacgccctcggtgctgaccacctcgtgcacggaattgagcagggaaaactgttctgccgccaacttttcatagtactgttcttcaaacacaaacagatagcggtcgcgctcgtatttgcgcagcaggccgtggcatgaggctgtccagtcattaatctttcggtcaatccgggcacgcatggcgctgcgggccacatcggtggtgcccttggtcagctcttcatagttatccatcataataatggctacgttcaggcgggacgccctgtatttacgggcaatttcttcgctgtcagtcacatcgatccaatacatggtggccagcagtccctgctcgcggccgtcgccgccggcctgctgggtcaggttaccatacacccggtacagccggccccgcatttccatcagttccggcgcctcgtggcgacattccagcagccaccgggcgctgaaccggggcaccacgtcgccgatacggctgtcaaagagctgctcggagcgcccggagatctcctggaatccctcgttgcaccacacaatgccccccgtttccgggtggaaaatcaccatgggcagcggtgcattgagcatggtgtccttggtggccgaatccacattggacgtcacactttcaatatatttgagaatgttggctttccggctgacggcgttgcgatgagcatacaccgccagaaccgcgataatcacgccttcaatgacaccgatcaccaaatcgaaggacgctgccaccaccgcaaagcagatcagcacaaaaaagaaaaattgcgaccccggccccatcaggcgggatatttttttattcacagatcctacctccgtaaacgccgcgcagtaaacgcggaaaggccgcctctatccaaagcggcgatgtcagtatagattctttattatagcatgctttgccgaaagcaacaactgttaaacgagaaatttctcccgccaaacgggcaaaatatggcggtctgaccagtacgctttccgcttctgctgcattgcagcggcacattttggcgtcttttgtcggtcgatttttcgaagaattttgaaaattgctgtacttttttccctgcttatggtatactgaatatagcaagtgccccgccgcgcatcgttttggggccgcgccggaggcggtttttctccgcccggcggttttctttcgtattttttgacggatgcagctttcgctccgtgatcaaataaaacaagttcatcctggtgaaaaaagtgcgcacggcagtaccgggcggcggatcagggccgttccggacgcgtgcatttctttcttttttcggttttggcaccgttttctggcgtttcggacagattttccgagcggcggg

SEQ ID NO: 1588 - DNA, 14641 bp, Unknown
  16S sequences of unknown bacteria
tgctgtgcctgaatttgatcatgggatttgtgattcataaagcaactgatttagactggattacttcttttatgtgcgcagttcctgggggaatgagcgacactcctattattgcagcggatatgggcggaaatggcggtaaggtggcagtgatgcagttttcgcgccttttggcgggaatcgggctgttccccagtttaattttgactgtcactaaaaatgaaaaaatttctcagcaggagatgcaggtgaggaagatgtctgacggcagcaaaaagacgtcagcatttgtgcttaccgcagtggtggcagctgtttgtggcatcattggaaaatggtctggcgtaccggtaggggcgttgctgtttgcgcttatcggagtaattgcgctgaagcttttatttgataaggcttatctgcccatttggatgaaacgggcggcgcaggtgctttccggctgctatatcggcagttcagttactttgcaggatgtgttggaattaaaggaattgattccagcggtaatcctgcttttattgggctatacggccgcttgtctggtcattgggagcatcatatccggactctgtgggatgagccggcgagaatctatgttggcagcaacgccggcaggtgccagcgatatggccctgatttcagcagatttaggggtccaaagcccggatctgattgttttgcaggtggtacgaatgctcgttgtcatttcggttttcccgcagatcatccatcttttggttcgtttgctatcataaaggcttgactgtcccccaagggggcggtatatcctggaactgggagggataataatgactatcaaagaaatttgcgaggccagtggtttaacaaaaaaggcagttgcttattatgaagaaaaaggattgatttgtccggatgtccgggaaaatggataccgagaataccgcaaagaagatgtgcaaacgctgcgggaagttgcctgtttgcgattttatgggctgacggtagctcagatcagacaggttttggaaagtggagacaaagctggcacgatcacagcgcttcttgtggaaaaagaagaacagctgcactggcagaaaaactgtttccgagccctttgcgatttggctaagaattatgatttggataaggctgaacgggagaaaaaagcgttggaggcaaagcaaaacatccgggaaaaactgcgcctggcttttcccggcagttatggagattatttgagcctgcattttggaaaatacctgggagaaccgctggataccccggaaaaagaagaagcatatcgaaaaatggtttcctttttagatggattgcagctgaaggaaatttctccggaactggaacaatatttgacgcaaaccatggagtcgctgccgcctcagatgtggaaaaaagtagacgctacggggcaagaagcagtggtagatccaagcggttatctggaacgccatggggagcagattcgggaatacatgcagttgatgcaaacaaaggaatttcaaacttctcctgcggcacaaatgaaagcacttctgggggattttttgaacagcagtggttattacagtatttttttaccgaatttacggattctcagtaaaagataccgaacttacattggccagttggaacaggcaaatgctgtctttcttcggtggatggaggagcagaaactttcatcagacggtcaaaacagaaaaaaggaggagaaagaatgcaggaagaaagaagtcaatttgttcagaaaaccgtaaagaccggtatttcttttggctcggctcttgctatggtgattagctataccacgtggcattctattggctgggcaatttcccatgggcttcttagttggctgtatggcatatatttttggattgttcatacctgatggcagcacaaaaggccatttcaaacgaagtggccttttgtttatatgagaatcatttttccagttcacttttgaattgagcaaaattcctcccacgctttgagtgtgggtaattggaaagtgtctatttcgactgtccaaaagcaaggtctttgattacttccccagccagtactaaaccggcggcggaagggacgaaagaaacgcttccgggaattgtgcggcgagatgagccggcaggaagtgcttcatcggctgcggcgggggaaagcgctggttcttgagaatagactactttacagtgctcaatagctcgcttttttaactctcggcgaatgacccttgccaatgggcagacggaagtgcgggagatatccgatacctcaaatcgggtggggtctagtttattgcctgctcccatgcagctgatgaccgggattttttgctctatggcaagctgtatgatactcagcttggcagcaacggtatctacggcatccacgatataagaacaggctgacaggtcgtattccgacgcattttccggcagaaaaaatactggatactgaacgacacggcattctggattaatatcggcaatgcgttgggcagccgcctccgtctttaacataccgatggtgctttgcagcgcaatcaactgccggttgatgttagaagctgcaacccggtcgttatcaaataaaatcagtgtgccgacccccgcgcgggcaagtgcctctacgcagtaggatccgacccctccaacgccaaacactgccactgttgcctgggaaagacggtttacaccatcctctcccaataacagggccgtgcggctaaattcttctttcataggaaagcctcctcattgattaacgtatatcatagcataccggcatgtaatttttcaatctgtcaccgaatatttcaaaaggataagaaaaatctacggcggccctcttttatataaaactgtatttttgcaaaagaaaagccgtctgtcaaacagacggcttttcagcatatccattgggttatttttgaccgttctgcatcaatttttcagcgcattgccgcagctcttcttccgaatgcagggtgatggctgtctgctggatggtttcctgcacccatgtgggcagggactgaaaataagcattggatttcatattctcagaaaaattggttaccatgagaaaactccctttcagcttagattttatggtagtttgtgccggctgtcctatttttattcctgccaatgagaaacggggtactattttatcagagaaaagcatatcatttagcagaacaaataagggggagagtgcaaaaaatggaatataagctgaaaaaagaccgcattgccgtttgtgaaatcgcatttgattcctttaccgaactgccgattgaaagtgatttgcttctgccggattactgtcccgatatcgtgaaggtgctaaaatgccaagcgcgtcctgccttttccaaaacagaagtcagtggggacaaatgtattttggaaggcgctaccgcgattaccgtttattatactggcgaggatgagcagctgcggaccagtgagcataaagtggattttctcaagacgcttgaattaaaaacgacaccgcaaaatccaattgtattctgttctctgaaagaagattatttgaactgcaaagcgattaatcagcgccggatagacgtgagaggtgcttttaccgtcacggtaaaaattttgtccagcacagcagaagagatgattggcgcagcggaaggagcaggactgcaactgagtcaccgaccgacgcattccagcgaattggtgggaaccgcttccaaaaagtttactgttcgggaagatctggagttgggagaggaaaaaccgccgatggattatataatccggcacagtgaaaaaattcggactaccgactggaaagtgacaggaggaaaaataattgtcaaaggggaactggaggtctttttggagtatcagcctcaggaagaagacgcgaggcaatcggttcgctatcagcttccagtcagccaaatgttggacgtggacggtgctggagaagaatgtctttgtcatgtccagtttgacctgctttggtccgctttacatcctcagacagatgcggatggcttgacacggacagcctcgggagaatttacattgggactgcggtgtattttattacgggaaaatacgattctccccgtgacagacgcatattctacgcagtacgaactgcaaatgtcccagaaatcctctgctttgcttttagctttgggagcaatgcctcaaacttgcgatttagagcaggcagcacagttgccggagtatttgaaagaaccggtggatttttggtgtgaaacaggagcattatctgcttcagtacaggagcagacgctgttggtcagcgggaagttgcggtactgtatgttgggaaccgatgctgacggagcgcctgtctattttgagcaggcacaggatgtggcgcaggaatatcaactggaaaccaaagcagacagttatttgaccgaattgtttatcacagtgcaggactgccagtatgagatccaggagaaaaacaaactgcagtatcactgcaagttgcaggtagacggtatggttttaggggttatacctgtttcattcattaccggaatcaaagtggatgaaacaagagagaaaaagcgggaaaatcaaagcgcaatgactatttattatgccgacgcaggagaaaatatctggagtattgccaaacgatataatacctctctgtcagctgtaatggaagaaaacggattggaggaggaaatactgccggagaaacagatcgttctgatccctatgatcggttaatgagtgatatttctcttttttaatcactttctaagaaagccatatatcaaaacagaggcctgattggaaatcaggcctctgttttgatatgtttttttttgaagaatccagtccgtaaggaatccgaaaaaaattcctaatgcaaaaataattgtccagataatccagccactgtgggtttgtccaccgccgggatcggtttgggttttgcccagccaaaggccaagaaaacatccggccggatagcaaacaatagttgttgacgaagcaatccggaagtcgtacaacgcagcggcaaccagtgccgcaaatcctgctgcggctaaaacggccggccattgtttcatgccgtgcagagaaaacaaaccaaaccggcacaacagataggcaccggccagacagacggctgaaagaaaaaatcgggagagacaggacagttttttctttggcatgcaatacccctttggaacaaaaaaacaaaacgttcatttaaagtttttctcaccggataatcgcgacgatctagttttcaccaagaaagccatagtttaaaaagtgccttgtaataaggaagtaagatagtggccaacgcaaagtttgtccctgccgctaataaaatttattttagaaggctgcgaggaaaaggaaatctcaatacaattttatattaccataaggagcaaatcagtgcaagaagagacaacgcaaggaaaaccttttatgagagagcagcgggatgattgctattttgttattcttatcgtataataatcgtacatgcgaaagtttttaaatatggactttgaaataaggacctctttggagcagttttattttaaaagagcatccacttctataaaacagggatgccaggaggacgtttatgattcgagaaaatgaggcgctgctggatcgtttgaatattgtaacagatttggcggttttatttctttctattgttttaagctatacggtacgttttcatatttttgattcgacagaaaaccacttgcttttgtcttattatttgttgtttgtgttggcccttctgccaatttattatctgattttcagtacttttgatctgatttgtgtttttcgaacccgtactttcagtgaagaggtcgttaaattaattcaggccaatacagtgatggcaggtactgttacagcgatactgtttgtcatgaaatggcattatttatcccgttgggtaatggtgcagtatttttttatcagcactctgcttttggtaggcaaacattttttgatgcggtggttgatgagctatttgcgggaaaaaggctaccataaaaaaacgctgattattctgggatccggcgattctgccagagaatatctggagacgatccgttctcataaggactacgtttatgattatttaggctatgtatccaattatgccaaactggatggtgattacctgggggattacggctctctatatgaagtgctgaatgagcgtaaaccggaggaactgatttgtgcgttggatatttgtgaagctggttgtctggagcagatcatgtctgactgcgaaaaaaccggaacaaaagtttcgattatcccgttttgttatcggtatattcccagcaggccttatattgaccaaatcgaccgcattcctctgatcaatatccgcaagataccgctagacaattatgccaatgcttttttaaaacgcaccatggattttttgggcgctttgtttttgctgatcctctgttctccgattttgttggcagcagctatcggcgtgaagctgacatcgcccggcccggtgattttcaaacaagagcgagtaggactgaataaagaactgtttacgatgtataaattccgttccatggtggtaaacgatcaatccaatactgcgtggagtacaaacgaggatccccgaaaaacaaaatttggcgcatttatccgtaaattttccattgatgagctgccgcagctttacaatgtgttgaaaggggacatgagtttagtgggtccacggccggaactgccgtattttgtagagaactttcaaaaaagcgttccgctttacatggtaaagcatcaggtgaagcccggcatcactggattggctcaggtcaaaggttaccggggagatacttctatcccgaaacggattgaatgggatgtgtattatattgagaactggagtttgtttttagatatcaaaatcctgtttatgacggtattcaaaggactgcgaaatgaggaagttttgcctgtcagcgaagaaaagaaaaaggagaagtagctttggaaaagcgttttgtctgggcaatcagaaagaaaaattggctgtttcttccggttgcgtttttgttagcggttatgccggttgttattcgtgctacccagcactttttgagtggtgatctataccgcttatttttgactggacaaaaaacagagcttttttctcaataccgcgcccgctttttatggattatggcggcggttatgctgattttggtactggtattttggaaaaagcttttttctggaattgaccggctgggctggttttattttgcagcttgctccatttttttgctgtgtctggttttttccacacttttgtccgatcatcaggatacagcgttgtggggaatgtacgacagggcagaaggaatgatcacacagatttgttatttgattttatttttttatacggcccgttcttatcggtcggtgcaggatttgaaactgttgatggtggcaatcggaattttaattgcagtgaatactgttatgggtatttctcagtttgcaggcaatgatttgatgaccagcgattggatgaaccgtttagtggtgcctgatgatatcgacggaagaatcagcacgcttcagtttgaaaaagccaagatgtacggtacggccaaccactataattatttgggaagtatcgcggctatgaccttgccgttatgtacggttctcgcactgtttgaaaaacgctggaagtttcggattccttctatcctggcagctcttttttctttgattctgctgttaggctctacctcgcgagctggcctcattggggtggctgccgctgtggtgttggccgtaatcttttttcgccgcttccttatgtggcattggaaattggtgctctctgccgccggcggattgctgattgtaacggtcggactgaattttcttctgcataacgctatttttgagcggattcctatgctttttgaagatatccggattattttttcggatacatctgactttgactataaagacaatattccggtcagggctgtggaaaatacgtccacaggcgctgttattaccgtacagggagatgcgttgtctctctcggtggaaaacggcgaggtcgtttttcggaatcatgcaggaacggaagtgccttttacagaaaatgacgacggagttctggtgacacaggatgacacctttgccgatctttctttccggccggttcagtcggcaaaaggaaatacttcttatacatatctgcgccttctttataacggaaagcagctgctccagttttattatgacgagacacaagtctatcttgcaaatacaaattccactgatccaatgacattaaaggagcctccaattgcagcttgtttaaagggaaaagaactgataggatctatgcgcggctatatctggtccagaaccattccgattcttccgcactacttggtgctgggcgccgggccggattgctttttgtacgaatttccgcaggatgatgtattgggtaagttgtatgcttacggtacaggcagtatcgttgtcgataagccgcataatttgtatttgcagatttttgtcaatgaaggaggaattgctctcctggcatttttgtcggtctgcattatttatctgtgggactgttttcgcttgtatggaggaaaaaggcaggatccaaacggcctgcggggcattgcagtggggctgggtgttgccggctatctgtttgccggattttttaatgattccaccgttatgacttcaactatattttggattttgttaggcgttggtgttggtatgaaccggcaatatcgaaaagaaagcgtgggactgtaatggcaaaaaaaatcctgtatgtggcttcaacattcggacatttaaaaacgtttcacattccttatttaaacgagcttttggctcagggcaacgaggtgcatgttatgggcgcgggtgatcctgtcggcctgccggacggtgtaacagcgatcccgatgccatttgaaaaaaagatgacttctctgggcaattttaaatgcgcgtaccggattcgaaagctgattcgtaaggaagaatatgatttagtcagcgtccatacttcgctggcagcgttttttacacgattggggattttgtttagcggacggaaaccttgggttatcaataccgtacacgggtatttatttgatgaaaacaccccctggaaaaagcgtattgttttgctggcggcagaaaagctgacccgaccggtaacgaatgtggtagcggtgatgaaccgacaggatgaacagattgcacagaaatatcgtttgtatcaagatcagctgattttgatagacggtatggggattgacgttgcccgatttgaaaaaaatgataaaaccatcgccgcggtacaagcgctgcagcgggagtattttctttccccgcaggagtttgttatggtatgcgcggcggaattttctgaccggaaaaatcagatgtttttggttcgggcgatgcagcggctgaaacaggaaggtctcccgtgccgtttgattttggtaggagatggggaacgatttgagcggacaaaatctttagctgttcagctttcggtgcgcaaggaaatccgttttccggggtatacacgggaattggcgccctatttctatctggcggatgcaagtgtatctgccagcaggattgaaggattgccgtttcagatcatggaagccatggcctgcgggctccctgttatcgcaagccgggtaaagggacacgaagatttggtagagccagatgtcaacggtttgctgtttgattttgatgatgaaggaatgttttgtcaagctgtccggcgtttgtacgaagataaaaaattaagagaacaaatgggacaggcagggaagaaaaaggtgcaacgatatcggctggaaaccgttctgccggaaaacatgaaaaaattatatattcaaccgactcagaaacagaaatcataaataacgcagcaggcttttgcctgctgcgttattattatccgaaaatcgaaaatgcctgacaaaaattttttcaaacggcttgaaacattcaaaaattgcggtttaaaaaggaaaatgattgacaaatccgcccagatattttacaatgaagaaaaaataacactacaaatgtaggagaatatcatatgaaaatgagaaaactgccggaatcagaattggagatcatgattgcattatgggaggcagacggcccagtgccgcgcaattacttcgataaaaaattgaaagagaggaaaaactgggccgactctacgattttaagcttactgggccgactgcaggaaaagggatttttgtcctgcagtaaacagggcaatcgtaatctttatatgccgcttgtttcagaggaagaatatctggcttatgaaaatcgaagttttcttcaaaaacttcacggtaattcgattcggaacctggtggcttcgatggtagaaagcagggatttgacacagtctgatttggatgatttacagcattatctggatcagatgaaaaaggaggagtaacctatggagggtctgtttgcgaatcttatgcgtgttacgctgaatatgtccgcattggcggccctgactttgctttgcactcctcttttaaaaaagagatattcggctaattggcgttattgggtgtggatggtcatagcgatacgccttttgatcccttttcaaatgccggcaattgaactgccggatttaaaagagccttttcaagcggcgctttcttcggcctggcccgaacagaagaatcagaagttgccggctgctttggaagaaggcaaccaggcctaccgggaagaagatattccccaaaatctctcagagcagcaaaacaacataattgtgggctctcctgcacccaataaggcggtggagggagcggcagaatctttgcagttggattggaaaacgaaactaagagactttccttggcagaaaacaggtttgattatttgggccttgggagcagtggtagtatttgcggctcgcttggcatcctaccagagaatgcggcatgtgttgcgcgcctacgcccagccgatggaggatcctgcatgtcggactgcctgggaagaaataaaaaaggaacaggggtatcgagggccgttgcgtctaatgcgctgttcggcagtgtcttctccaatggtatgcggcttgttccggcctttgctgttgcttccttgtcaaaaatattctaatttaacccttcaaatgatttttcgccatgaattggttcatataatgcgccatgatctgtggtataaacttttgctgcttgcggcatccacagttcactggtttaatccaatcattcattggttggttcgtgcggcggatcgggatttggagatatcctgcgacgaaaaggtgacttgccgaaagaatagagattttcgtgctcagtacagtgaagcaattttcgcggtactgcagcagggggtagggcggcatttcctgtttactaccagcttttgcaatgagaaaaagacgttgatgcagcgcttttccgcgatatttgacaccaatcgcaagcatcaaggcgttgtggcaatgagcatggttttggttgtttgtctgcttactggcagcctgattggatgtcaggcatcttctgggaagcagtcatctttgtcagaaaatttgacttcttcggtgctttctgtcggcgatactgctgtagatgtgaaagaagaggcgctggcccagatggattggactgctttgctgtatgaagaatatgcgtttggacatgatttagacgagtttcaggccccggaagcggatacgagcatgggattcggttatttaaaggaaaaggagcgactggaaccctatttggatgcaacaagccaagcgtatggaataaaagcaaacctactaatcgggatccggaatttctttatgtcatcacccagtgagctggttcaagaggacgaaatcaattggtttgccggagaaggttgggggattgatcagcttggttttacgctggagccaagcagtgtgcggcaggaaacagatggcgacattatcattgactaccggcgtatagccgataaagccttgctacggccggtgcgctatatatttcggcctgttctggtggaatcggttccagaggcgctgaaagaggatttttcagaaggagatattgtctaccaagtcgtcagcgtacaaaatctgaatatggagcagttgccgcaacgacaggccatagaaatatccaatgcccaggaattgctgcaggcagccgagcgaataaacgcgggcggatggctgaatcagtatgatacttatatcctgaccgcggacattgatctgtctggtgtttcgtttacccccatgggacagaatgagcggtatctgggccattgggacgatgatgatgccagagatcccactttgcgggggtttaacggtgtttttgatgggcagggccatacgatttttgggctgcgcctggcggcggaaggacaggattatttgatgaattcagactatgctgttgacggcatcggcctgttcagtctcattggtacagagggcgtggtaaagaatctaaatctgaaggactgtgtggtaacctctccgtgccggtatgacgcagaatatggatcggcaggcctcatggcgggaagctgtaatggaacgctggaatccgtttcggtggagggaacggtagaaggcggttacgaggtaggaggcgttgcgggccaaataggaggcaatgccaattcctgtaccgcttcggtaacggtcagcggatatggcgaggttggagctttcgcaggttccttttgcgatggtgttttagaagattgtactgcctcaggacaggtccgtgccgttccagcgcaggatgcagctgcatatgatgaattacctaccgcaatcggtggttttatcggcttcagcgtgcaaggaacagtgatcaactgcgagtcctccgtctacatttcaacaatggtcagttctaactgggttggtgcttttgccggatacgttcaaagtttccgggcagaaaactgcatttacgatgaacaaaaagcaccgggatgggaagtcgttgatgtcgtatataatacgtctccaggggaccggcaggacattcgagcggcgtaaaaaacaatatcaaaaaaggagatctgaatcagatctccttttttaatcatccattctgccggataagttgtgaaaattccgccagagtttctgtaagagatgctctcaaagaactttgtattactatgtaaaaaaatagttacttagaaataaaataatatcttgtttctgtaaagcaataacggtaaaataaagtcattctgatagaaatcaactttcaaaagggtcgttttcaagtgcagtttagaatttttatcgtttgcttttttgcagctacccgacatgaaacttgattttacacgaaaaaatgctatactgaaaaagtattttattggtataaaaagcataaaaatgcagacttttggttggaggttgttggatttggatggtttttctttgatgactttttgggcgcagtatggagaatttatcaaattggcgctcatttttgttgcgatcattattctgttaaaatttaaaattccattgtccggcgccattgggattggcgcggtgctgacggtagccctttatggtattcccgttctggattcgttgatgattgccgggaaatccatgatcagcgaagccacgattatggttcttctcaactgttatctcattacctttttgcagcgtatgatggaactgcgcggccatttggatttggcacagcgctctctttcccggcttttcaacagccgccgggtcaatgcgtcaatcgctccggtttttatcgggttactgccgtcgcccggcgctatttttatcgcaggttccatggtagacaccgcctgtggggattacattagcaaagaggataaaacatttgttgcgtcctactttcgccatattcccgaaagttttctgccgacctattcctccatcattttggcctgtcagctgacgggcgtgcaaatgggcgccttcgttctgggaatggtgccgatggtggcctgcctgatgctattggggtatttattttatttgcgaaaagtgccaaaagaaacaggagaagccgcttcaaccgataaattggcagatttgcaaagcctttgccgcagtttatggacgattgcggttatcatccttttaattgtcgtattgaatgtgccggtgtatatagcgacggtgggagttatcattgtgtatttctttaccagccgttttacttggcaggagatcaagctgttttttctgtccgcattggaagctcgtattgtcatcaatacctttgtagttatgatttttaaagatcttttaacgcataccaacgtaatcaccgctttgccaggattgtttgaggcgctgcccatccccagttttttggtttttggcttgatctttttcgtcggtaccattgttgcaggttctacggcgatcatcaccttatgcctgcctatggcatttgcggcagttt

SEQ ID NO: 1589 - DNA, 32389 bp, Unknown
  16S sequences of unknown bacteria
ccgtattggaagccgccatatccgtaatgcaatagccgtcgaaatcccattcgccgcgcataatatcgacgaggacgttcgtgtttgcgccgacccaatccgtgccgatacggttcatcgccgacatcaccgcgtgcgcgttgcccatcccttccgcggaagagagcgcatattcaaaaggcagaagcataatctcgcgagcctcctgctcgttcagccatacgctgccgcccgcgcgatggtcctcctggtcgttaaaggcgatatgcttcacgtttgcgattacccctttcgactgaatcccctgaatttcgtttaccgccgcgatcgccgtcagataaggatcttccgaaaaatactcgtgcgatcttcctccgaacggcatcctgtgaatattgatcgcgttggcgtataagccggtgtaccctaacgcccgcgcgtcttcggcaagcatttcgcccacttttttaatgagctcgtcgttgaacgaagacgcccaaatcccttcgctgggcatggacaactcgccctttgacttgacgacgcccgtcggtccgtcgtaatcctttgtatcgggtttcgccaccgattctaccgctacggtggtgtacataccgttcgtaagaaggtaggattgttcctcaaacgtcatttggtcgagcagtttttcccaatcgggatcgtcatagcttttcccgcggagcgaggccagcgtcaggccgttcttttttccgtaagcgggcttttttgcatccgtattttcgggaataggctttttgctctgcaagtcgctcaacattttgtcggtaacggaaacgctgatcttttctttgggaagggtgcccgtccagtcgtttctcgaaacataagtcactttcgtgctgctcccctcgtacttattcaagtcggcaaaatcgagccggttggtgattgcgtttcccgtataggaagaaacggaatatgtagtcgtatcgagcttgtcgttttcccaaaccattttcgcaaggtcgctctttccgtctttatccattctgttcttcgtattctccgccgttttgccctgcaacgcaagaatattattggcagcttcgtgcgccccgttcgcagctgtgagataatactttccctcgtctaggattggaggtattggttaaaatgacgaccttttcgaactgttcctttacctgcttgatgagcgttttttcgctttcggtgagcatgagagaatgcttgtagtattcgtcctcttcggcgtacgccacagggccttctccgccgcccgaagcggttttcttcaaaagagccttatgatcgtcctccgaacctttcaccgtttcggacgttacgcgctcggcgtcgcttccttcgccgccctctctcgaaaggacgataaacgccgcgtctttatagaggctgaacgagtttctgacctgtccgttaaacgtcgtgtcctcgtgtccgagttccgaagtgtcgttggcgtaatagcttttcagcgtgggattcaccttaaatcccgccgcttcgagcgccgacgccacggtcgaatcgctgcccgtggaactgccgctgaacgcgcccgcgctgtcggacgcgccgatcagattgtccgacgtgacgccgaatacgctcacccattctttgccgcttaacggaagcgcgttgtccttgttcttcaaaaggacgtcgccctcctgcgcgagttcgcgcgtcagctcttccgcagctttctttgcgtctttcaacgaatcgtagtcggtgtagtacttgccggcataggaatcggaagccgcggcggcaaaagcgctcaacgacgtccccaaagatgttgccccgacggccaataccatcgacaacgcaatgagcgagccgacttttttagctgtctttttctgtttagacataaatttcctcctcttacttttgttatttgcaattcatgttttgcaaatactttacgggtaagattatatagaatgcgacataaaatttcaagagcaattaaacaaacggcggcaaaacgcatatattctgcgccgaatcactgcaaactgtaaaatttcacgtacaaactgcacgccgaaacaagcgcaaaaaaacacggatacttacccgttcggtaaatatccgtgtttatggaaagcttgaaaacggaacgcgcgatcattcgtcgtcaaacagaaccgctccgatttttcgtaaatagttcaaatacagcgcttttaattcctgtactttttcccgactgatgctgatcgtaattccgtccttataatttaacaaaatatccgtccgttctattctctgaacatattttaaattcacgaggtatccctgatagacgcggacgatgtcaaacttttccagcttgctttccaattccctcatcgtcatgtgaatctcgatctgttctccgtcctccatatagacatactgtttatagcggaaactctcgatatagacgatatccgaaacgccgactctgcgaatcacggaattgttcgccgttttcagcgccacgtaactgttatttataacgcgcgcgttgatataagagtgcagcgtatccttcaaatcgtgcgtaaaattatttttgcggataaaaccgaacggtctgacgggaaacgtttcaaaaactttatcttctctgttcgacacaaaaataatatccaccgtactttctctttttctgagcgcttttgccagctccactccgtcaagcttaggcatatcgatgtctaaaaataatgcgtcgtaaatacgttccccgttcttgatattattatataaggacaccggcgaaacgtatttatcgcaagaaaccgaaattccgcacgacgttacgattttgctgattttttcgcaaatcgcctcgcagacgatttcatcgtcgtcgcaaacggcaaaattaagttgtttattcattacccccccccgcttcaattctaacatcacttcggcgacaaattcgttttccacaatcgtataatggacgtaaccgttatatttttctacgatgcgcttgacgatcttatgtccgtagccgtgattcaccgcatcgtcctttgccgtattcatcttcaacaaactttctctgtccgcatcgtcgcgaatttcattctgcacgctgatatataaataatccattcgctttcctatcttcaagtcaatgagataatcccggctctccgtgcgcaaaatgccctctatcgcgttatccagcaagtttaccaatacgcggcacaaatcgctcggctcaaagggcagaaactgcggaacgttgattttcgaaaccagcgatattccgtaggaattggcttttaatatctccatattgacaatcgagttgataagctgatttccgcaattaatgaatccgctgaaagtagactgcatatcgcttttttccatagagaaaaagtattcctttaagtcatcgtaccttccttctttgagcatgatttccatgactttatgctgatttttcatatcatggcgcaaagagcgcatttcttctattgcctgctcggaaataatgagcatttgtttatcggcttccagcaatttattctgtacttctaaaatcgttttttcttttcgcactttacaatgataatagaccattaaataacttattacggatattacaaaaatccccgcgagctctatgcaataataagcctcgaatcgcattcccgccgacatctttataacggtcttgctgatgattaacgcagtcgaaacaatcgtcgttatcaaaatcagcaccacggaaagcaccggaatatcgttgtatctcttcaaggtgtatttatgaatgacaaaagcgaagcctatcatgaacaaatcggctaaatagcatatccaatcccaagatcggccgcgatagacgcttcccagatagccgcccagttcatggccgaattcggcagtcgtgatagcggtgataaatatagtcgctccgataataaagcggctcgtgacataagtgcggtcgaaaatgccgagatataaaaatattgtcagaagccaggcaatctgaaaatgaattcccgcgacggcccgccaaaccgtcgacaaagcaaacagcaaccaattcagcagcgttcccaccaaaaatgtgccgcaaatatatgcgattccgattgcgatatttttcgtttcctttttccaatcataaaaaatccagacaatagaaaaagataccgctaaaagttgcagtataaaaacttcgtcatatatgattgtaaaaaaatcgaatattctcatatgcatttcccccaaaccacctacggttctcctatatggacaggcgacgtttcataagtgaaaaacattccttcaaaatctattcctattgagtttaacacatttgaaccttaaaatcaaccatactttaacaaatcgtaaattttctttcacaaaacgaaatttttatttcgagggaaccttatcatgcaacgtatttacaacacacaattccttttatcggcatgactcgttttccggggcgcttccgttcttcccatccaaaatcacgtccgtccccctcaccgtacactgacgtttccggcaattcgtctttaaaagttcgttttccctttttgcgtttaccgtcaagacatatagaaaaaggagcggtgatacgctcccttttctccttttaaaatttttcgttttcgcttttattccctcttgtcgtcctcgtctatttcgttttcttcggcgggaaattccgcttcttttatactttccgtccgacctttgacaatccttttccaaagctttttataaaaatcggacaagccgatacttttatccttacggaaaataaacagcgcaaacaatgcaaaggcgatcgcgacgatcgcgacggcaatgatgattcccgcgagggcgccgcctgaaagccccgtttcgggcttcgtctgcgccgcgatgacgaaggagatcggcttcgattccgccgctttataattcgccgtttccgcaagcacggctttcacccaataggtaccggcctcggcgggaacagttgctgaatactctccgtcctcagccaccgcataggtctgatcctttcccgtatagataaatttaatcgtatccgcggcaggcttaacgcttttttagacgtcaggagctatcgacaccttttctttgcatccgtatttcatggtacaacaaaaagtattctccaacagaatattgaatagatttttcgactcaacagtttaacggtttctgttttaaatactttccttttacccgtgagaaagaagatttcttctcccacaggcaattttgattgcataaacgaatctataccgccgtcaaaaacgcgattccccctacgggaacaggcagagaggcgagtcccgatgccgtgccaaaaaagaggcttttccccatgcagtcttcgatccgatagcgatatagcgaaggtaattcagcaatgaccgcatacctgcccccggcgtttagaagcaccgcctccttattttttactctcacgcacgtatcggagaagattgccgtcacttctttattctctcccgccgccgtcgcggcgaggtaattatggaggactccgcaaggataaaattctcccgcctgcaaaacggaccgatattccttgataaaacgaatatatcgttcgcaaacggcgcgctgcgcctctgtaagcttcgagggatacacggaaaactgaacggtagaaaaaattacgttgatgaacgctcttgcgatattttccggcgtttctttttcattccactccaagggatcggagtgcacggcggcgcctcccgctatcagcctaagatcgatcgttcccactcgattttgcagcgacgaaccgggacaatcgcccacgcggagcatattgccgagagattgcatggacggtccgatataagcttggcgaaactcgatcaaaacgtcgggtttgatgcggacgagcttttctttcagcccttccgtcaatcggcggattccctcttccagcgactcgcagttgatgcccgcgcgttccgccgtttcttgggtaaggcgaaaactgtcgataaaatcgagttttagcccgtcgaagtcccaatccccgatcgcttcctcgcagtatttccaaatatgctccctcacctgaggaaaacgcggatccagcacgcaggcgttttgggcgccatcgtgataaagggacagggggcgaaaccgctcgctttgcgctgaaaaatctcccgaaaaggcgaccgaataccacagcatcgcttttaaaccgagcgaatgaatctctttggtcaacagacgaatatctcctaccttttctttctgcggacgataatcgccgcagtagccgaagccgcggctgttatccgtcgtatgccagccgtcgtcgataattaccgtttccaaacccaaatccctcgccgctctgcactctttcaaaattcgttcgtattcgagattttggtgaaaacaataccaagtggaaaacgcgggtgcgtgcgccgcgggcggcgcgttcacggcgccgtatttttttcgaagcctgccggaggcttctttcacgcactcgtaaaagggcagacgccgttcgtcgatgacaatctgcgcacgataccccgtcatactttcggtgacgtccaggaaccattccagcgtcaccgcgagcaacgaatcttcttcccggtaacccgcctttaacgcgcagggcgtttcggcatcggaaaggctcgccgtcaatacgttgacatcgtcctccgaaaggatggatagcacgggcattcccgctaccgaacgggaatttacggtaaacggtccccaatcgggcgtcaggacgcgattgacgccgccgcacgccgaccagcagccgtccgctcccaaagcgggcagggaaaaggagagcgccgtttttttcgggcgaagcttccctttaaaatcgagtgtaagcgacagcgtcgtgacgccttccttttcctcgcccgtgagagtccatcgaaaattttgaccgaaatcttcgcagaggtattccctcccgcacacgtgtgttttcatccgtttctcctttctattcaaaaaaatccgtgtttttcaaagcatagtacgcgtccagctgaaaagtctttacccacgccaccagccaatcgttcaactgcccctttcgttcgtcgagagcgtgccagccgcattgaagcaccgcctcattctgcgctcccaggggacgcgtcatgccgtgcagccgcagcgtgccgtcgctgacgtactgtaccgtgaacgcccaaagcgcgcgggcgtgcgcgagataggcggcgtttttcgtaatcccgtataatctatataaatcgggcgcataaaaaagcccccagcaatcgatgtgatggtgcgccgcggaaacggacgtgccgcccgacgtgcgcacgcggagccgcgcgcagtcgctgttttcctcgaagaccacgtcgtggtaaaagcaccacgtcatcagataatgcgcgatattttccgctctgcggagatagtctgtttctttcgttatctcatagagcgtcagcgccgaccgaagcaagggtcccgcgctctccttgtctatgcagtaagtatccagcgcgccgcccgccgcaaccgatcgggaaagatagttttcgtaataaaattcgaaagcgctttccgccctgcggagatagtccttttcagccaataactcataggcggcaagaaagcccgcaaccagcatcgtccccgcgcagcccctttcgaccgccgccgttccatcgggcaaagctatctgcggaaaaccgttttcggggaaatatcttagatagaatccacagatcccttttatcgcattttcgtatctcgtcacatccctgcccatgccttttaaaagccgacaacacacggcaagcttatataaaagccatccctcgttgcaggaatcgatcttttcttctagcgaaaaaggaacgtcgtactgacagcttacggcgcccgtttcatgcgtgcgtttcagccacgtatcgagaatcccctcgccccgttccaaaaaatccgcatttccgctttccgcataggcgcgaagatacatttccgccgcggtgacgttttgcccgcaccaaccgatctcgtactttccgaatttgcgaaagataaaacgactgttcccgtcgccgagccgatgttcgccgtttggcagcaatcccatattcgacaaaaaaccgtattccgtcttttccgtcagagaagagaggaaacggaaggcgccttccttgatctgccgcggggaaaaccgaagcggcggagcctccaaatagtgcagattgacaaaatcgaaaagctctttactgccgtaattcggctcttccgcgtccgcctcgtaaacataacaacgataccgtttttcctcgccctcttttaaacgcgcaaagcggacgacgggctccccgtattcgaatttccgcaaataggaaagcggggattcgatatgagaaaaatagatgcgcaaaacagtcttttttgcgcagcgtatcaaggacacggagcaatcggcggaaagagtatcttttcccgcgaatatcgccctgcatttaccctcgctttccaagaccgcgcagccgggaagccccactctgtccgaagggaatacccacggctcgccgttcttctccgttcccttcggctcctgtccgtccccccattcgttgccgttatagacgacgcacggaatcatataaaaatcgggagtcccttccgcggccgtctgaaatacgggaataaacggcttttcagtcccgaggtttttatagatcagttcaaagcgggttatccgctcgttgacacgaacgaaggaactcgaaaatccgattcccgcaagagcggcttcccgggcggtcagttcgttgagagtttcgtccaggcagacgacatttttttcaccgtcggtttgaaacatatttttccccctcttttcctaagctctatgccgcctttccttgcgaaaatgcggcatgaattgcagcgtatatcctatgtcgcgcacaaacgcgacacctcctatttttcaggcgcttctcccggcgacaaaaacaaacgcggcatattgcggtcgattttgcgatgtctgcaaggagaaaagcgacatttttttatttagttcacgccgctcgtacggattttcgccgcggcgcccgtgcctgcgtctttcatgaaataggtaatctgaatgcgtccgtcccaccccgaaggcgcgttctgcatcaaaggaatctgataggatccgttctccgagctgccgaattgttttgccccgtccgcagcttttcccgtgccccagccttcgtacgcgaaaccgcctttataattgcggtaataatattccgccgaagaaacatacccttctgaggtatggtagtcgatgcgcacgcccaaagctttattcgctcccgcggacgcgtgttcgccccagacattccaatcgagatcgagcgcggcaaactcgttcatctcctccatcgtcaccgaaagcgccgtctgcccttccgcatggccgagcattcccagcgaaacgtcgaaactgttttcataaatatccgtatacggcatgaggtcggcgcgctcttcgtaatagtagtcttttctcacgatatgatcgtgaagattgctcttttcgtccgtttccgcgatcccctttccgtcgtccgcttcgatataaaacgccgcgttgcccggaatctttaaatccagcgtcacgtccccgtccttcactttcgagtcgtcgagatccatgacgacgtaaggctcctcgtctgcggtattatgcgaaacgtgttcgttgtcgatcagatacaccttcatcgatttcgcgtcaaacggaatatttttgagcttgacatggatttctcggctgtcttccgccctttgctgatagctctcggaaatggtgtaggtgggattcagcgtcttattgtaaataacggctccggcgcggtgggaatccacgcccgtcctccatccgaacgtttcctccgtatcttccgaaaccgttacaaaagcgggagctacgggcagtctgccataagaccaaaggacgtaaaaaacgggatttttctgccaggaatagggattgatgagcgcaaattcccccatcagataggacgcccacgaaaagcgggaaatatccgtggaatcgaggacgatgccgatactgtcgtagagtttggggacgagtcccgtctgcacgagaatccccgatcccgtagccgcgggcgaaaattcggtgacgtgctgcgtcatcgtatgcagtgcgtattcgtcgttgtccctgttgatggacgcgcggacggcttccttataataggaaaaatcctgataatgattggcgcagccctccatatttgcagccgaatccccgtaatagtgccacgtgaaagcgtctatggtattccccgcttcctccgtcttcttcatatagtaatcccagagcgtgccgtttaaggaaggtacgttgtctttgcaaaaggtcacgggccagcaaagtcccaattccgccacatacgcgtcgggatccccttttttataggcggaggccgccgcgacgctcatatcgatgaactgaggcataccgctcgtccagtaagcggtggcgttgaggtccggctcgttccacgtttcatagatgacgcgtctgtttttctctttgaaatagcccgaaaccttgccgcaaaaatcggcatacttttccatatcgggataggagagattgttccctccgtccgcctgcgcataattgggaataccgagcatgatgaaatagggaagtacgccgttatcctccaaagcgtcggaaaactgattgacgcgattccaggcattgtcggtcgtcacgactccgccgttgatgagcgaattgttgccgatccccccgccgccgaacaccatatcgatacggaaagcctcgctcttgatctcctgcaaatatttcagctgttccaaagaggcgtaattgaccgtttctccgtacacaaagtcccacgtaggggagaacatatcgatttttttgacgttctgcacctgcccgccgtccttctttgaaaagtctatctccatatccgccgtcgagtccgtatcatagcgaatcgaccagagttccgaatggggattgatatagtcgattgtttccgtcgtcttgccgcaggcagccgctcccgtaaggagcaccgccgccgtaaacaatgtgataatttttttcattcctttttccccttcaatttatttcttccagcaataccaccgaggcgaatatttccgcatcggtgggaaaaacggtgacggtatttccgttcgtttctaccctgcccctgccgtattgggcgactgcccgatatttccccggcaatttgccaaaaatttctcgttcctccccccgcacgcggaaggcgtagaagagcgcgttctttccgtcgcgggagagtcttgtcagcgagaacgccgcgtgcagatggctcaacgacgtcgccttatccgtatcgatcgcaacggtgcgcccgtccttgacgatatattttatcttttcgtagaaggcagtcccttccttgacgatctctttgaccgaatcggaacaggaagcgagatctcccgaaagacacagtctgcccagcatcccttccgccatagtaaaataaacccgttcctcgccgtattcggggcggatagacgcccatacctgcatttgcctaggaagcagcgcccgatgcagatcgcaggccgtcacagcgccctccggaacttcgtgcaaatcggaaaaagataccatactgcccagggaaataaacagaggctcgtggcgaagaccgcccgaagaacatatttccatcaccagatcgggcacttcccgcagaatacgccgataaaattccagcactttttccatatgctgacgcaatccctcgccgatcgattccgcgccgtccactcccagaccgatattttcgttataatcgatctttacatatccgattccgctccttttcagctcgccgatcacttgctccgcgagaaaatccgtcacctctttcttccgaaaatcgggaaaaatacgattttcgtgccgaatgagaacgccgtcgcgcgtgtgcatccaatcctttcgccgagaaataggcgcgccctcggtcacgttttcgaactcgtaccacacgccggctttcatgccgttttcttttgtcaaagcgacgaatttttccagaccgccggggaagcgttccccgtctgcgacccaatttccgagatagttgcgcctcttttcggggtcggtataccacccgtcgtctatgacgaaatacctgacgccgcattccctacaaaaggggatctgttccgcgacgcctttgagcgtcggactgccgttggagcagagatattcgttgtaaacgacgggcagttcctcctccgaaggaggcagacgaaggcgggttttttgatattcggtgaggacttggcaggcgtcgagaagccctcctcgcaccgccgcgagaaaggcgctgtgcgtcgtaaaactttcccctggcgacaaagtttttcgccaatgcccgaaattataatcggcaagcccgcccgacaagtgcaaaccgcaggtgtgatgtcccgcctctatttgccaggaagcgggcgcgtccatcgacgccgcccacacgacgccgttttccaagtcctccatcgccacgaagggaagaaagcccctcgcgggcatcgtcccgacctgaccgaaacgctccatgcgatatccgtagcaactccacgtatcctccatcgcaaatttggaaacgggcagactttccttgcgtccttctccggaccaataattgcggatgcggtgcaggagaattttatcgggatcgttctctttcacgaagggagaaatacagctgacggaaaagctgtcgataaattcgagcgttttgtcttccttgcccgtattgacgattgtattccagcattccagtccttcgaagccgtcctcctgacggacgtgatgttctgcgcgaatcccccgttcggtgtcttccaaatatgtaattacttccctgcccccatcctttcggatcgtttcctgttttataacgcggagccgaagcgccgtttcggcgttccgcatcgagatgccggcggaaaaatcgcgggtgggactatcgcccaaaaacgccgcctgaaacataggctcgggatgaatatgcccgtatttacgattgtaagagcaaagcaccttttcttccagaatccgatccgccatgcctgacggcagaacggtaaacgtagtgattccgctctttttatcggtggcgtataccgcttctattcccttaaagtgatgaatcgtcatgtccctctccgcatcatttccgaatatattttattgtgatgtccacatccgtaaagtcgttctgattgctcgtgttgggaaagaccataaagagaatttcactgcccatcgcaatctcgatatccttttccaaaacaaaatccttggcgccgttctcgggcgcaatcgccacgccgtcgtaaggatctccccgcttgtcggaaatggtgaacacgactccgtcgccgctgttgaagcgttcttccgccagcagtctgaccgtagcggtaatgtgcacggtgcccgtcgcaggcgccttaaagcccatgccgatgccgtaaccctgctgatcttcgggaagccaggcgcggctccacagataggtgaaataataaatctgctgatatttgctgcaccatctcccgtaataatcgttgaaaaccatcaacgagagagagtcgtcctcggggtcgccgcaatagtagtaccaattcctataaccctgacaatcggaaagatccgcattattattgaaggtatcctccaaatacagcgtatagtcgtccttctgcgcttcgggaagcgagggcgaatacgtcgtcgtttgtccttcgccgccgcagcctgcgccgcagagcaaaaaggcgcccgtgaggataagcggcagcagtttccaagcctttcttttcatttccttttcctccttgccatccaagcggcggcagcggcgagcgcagcgcccgcaaaaggtacgcccgcaacggacgcgcagcccgtcgtcgcctttaccgtctttttcgtcaacgtaccgtccttcacttccgcgccgaatcccccttcgatatgctgaaagcctccgacgtcgcccgcgcgccccgcgcgaaggtatcctgaaagttcggcatccgcctcgtaatcggctccgggaaaataggtaatttcgaacggacagccgctgctgtcgctggaattcgagtgcgcaagtcccgaatcgcagtaaaagacaaacgaatctcctttgcgcacgtcaaactcttgatcgagcggaaacttcaattcctccgcgccgttttccacaaacttttcaaagacggtttccaattctccttcgtttttctgacggtaaactccgagcgtaacgccgtccccctgcgaactgcccttctccatatgcccgttgagccgcaccttgccgctgccgcccgccacccagacgaccatgacgccccaattgtcgccggggtgcaggctgctgcccgcgatgtgggaatagggctccgttccgtgccaggtatcgctgccgctccatcccaatccgtattccatcaatacgtaatgttcgggcgttccccaggcgtaataaaacccgttttctccctgcgcggaaatattatttcccgtcttgtaggtaagcgccgttccctccgcctgcgcggtttctttcgcgcccgccgcgactgtgccgccgagcggcaagccgatgagaagtactgccatagcggagcaaaacaatatcgtcaatctttttcttcgcataatttttccccttactttttaatttttcgatacgttcgccttgacggcgcccgcaatcgcgttgttgtaatcttccgtcactttcgtgcccccctgcttatcgtaactcgctttaaacgaagagaacgaagcattcagcttatcgcccgcgcccgcgagttccgcccacgtaagagggattttcctgcccttttcaaacgttttgtttcccgtccagatgtccgaggaacagagcattttaaagatttcctgttcggcaaagtcggtgagaatttcccaatactgcacatagctgcgcgtttgcaggaaagggtaatcgggatactgaacgtatgtcttcgcctcgttcatcacgttgatgattttttccgcattggtggcatagggacagagataactagtggaccaattggtgacggaggatatctccgaacaggcgtccgcttcggtgagcgttcgattgaatccgtccgccgccttgccgagcttactgacacgatttccctttccgtcgtattcgaaatgcaccccctcgactccgtagatgagcagatcgtttccttcctcgctcaacatataatcgacaagtttcagcgcggcggtcaattcttcgtcgctcatccccgcgttaagacaagtgaccgtccagaaattgggatttcccgcgatgccgtacgtaccgttcggtcccgagggcggattgaacataccgatggcggcggaggcttcttcgatgctcggcttataggtggaggtggtgtttgcggaaatataatttctaacgatgttattgaaccaggcgtgcccttccatcattcccaccgttcccttggcaaacgcctcctgtttggcgtccgtgctgttttcgtaccaactcggatcgatatatcccgatttatacagatcgttaaaataagaaatcgcctttttcgtattttccgtcgtccaactcggctcgtattttccgtccccgtccgggtcggtcatgaaattccagcccgcgtcgaacgcgatatacatccagttatccgcaaacagatcgtcgccgccgctcgacgtatatccgtacgtgtcgtttttgccgttttcgtcgggatcgtaaagcgtgaaagcgcggcacagccgataaaattccagcaggtcctcgggcggtgaaaagcggtattcttccagcattccttccgttacggcggattccgggatattctgttcgtccgcaataatttttttcagtttttcgggcttgtttaagttatcgatccagtcaaggcggatatacatcgtgtgttccagcgtccaattgacgggaatcgaccaatgctttccgtccgcataatacatatttttagttagatagtcgaatttttttaaatgatgatagatattggcgtatttcgtttcgctgacgaaatcggaaatgcagaccaataccccgtcgtcgatcatgctgctgtaaagattggcggtttccggtcctttactcacgaaaatatcgggcagcatctgcgtggcgaacatcgtattcactttcgtctgccaatcggcagcgcccgcggacgacgcgtagagattcatgcccgctacgtctttgagttttttatagatctccgtattcgattttctggcggagttgacgcccgcgaaattccagcggaatatcgtcagccgattgtcgtccataccgtcgccgcccggatagatgacgcgcccgccctcgcccgtttcccatttctttccgcaccctgccagacaggaaaagcaaagcgcgaatccgagcgccgcattgagtatttttctgagtttcatcttagacctcccttttttcgcaatatagaattttgtatttcagctctttacggagcctaacatcacgcccttgacaaaatatttctgtacgaacggatacacgcagagaatgggcaaaatagaaacgacgatagatgccgcgtcctgtcctttggaatacagctgagaggtatccaccccgatggacgtgtaataatccgccgattgaagatcggaaaggatatttctcagcttcaaagacagcggatacaattcctcgtctttcaagagcagcatcggccagtaccaatcgttccagcgctctacgaaataaaagagcgcgatggtggcgattcccgccagcgaaagcggcatgacgattctgaacagcacgacgaaatcgtttgccccgtccaatttggacgattccacgagttcttcgggaatattggcgaaaaagttgcgcagcaaaatcatattgaaggtgttgattccaaagggaataaataatccccaaagagagttatacattcccagccctttcaggataagaaagaacggtatgacgccgccgccgaaaaacatcgtgatgagtatcatcgtaaaaaatatgttcttcccgggcagatcccgtttagtgagcgcataagcgcccagcgaggtcatcagcatactgtacgccacgcccgccgcggacactcccaccgaaatcaaaaaggcgtgaagcatccccccttccagaaagatatatttgtacgcctcgaaagtgaaatgccggggaatgacgatgatcgtcgaagcgaagtagtccacttccgtcgaaaaggaggtgaagagaatattgataaagggaaacagacaggcagccgcaaacaacagcagaaagagcatattgacgatatcgaaggcgccgaagcgcagttttcttttctttttcgtgttttccatggcccgtctcctcactctcccagctcgtaaatgcccgttccgtttatccgcttgacgacgaaattggcgctcagcagcaacccaaaattgatgacggacttgaatagacctatggcggtagccatctcgaaatcgccgctgtccgcgaatcccgttcgatatatgtaagtgtcgagaatatccgccacgtcgtaaatctgctgattataggtattgaatacggcgtcaaagcccgcgttcatgatgttccccatcgccaacaaaaattgaatggtgatgatcggccctatacagggaagagttacgctccacatcatgcggaaccgtccgcagccgtctatggtagccgcctcataaagattgggcgaaacggcgctgatcgccgccatataaatgatcgttccccagcccgcatccttcaaaacggaaaagaggatcagaataggataataccagcctgcgtccgacataaacgctttgtgggacaatcccagcattacgcgcagattattgacgacgccctcgtagccgaaaatatcgtagacgatgctgccgaagatgacccacgaaataaaattgggcagatagatcaccgtctgtatcccctttcggtagcccgagagccgcacttcgttgagaaggagcgccaatacgataggcgcgggaaaacaaaacaggatttttaaaaaactgatgacgagcgtatttttaatcgccctcataaaatacggagtatcgaaaacgctttgaaaattgacgaacagcggatccgcccaggcgcttccccagatccccgccgaaggacggtattccttcacggaaagaataatgccgtacatgggaagataggaaaataccagatacgacaccgccacgggcagcagcatcagataaatgagcttgtgctccgccattttcttgaagagctgttttcgccgccttttgcgtgcctcccgcttttgcaggcgctttccgcctatctttttacattctgcaatcgttgtcaagcgtgctccctcccgtctttaaaatttcttcgagttttaggatgtgaacagattataataccgaaactttttcctgtcaatacggtttggattttaaatatcacgatttcttacatcgaatcgtaaatagaaaaatttaatttatttttttatcttttataaaagcgattttttcaaacataaattctttttttctgtaaatttgggaaatacctttctatttttacttttagtaagaaaaagtgtacccaaatttccccaagggctattgacaagagattttttgcgttgtataataaacacaaacgaaaaattgatattttttcgcacctttggagggaaaatatgacttataagcgtattcgggaactgcataacatttcgctcgttccccattcctactatcataacaaattcgacaacactttttcgatggatatgcactgccatcagtatatcgaactgatgtactgccgcagcggggaaatggaaatggagcttttagtcaccaatgcgaacgggaaagtaaaaaaggaaacgctgacgctgagcgaaaaacagtttatcctgctcgacgcgggactgatgcaccgcctgatcatcaggggaaattcccccgccgtcatttccaatatcgaatggacgcccatgccgataggagaaaccgaccgcgaactctcctcgctcattcacctcgacgtgcgttcgtttttcgatcgtttcgacggtttgaaacgctttgccaatacccccgcgggttatctcgtcgcgctcgacagcgagaatctcgaacattgccttatctattatatcgatttgatcttggagaacaaggattcccttgcgcaaagttgcagtattctcgcccgatttattcagctattgatggaaatcgataaatgtcttaccccgtccaatctcgccacgggcatcacctatatcaaaaaggcgcaggattacataaaaaacaattttaatcgcaatttgacggtagacgacatcgcagggcacgcggggatcaataaagcatatcttcaacgtctgttcaacgcatacacgggtatgtcggtcatgcagtctttaaataatttccgcatcacgaaatgcaagagaatcctcattgaaaccaacctcaccatcgacgaaatatgcagccatgtcggattcaacaatcgtcagcagctcatctatgaatttaagatgcagacgggcacgacgccgacgagttaccgcaacgaatacaccaacaaaaattttcggcatactcccctttccgaagagtacatttcttacgacatccacggcaatctcatcaaataatccctttttccgcttagccgcgccccatttgtctaagcgaacggttgcgtttgtctgccctaaaaaaacggcttttccgcctccgcgtcaaagcggcgatcggaaagccgttttttctgatttcctatttcccgtttatgcccaacgtcttttttttacctctatttgcgccttttttgcccaagcgcaatacccgccgcgcaaacggacaagacgacaggcagcataagagcgctgccacagccctttacgcacgagtcggaattttgtaaatcgcttttctccttcgaactatcttcgctgtttttatcgctttcccccatgaccgaagaaacgacgtccgattgatcggaggaatccatccctcctgctttttcaaaaacgcaaacgacggcaatatcttcggaaacgtttttcagctctaccctgcccccgtctaacgccgccgcagcgccgttgatagacaggcttttaaagacgtatccgtctttcggcacaaaggagaaagacgcgtcgctgcctgcggagagaaagaatcgttcgtcgccttcgacgctgcctcccgcgcattccgcggaaacgtcgaaatcataagtctgcacctctcgttcgacgaaaggggcgacgggcaaaccgaattcattatacagaaaagccgttccgtaatcgaaaacattttcctgtaaataactcacatatttcaatttcgttttgaaggaaaccgtgcgttttccgacggaccgataggaagggattgcgacgtacgcctgtttattggaagtcgcggaaagaccgtaagcggttccttcgctcaaaaagactttctcggcgtcggaaaagcgcatatatacggtgtcgccgcccttttttctccacagcccgcacacttcgggattttttccgtacgagccttccccggaatattctttgccgtaaatatattttaaagccaatcccgccgccctttcgcaaaactcatatttgtccacaggatgaatattccgatgatccccgagatcgatcccgcagacgtaatacacgttttcgcattctttcgccaatttctcttgcagctgtcggaaggcaggccaaagccctttacaggattcgtcctcgtactgaggaagctgaaaggtgatgacgggcaggctttcgtctttgaaaaatcttctcgtttcttccagccatgccttaaagcagagccgataagtttccaaatccccgtacacgtccgattctccctgataccagagcgcgccgcgcacggtaaagcttcccatcggcaaaagcatattccgataccgctgcgacagcgtggaatcgccgtttccgggaaagatccgggccgccgccttttcatcgatccattcgtgtatccgactgccccccacggcggaaacgattatcccgacgggcacgttttcaagtttttgggagagctgaatcgcataagccaccgccgtgagcgatgtgtacttcaaatcgtttaccgaagcgggcaccgtccagacgttgcattcgcccttattgacgactccgttcgtttcgggcagcattttttgcgtatagaagcgaagcaaatgatagtttttaaaatctttgaatgcttcgaggtaagattcccgggcgttatatttttcgtaatcctctccgtaggaaggatccgcttctatcaccgattccgcataggtaaattcatccatgggataggccatattcgactgccccgatccgtaatagacctctccgatcagcacgttttcgaagcgtttttcggcgccgcccgcgctcaccgtgagcgtttttcccgtcgcgtccgcccgcatcccgtcgagttctaccaaaaatcttccgtattcgtcagcggtacacgttttgagttgtccgttaaaggacacgctgaccttgcgccccgcttccgcttggccgtaaatttccacttttttctcgcgctgcaacaccatattgtccgaaaagatactgcccatattaattttttcggacgccgccgcgcgttttacgggcagggatgccgcccccgcgcataaaaaagccgccgccaaaaataaggacgaaaggatatatcttaaattcttcatcgtttttgaattttgctcctttgcggcattttgtccccgaacctttccggggacaaaattcatgccgttttatttctttatcaaagccctgaatactctctacggctttggctactgcttttcagcgcgttttcttccgacttctcagtcgtttttgcgccgtttgatcgacaacgcgaacgcacccgctccgagcgccgcgagtgacgcggaaaggatcgccatactgccgccgcagccctgacagcccgccgcaacgccgcccgaagttcccgatgaagaatcgtccgcaccgccgcccgaagaatcgcccgcaacgggtgtccactttgcatagagcgtaatgtcggcgggattttccgcgtctatctccgtcaccttttcgcccgaaagattttcgtcgcgataccagccttcgaagacatatccttcccgcgtgaaatacgtatccagctccttgctctccccgtaagcgtacgtcgtcgtttcgtcgggttctccgttgttgagtacataggtgatcgtatattcgttcgccgttacaaacacggaaattttagtaaagtcgtttacgattgtactgtaaacgccgtctttgtcgggcgtcagcttttgattgtttgccgtaacggaggcgatggaataataattgttcgcggacagacggaaactcagcgtcttatcttttccaacgtcgaacgtatttccgtccgcgtaggcaactccgtccattttgacgtcggagagctttccgtgctccttgacgtcgaactgcaacgcataggaaagcctgacttccgcgcgaagtcccccgatattcgcggcgtcggaatctttcacatatcctacgatactgccgcccttacgccccagccactgtacggcacaagtctgcgcctcgtccttgtcgtctttgacagtgaccgtcgcgggaagcgccgctaaaatcgcgtccacggtattatccgcgctcaatacgaggtcgagttcggaagtatccgccgagatttccctgacggtgcgatagttcgccgaggaacgcagaggcgtttccgtcgccgcgtttataaaggcgtccttgacgtttgccgccgaaaggggaaagtcgtatactttgacgtccgcgaagcttccttcgaaaaattgcacgccgtctttaccgttgacgttcgcctgcgcgccgatcgcaaaggtatagagcccgtcgggagaaaacttttcgaaattatcgacagcccttgccgcgaacagaactccgtccacatagaaagaagccatacccgatgccgcgtccattgcaaaagtcaaagtcacccacgaatcctttttgctgcccgtgtcatagcgcagcttatgcgccgacacgccgcccgaagaatagatcacttcgtagccgtcgtaacagccgtaaaagaggaacgcttccccgtaggcggccgtcgtgattgcgtattgatcgcccgcctgaatgctgttgtccgctttcatggtgaaggaaacggtgtagccgccttcgagaaggtcgctccaatcggtatttccgaacagggcgggcgcgtacagatacgactgcttttctttttcgaaggtaatatatccttcctctttgttatgtcctatctgctgattgccgccgagaagcagatcaaaattgcccatcgagtccttgccgagattatccgcgtctttgaactcataccaaacaagcggtttaatatccgtcttttccgattcgtccacgaggtaagagagagtaagtctgacttttatattgtcggcgttattgatcccctcgcccgtaataaaacccgtcacctccgcggaaaattccttcttttccacggcagtccagataatttccgccgtgagcgtattattcgcttcgttgatcgctttcaccgtttcgggcaaatccagagcgagaatttccgactccgtcgcagaagcgggaacttcgagatcggaagccacttccgctatgctcttgattttggaatcggtcgtctgtacccgtatctctccgccctccgtcaaaagctgcgtcgcctgcgcggaggagaacataaaatcataaagacgaatgtccgagagcgtgggattggaataattggtatcctccgctccgaacttcgaccagccgccgaaagtcaggcaaagttccgtcgaaaggatcacctgcgcccccgaaaccgagcctttcaccgtcgcttcggcgtcggcgattttgttgacgtacgccatcagactgcctttgtccgtatctcccgccaccgtgatcttgtaccactcgggcgtatcgccaaacgcgttgtctatcgagaaatttttgtccccgccgtaatagacgcgcagggagttttgacactgtacgacgcggaagccctctccgtaacgggcggtggaaacgatgtcgtgttccccgtcgtccgaggtaatcctggcgcccctgatgtcaaaggacagggtgaaacgggtcaaaaaatccgaaatgtcctttccctttcccaaatctcccgcatacagcagtccgccgtttgtaagggtaagcgcgccgttttccacgctcgccttcgccgcgtccttgacgatcaggtttatgttcccctgcccgtctttcccgatgttttcgggatcggaaaaatcccacgaggcaatcggtcgggcgtcaaatttcggagcctcctgttcggcgagcttatccgcgtcgtattttttaatcgcgtttacttccgtttcatctatcacgcccgaatacagtctgaaatcggagatattcggatagattttcgttccgtcgctcaattccgcattggcgtggccgtcgtcccagccgccgagatgggactgcgcgccgatcgtgaagccgtatttgtcgtgaccgccgaaggtaagcgtttcggataacgaagccacggaagaaaaggcgtaagtttcatccccttctttggaagcttccactctgaatttcttttccgcttcgttgtaaatcatattgatgcgataccaggaaaaggtggagtcgaaaagcgccgtttgattttcgtccttttgaaaatcgcgcactttatcgacgccgaagccctcgtatacccaattgacgccgaagtgagagccgtaactgcctgttgtaaaaatatagtttccgccgccgtggttactgcgcgcataaatgcgcatactcacggaaaaactgcccttgacaagatcggaaaagtccgtatagacgtccccttccgttgctccgagcgcgggcgcatataagagcccgttatcctttaacgccacgccgccgttgatgttgtccagcgccacgtttttcgccacgaggtcgtaattgccgagcgaatctttgccgagatcggcttcatcctcgaacgcataccacactacggaattaaatcccgtttcgggcgcgacgatgtccgcgggcgcttccgcttttgccgcagcaaaaccaagtcccaatgcggcgggggccaaaacggagaacgccgtgatcaacgctcttctgatacgccccgaattttttgaaaataatgtcatttttaaacctccctacccgtcttcactgttaactacacttaatttttaaatgtgtttctattttattatgtaaactgtgttttgtcaatatctgcgggaaaaagtatatctctaatttttacaaaaagtatcaaggaaacgtttaaacttttctctccgcgacgaaagcgtaagcaaggttattttgttttttcgccttcgtatttacactcgacggatcggcatttcgcttcttttttccctcgattttcgcttgaaatgaagcggagggcaaaagttttctccttttccgacttttgaaagaacaactttcctaaatccacaatcattcttctacctttctcgtttccctccccgccatttacgcccctgataaaagcgccggaattttatatcgcgcaatcctgacctttcctgattttttcgcccctcctcagacgcggacccgccaaaaacgcgccgatattcgatttttacataacggacgccggcagcggcaatttcggattcgggctttttatcgtaaaatcggaaacggaagtcctgaacggcaggcttgtttacgatagaaaacagagctttttttcccggtcctgtcctccgggttttagaaaaaatttttttggcggtaaaaattttcccgacttacttttcggaccgtatcgccataaaaatattttcttctcctacttatagagttccacacaaaaaaagagcgcaaaagcgctccttttccacttgacgtatatgtcacattttctaaaaagtatctttcaacaacggataccttttatatctctcctacttccttttatactcttgcgcccgttcccgcattcggctctatcgcttcctttacacgcacgatcctacccgccgcctcttccagcgtttcgtattccccgcagcccgccatcgccaatatccttttcccgaacgcggggctttgctccgtttccaaattttgtacgggaagcgaccgcaccttcgacaggattcgcccccatacttggctccttccccctccgcaaagtttcgtatttttcggtcccgctttgcccccttgcgcggctttccgacagtctttccgcgcaaaaaccgctcctttcatcaccgctttgctcctttcgccgctcgtcgtgacgctcagcccgataaacgcgccctttgcggttacgtcgttgtgcgggctacgctctcccatcagggagagcaaaaaaaatcactccgttcaccttcgtcttctctatctctttttcatccgcctcgtaattctttgagttcaaaatctcttccggtccccatttccgcgacgatgccgtcgaaataaacagcacttctcgcctcgtcggtatacacccacgcaaacggggtttcttttgcttctcgttattttccgggcgaaatcgcagaccttttcccttttcttatttccacgccggtcagtccgccattcccaaacgttcttcatcaaaaaaagaaggagagtttttccccttctcaatcttgccatctctcgtcatacgtaaaaccgataagaatctttgccttcgtttttcacgcgataaagcgccttatccgcccgatcgaacacctcggtaaaagagggcgtatcggcggtcacgccggcaatgcccgccgaaaaaccgaagctgccgttttccaccagcgtttccgcttccccggaaaattctcgcctaagcgtttgcagcaatatttctatggtatcctgtttggttgcctcgggataaaagacggcaaattcgtcgcctcctacccggccgatacagccgcccttaaagatatgtccgagtagcttagcaaacaattttaaaatggaatcgcccgaaaggtgcccgtatttatcgttgaactgtttaaagttatcgatatcgaataaaacaagaattccgccccgattttcgtcgagcttttgctgaacggcgttgcggaaggattcgtgattgtaaacgccggtcatgaggtcaagttcggaacggcgctgaaaaagtttggcgagcgccagcgcctcggacgcctgctgcgcgatggttttcggataaaattccccgttgctctgttcggcgttagggacggagtgatgaaggtgcaccagcatccatatttttcccctgcggcggaacaccgcgctgaatctcgtatccatatccacgaggacctgcgtgtctttctgcggaagctgccgcgcccacagcccgccgtatacgatataaacgtcgtccgtcacttttagggactcgtaccattcgtccaggacctcgaaacggatactcgccgcttccaactgatttttttgaagatcgcgcaccgcgtgcgccaaatcggtgaaaaactcatgcttgcccgtaccgatcatgacgagattttcgggacataatttatacagttcttcaaaattttctttcgtaggttccagcagataatactgccagatccttttcgtcaaatcgcacagatattcgcccgtttccataatttgcccccggtttccgtttttcccgtcgtaggtacgttttatgcacgtgtatacatattatagaccttttttttcgatcggtcaaggtgaaggaggtataaaatccgcttttcttttcccttttctccccgattcctcttgaatcgcgaaaacgacgctttcttttcgggcactttcgggtcctttgtgaaaaaacagcttctcgtcgagcgttgttttttcttcgctcgcccatacagcggcgcgctgtcacacgcttaacccatttatattctcttcttccgattcgattttattcaaaaagaaatggagaaattgacaaaatacggtttgaaggcgttttctgaaaaatcgagattttccgtaatatatcccaaacggtttacctccgcgacggcattcaccgatcgatgggtcatcagctgataatagccgaccgccgcattgaagtatgggaacaccaccgaaatatcgtttacgttcacctcttcccccttgggtttgcagtccgccgtaaagatctgatttaagaaatccgccgccatgtaggaaacgtccacaatcaagctgcttttttggttttcgttgcggagggtcatcttgcagccgtctataaaaccgcccgaaaaacggttctcccgcgaatccgtttcgtcgtcgtacacgagcgcgcacgtgccgcctttcaatcgatacacgtaataaaaaccgtagcctccgctgccgcccgactgagccgaataaaaaataaacggctctcccgcgacgaaatcgtataacttgacagagggatcgaatccgtaatctctcgtcggcgtcagggaacagacgggtttcgccgggtttttatccgcctcgaagacgtcgatttttatctgttttttatacgtcgttccgacgccgctgagccgtatttcgtaagcccgcccgtctacgaccgccgtctgacgggaaaaaacctgccgtccttttccctccgcctttgcgatcgccgcgccccccgcgatcggacagacgactaagtataccatcgttgtaaaaagagccaaaatttttttcatatcgtcagtatgtaccgattttcatcggaatagacatcaaaaaatattttttccttccttttccaccgaatttcccgcggacgggcggcggtctgcccctgcaaaacgcgcctgccgtttttccttatttttcaagtaaaaggtcgagccgccccgcgccctttgcgaggtcctgaaaaacaaacgctttgtccttaggcgcgccgttgcgtgcgggaatccccgccggggtggggtatgctctgttttcgtcgggatcgtaaaaaagtccgaaacgggagtacgttccgtttccttcaaagcaatccttttgccccacgtcatacatcttataataatttaccgtttccaaaaagggcagcttggccgccgcctcaaaaaacgaacgcatcctctcggcggctttcttctcgcccgctccctcgtcgttaaaacccatttccgtaaaaaatacgggcagccgccgtccgtccaatcgggtgaattcttcgtaatactcaaaatttttatctataaaataagactcgtcaaattccgtccagacatagggatgccagcacatgatctgaaaatattgttcggggtccctgctcgcggcgctcttctcttcctttccgtataaatatccgaagtttccgctgtgcatcttctcataaaagacgcgcaaaaagcgaaggaaattccccttgccgagtccctccggctcggtcagaccgccgagtacgactttcgaggcgggatttgccgcatgaatcgcccgcgaagcgtaatacaacacgtcgagcgcgatttccgccatctgctccacattgtaaatcttttcgccgttgacgccgcaaagaaaatcgggattattcagctcgttgtccacttcccaaaccccgatttcgggaaattcggacgcgagcgcgaaccacgtttcatagtagtcgttcagccattttatatatgtgcttccccgccgtatatcccgtgcgggcttgccccagcggagcgttcccccgttgaaattgcagtgatttagcccgatattcgccatcttgtaatctttacagcgactcagccattcgtgcattaaagaggtacggggcgcgtcaaaagtccttttatccttcatgaggtaggtgcagtgcatccactgccgaatcgtcttgacgccgagatttttcaaaagttccgcctcttcctccgcccgaaaatttttccgttcctccaacagatagcacattccgaaaagatttttcttttccattcccgttttccctcctgtttttgtatagaatatcagacaattccccttccttcaagcgcttttttgaaaatcctccgatttacgaaaaggtatctccgatttttcaaatttttttaactttccaaattacgcacccgtattgtaaaaggcagggagattttttctccccgcccttctacgcgacgcaatctttacatcctgcttttcattttcctcgacagcgccacggcggcgcccttacgccttacttttcactttcatcagccgtaccacggcggcgcgttcgttttcgtccagtttgtccttgatatacttgatcgtttcttccagctgcggaatcatgacgtattcgagagcgttgacgcggcgtttgttgcgctctatctcgtccgccagcatcctcaccgccttttccgtttcggcgagccttaccattttcggaagcagcgcggaaaccataccgacggaataatccgcttcgctggtgatttccgcgtaggcgtaaggcagaccgtccgcccgtttttccttgaccaggtccaccttaggcacctccacgcccataatgctctctgtgccgcagtttaccttcaccgccacggagggcatggaaaacgccgcctccgcttcaaacgcaggcgtcaccgaacgagcgacggaaaattgcttcaacgtgagggaaagttctttttccacctcgtcccgaagccgtttgtcctctctgatgatgaccgtaaaccgccgcaccatttcgtccgatttgtctttgaggagcttatgcccccgaaccgcggtagaaaggcgcgctttgagctttttcagctccatgcgggtaggattgacgttgagtcttgccatgtgccttattcctctgaatcgtctttaacgggaagatatttgtcgataaattcctgacggatacgtttgagttctccccggggcagaatcttcaaaagtttccagcccaaatcgagcgtttcctctatcgtcctgtccgtatcgaatccctgattgatataatacttttcaaattcttccgcgaatttcgcgtataatttatccgtatccgacaaggcggcctcgcccaaaatagcggaaagttccttgctttccttgccgtgcgcgtaggcggcgaacagctgattcatcgtgtccgcatgatcctccctcgtctttccccggccgatccccttatccttcaaacgggacagggaaggcagcacgtccacggggggattgatgccctttttatagagatcgcgggaaagaatgatctgcccttcggtgatatatcccgtgagatcgggaatggggtgggtcttgtcgtcctcgggcatggtcagaatgggaatctgcgtgatcgagccttgctttccgcgaatcctgcccgcgcgttcgtacaaagaagcgaggtcggtatagagatagccgggatagccgcggcgtccgggcacctctctgcgcgcggcagacacttcgcgcagcgcctccgcatagttcgtgatgtccgtcatgatgacgagcacgtgcattccgcactcgaatgcgagatactccgcgcaggtaagcgccatgcgcggcgtggcgatacgctcgacggcgggatcgttggcgagattggtgaacagcaccgtcctttcgatggcgcccgtctttttgaaatcgtccacgaaatactgcgcttcctcgaaggtgatgccgatcgccgcaaacacgacggcaaatttggaatccccgcttttgaccttcgcctgccgcgcgatctgcgcagcgagttcggcgtgcggcagaccgctcatcgaaaacacgggcagtttctgccctcttaccagcgtattgagtccgtcgatggcggagatgcccgtttggataaattcattgggatagtcgcgcgcggcgggattgatcggctctccgttgatgtccatcttcttttcgggaatgacgggcgcgccgccgtcgcggggattgcccatgccgtcgaacaccc

SEQ ID NO: 1590 - DNA, 3612 bp, Unknown
  16S sequences of unknown bacteria
tgtcaacaacttttttcaacttttttatttttgtttatcggtgctgttctcatttctgaggtttgcatccggctttttccgtgtctctgcgtgtcttccgcagcgacgtgttacataataccaccacctttctcagatgtcaacacttatttttgaaatttttcaaattttttgtattttatattttgtatctattttttatacattttagactatttctcattaactttaaatcctgcgaaagtaaccggcgcacactctacgtaacgttttgaactgaacatatgcagaaaaatgctgccgcatctaaagtcttcttagcctttgatgcgacagctcctttttcaatactctccataaatatgctgtcttatcgctgttgatccgctgtcatttttcaggcttcacggttaattttttaaatagctgaaaaatgttttacctttttcccctggcttccctcaatttgctatcatcgattattattcaatgccattattcttatcctatattcctgtttattcttttttgactttgcacgcaaagatatctctgttgtgtttttaggcaatatctgaccattttttaagcttacactctttcctccataaatattttttagatttggataataatacgcatatgcattaattaatacaaaatccgaattcattttatatgtaaattttccattaagtatttttcttttcagcccaacagctcccgatttttgaagtaacggcttacaatcaagtacacctatctttatgcttttaaaaggattttcccatttatatacagtatacgtacacaccttcgtgtatgtttttttattaaccgttacgctcaccttaattttagttgttcccggagataacggcgtagttttatagcctgcataataattcttttcatatttataggcgttcgcttcgacccttgcaactttcggattagaacttttggcactaatagtaactttggaagaatactccggcgtaagaaaatcatctccgtaagatccccctaccttatgaagtaccttgccgtctttcgttggcattttagccagcggatttgccgccgcctgaactgttatagttgacatcaacagcaaaaacagtatcccaaaaaccttcattattgaaaatttacttttcaaacatcttttctctgtcatccttttttcctcccatcaaaattataaccgactattttcttttgcgcattacgcagtctcttccattcatctcctttcaagctgcctcgatatattaaacagctaactataatatagcaattttctttatagaagcaagatgtggcaagctttgcggacatattttttctaaaaaaattcaccgcagctcttctttgcaaagatcatgcgatgaattttccttactccttcgtcttttcattgataaactgaagcttcgtcttggaatacatgatcttctggctgtgataaaggccaaaataaccggactccagatagccgaccgacaccgcaatcagaaaaaacggcatacagtcaaatccaaataactcaaagctcagcagcagcgaggaaatcggtgcgtttgtgacaccgcagaatactgctgccataccacaggccgcagtaagtgacggggaaatacctgtggtctgtccgaacagacagccaaatgtcgcaccgacaaacaatgtcgggacgatctcaccgcccttaaacccgcaggacagtgtaatcgccgtaaagatcatttttaataaaaaggcctccggcaccgtttctccggaaattgccttctctacgatattcatgccggttcccagataatctgtcgtatgcaaaagctttgtgagcacaataaccaatacaccgccaactactgcgcgcagccatgcattttctatctttgtcttaaaaaagcgctctgtccgatgcaagatctcgcagaacagtatgctcactcccgcgcacagcagcgccagcagaacaatgagaacaccgtttttcagatcaaaattcactgatgccgggatggtaaaatgttccccgtgtgcccccaccatctccgcaatctccctcgcaatcaacgccgaaatagcacatggtacgagcgctgcatattccataattccgatgctaattacttccattgcaaagatcgccgcggtcaaaggtgtcccaaaaagtgctgaaaaagcagcactcataccgcacataatcatcgctttctggtcatactcatccagcttcagccattttccgatcgtcccgccaaggcttccgccaagctgcagcgccgcgccctctcttccggcagaaccgccgcatgcgtgcgtcaggatggtagacgcaatgatcagcggagacatgcgaagcggcacgtattttccggactggattccttccagcacacggttcgtatcgcttttatatggatcgaatcgatacattgcgacaatcaccagaccggcaagcggcagcagatacagcatccactcatgtgtctgccgaaatcctgtcacaattgtaatacagcggccgaacagcccagccacaaatccaagcaccacgccgcatacacaggccagcagcagccagcgccccagtatgtatactctgcccacacatttttttacagattccctgataaaattttccatgattctccctcttcttctcttctttttcctttgttccaacccagaaagtgttgagtactttacgcccccgcatacgcatccgcaatccgctcacagttctcataaaccacagagctatcatcccaataactaaatgcaagcagcgactgtgcatccagcagctcttttccgatacctactccaagctttctgtcaatccgcgccgcaatgttgtcttccgctccgcttaccagatcaaccacaagctgtggatctgcctctatgacttttccgctgtaaacagccagatcgccataggtgctggtatcctcatatgcctccccggcatcttctagcacagcttttgtgagtgcctcggtaagtccctcataaaatgcattgcttctcaatccatttgtgtcgttatagaaatccacaccgactgcgtgtatcatctcgtgaagcaccgtatggcgcatccgcgcatcatcctctttgtactgctccaagtcctcctgattcagaaaaatttttccggtaccgtctgagaaaccgccgatcgtttccggaattgcatcggaagtccagatctcgatctccttcattttttcgagcaaatcaatctgatacgtcttctgaaaataattgacaagaagctcccgcgcctcaaagatccagctgtaatcggattcctcaagcggcgttccggcatcctcccactgaacgctttctgtatacagatcctgcatctcatccaggtcttcctgaaggctctctgcatacatgctcagatcatttaactgcagcctgctcatctgcacgcccgccatgctcaaatcagtgtctgtttcctgctcgcatgatgtgctcagttctgtctgactttccggcccggctgatatgctcagttctgtctggtttccttcctcagctgatatgctcagttctgtctggtttccttcctcagctgatatg

SEQ ID NO: 1591 - DNA, 32759 bp, Unknown
  16S sequences of unknown bacteria
cggatagggtttgcagggccgcacagtctcctgtgcgccggtgagctcttacctcgcctttccacccttactgcggggaagccccgcagcggtatctctctgttgcactttccctagggtcacccccggcggccgttagccgttatcctgccctgtggagctcggactttcctcatgcggttgcccgcacgcagctgctcagcccgctcacccgattagtgtaaagcaaagcggctgaaaagtcaagaaaaagcgggaggcgccccgcctttttcccgcgggaggtctcggccgcaaacggcgtcggttacaatttccgccgcatcagccggtggggcacatggccgtctaggtgttcgccgccgcagacggcaaacccttgcttttcataaaaggggatcacccggcactgggcgtccagttccgccgtttccgcccccaattctttggcccggcggcacatctcccacaccagccgtgcccctagtccccggccgcggtaagcgggcagggcggcgatccgccccaggccgtaaaccgccggcgccttttcgtaaagccgtccggtggcaaccggctcatccccgtcgtaggcgataagatgctgggaagcggcatcctgctcatccagctccatatcgggccggtacccctgctcgtcacaaaacacacgcagcctcacgcggtacgcgtcggacaaatccccgtcccccggccgccatacaaagcgaatcgtctccaagctatcggctcccttccgtacaataagaaccagtatcaatagcctgaaacagccaggccattgatactggttcttattgtaatgggccgaaaaacgcttgtcaaccgggcgcccgcccttaagaattcccgcctttattcctttttcagggcggtggattcccggacaatcaaatccggtttaagctgaatctgccggcagggcgtgcccggcgtctgaattttttctatcagcagttcggcggcgatgcttcccacccgctgcccatgggtatcgatggtggacagggagatgggcaggaactgggaaaccggaatgttatcgtagcccatgacggccacatcctccgggatccgcagccccgcgctcatcacagcgcgcatgacggcgatgctcatataatcgtacaggcagaaaatcgcgtccacccgctgctcccgcaggagagcagcggcggcccggtggatatcctccgtgtcctgggtgcagaaccggatgagatcgtcgtcccgctcgatcccatgaaacatcagggcgtcgcggtagccgttgatgcggctttcggcctgccgatggtcggcaacggcgcacaggcagccgatacgccggcggccggacgtcaccaggtgatccgtggccatatacgcgcccatacgattgtcgcatttgacatagctgacgggatattcctgcacgccggtgctgccgcagagaaccagcgggatgctttcgtcgctttttccgcagataaaccgttcaaaaatctcatccacaaaggtgggaaacaccagtaggccgtccactcgccgttcctgcagcatctgcatataaaacatctctttatccagcgacagatcggaaatgcctaaaatgatgccatagcccttgctgttggcgtattcctccacccccttgatcatatgggcgaacaaagggttttccatattgggcacaatcaggccaagcaagttggtgaacttgctgctcaggcttctggctgcaaaattcggcagatagcccagcttttccaccgcgtccaaaacgcgctgctgcgtggaagccttgattttatcgctgttttgcagcaccagggataccgtcgctgtcgaacagccggcctccttcgccacatcatagatagtcaccttcgacatatgggctcctccttctccgcagcaggacgtccttctgcaaattaaaacggttacaagatgattttaccaaatacagggcgattgtgcaagtcttatgtagaaacggcgaagacacggcgaaaaaaggcccccggccgcagttttccgccgcggccgggggcctgttccctcatcatttattgaagatggcattaatggccgcgtcataggtgccgttcatagcggtcagcgcccccttgacggacgtggtatgcgcatagatactctccgccagcgccacgttgaaggcgttccccaattcgtttaccgccgtgccgggatcgtaggtggccttttccaggcacaatttgtacatgtccaggctcttttggtcgttggtctggaaatagtcggcctgtatgtcgtcccagtaatccaggcccttttcatcgcccaacggccgggccagcgcattgaaaatcacggcgctcttttcataatccttattggtgcggatcagcgtaaagaggcggttgttgcgggaatcgctggtataatccttggcgtccgggccgatgggatagggcaccatgccgtattccatgttggtgtcctgcgcgccggccttgatctgctggttcagcacccaggactcatgcagcaggaacgcggtcttccccttcaggaactctttgaccggatcgtacccgcggtagacggcgtcccaggtctgcgccgtgcccagctgcgccccgttggtgaagaccaccttgtcggtgttcaccaggttatacagatacgtcatggcgttgatcgccgcgttggacgagccggtgaacgaggccttgccggagctgcgggtgaccaggttggcgccgttggcggtcataaagccgttggccatgtaatccggatagccgacaatgccgtaggtctttttgccgctgtcggtgcaggccgcggccagggttttcagcttctcaaaggtccaggtcttgttcttcaccgcgtcgtaaatggtgtcgggattgattttgttggctttcaggagggtcttgttcatcacgatgcagtaccggacctccggcggccggtagaactgcaggccgtactgcttgccgtcgtagctgcccagcttggtgccgtattccacccagcgggcgtccttcggatcgatcaaggagcatttgctccagggcgtgatatagcccagctgcgcggcgccgaccatctgaccgggagacagctcgacgatatcggcaaacttggaattggccagcacataggtcttgatggtattgagatcgggatatgggctgttcagaattttgattttgcagttgtactgggtctgcacttccttaatacgctcaaagagctgctcctcaaacagcgtggagttgctggccagcttctgcggcaggaaggaggacatgatcgagaaggtgtagccgcccatgttgacgacggtgtccttggccagcttgccggccgtggaggatcctccccccgaggttgtgctggaggtctgcccctgctgcccgcccttgctgctggtgtccggcttctgcggctccttggaagagccgccggacgtatccgaaccgcccgatccctcgctgacctccgaaccatccggctgggaggcgacatcggagggaacgtcggagccgtcggaataggacgcgtcggacacggcgctgccctccgggccggacggcgcggcggagctgctcggatccttgttgctgccgcaggcggaagacatggccatggtgacagaagccgccagcagtacggcaaacagccgggatgcccgtgaaagattgcctttcatgtatgtaccaccctttctgagtcgccttgcgaaacggtttaacgaccgatagaagccggcagcttcggccttgtcggaaagctccatcgacgccgtccttttgcaagggcattatgaccaacacagtctgtcacttggacacttttgtgttcaaagttattatatagcggcaatctcgctttgtcaataaatcggtttaataaattctatgtttgtttatttgcacaattttatatgtaattatttaatatatacgcgcaataattatggtaaattcattaaatggcaatttttttgtgtattttataaggatttgtctatatattatctctataggattttatcaataaatcttatcacaatcgcaagaatttagaaaaaaccattgacaatccacctttttcggcctataatatggctattaaatcgtttaaattaatgcggcgcaatgttccatgcggagagggatgacgacttgcataagaatgggatcaacggccgggcggtatgcttttggagctggaacagcgatatggccgaggaggaaattcggctccagatggaggagtttgcgcagggccgtttcggcggcgtgatcattcacgcacgcgccgggctgcgcatcccctatatgggggacgcctggttcgccgcgttccgcacggcggttgcgcaggccaaacgcctcgggctggaaatctacatatatgatgaagatggctggccgagcggtttcgcctcgggccgcatccccgaattgggggacgcctactgcttcaagcggctggagcacgcggccagcaaccggtggggcgatcgcctgctggcggtttaccgcggggacgcgaaggcgggctaccgccgtatcgccccggcggacgcgaaggagggcgatctctttttcggctacaccatcgatcggcattatgtggatcttctgtacccggatacggcgcagaaatttctcgaattcgtctacgagcgctatgcggctgaggtgggcgacgccttcggcgaccccatcaagggcgtgttcaccgatgaaccgcagctgaactgcgccggctatccctggagcgtcgggctgcccgacgcgtttgaaaaagcctatggatactcgctgtgggataacctgtggctgttggccgcggactgcggggagtaccggcggttccgctacgagttctggcagctggtgggcgatatgttccggcagaccttcaccctgccggtgtcccagtggtgcgagcgcaacggcctggtgatgacgggacacttcgcctgcgaggacggcctgtgcgatcagatctccagctgcgggggcatcatgggccattacgccctgatgcagctgcccggcatcgattacctgggcaaccgggtgaccagtcccgtgctgatgaagcaggcagccagcgtctcccggcagttcaacggcggcgaggtgctcagcgaaaccttcggctgctccggctggggcgtcaccctggcccgcctggcctggatttggggctggcagtcggcactgggcgtgaccaagccctgcttccatctggcggccttcaccatggagggccgccgcaagcgggactaccccgccttcttttcctatcaggagccttggtgggacgtgtttccggcctttatgacatgggtggatcgccataacgcgctgatgcgggaaggcgaacggctctgccgcgtcctggtcatccctcccatcctcggcatgatgtccgaataccgcgaggcctccggcaaccgagagcgaaatatgcgccattccagccagttccgcctgctgctggaaaacctgctgaacctccaggtggattttgaaatcggcgacgaaaacctaatgcgccgcttcgccgctgtggagaacggtcgcatccggctggggaactgcgcctacgactgggtgtttgtggcggacagcgattacaaccgctccagcactatgaaactgctgcaggccttcgccaagcagggcggccggctggcgtatgtcaacagcatcccggacggcgccgaggaaaacacggccgattggccgggcaccaagctggtgcagaaccgccgggacatgctggacaaatatctgcggtacgccggttttccccgaacgctcacccttctgaaccctcggacgctgacggtcgcctccggcctggcggtgcatgtccgccgtgtggaaaaccgtctgcggatccatgtctggaatatgagctacgaccagtcctgccacgcggttctcgaggtgaagggcgacctggcggtttcccggctgaccccggagggcggctgggagacgctgccccgcacccgcggcggcagccaagcgacctatgtgccgctgcgcctggccggtggggagaatctgctgctggaaacgggcgaggccgccgaaccgccgttgcttcctcccgtttggtccgtcgacggcgtggaaacggcatcggtttccctgacggataagaactgcctgaccctggacagggcgcggttcgccgtgggaagcgacgccctgtcggaggaactgcccgtggtgcacatagccgatcggctgtacaaggcggcggagtcgcagccggaggccgacagcgtggtgctctgctatcaatttcattgcagcggcgatttcgttcccggtgagggcagcacgctggctttcgaaaccagggacaacatcggggccaccctcaacggcggggatcttctcccccggcgcaccggctggtggatggatcggtgcatcggagaattcgacgcgcggggcctgctacggccggggcgcaacgagatccgcctgacctaccggctgcggcacgcgggcaccgccgcccatgtgggcgaggtattcgaaaccgagcgcaaccgctttttctatcccttggagccggataacgtctacctgcgcggggattttgatatcgaagccgccggaatcctgtcctccacccccggcttccactccctgcaacaggcgcgcttcactgtgacccctccgacgcccaaggtctggaaggatttgacgccgcagggcctgtggttctaccggggcgacgcggcgctcaccttcactgtgacggccatccccggaacgcgcacgattctgtccctgaaggatctccatgcggccttggccgtatgggaggtgaacggccggaccggccccctgtttcaggcgcccttcgaggcggatttgaccggctgcctccagcccggaaagaacacggtgcgcctgcgactggtgggaaccaaccgcaacctgctggggccccatcaccatatcaacggagaaaacattttcgtcggccccagtaccttccggggagagcggggcttcgaggatttcgtgtccccttggatccgcacagacaacacctggacggacgcctatgcgttcgttccgttcggcgtcggcggcatcgagatccggcgctgcgccgcccccctcgctctcgagcaggaagcgccataacgttcagagcagtacgcacacggccctattatccggcctgtacgcaggacggtgaacttaccatacaggaggatcttacatggaaatcatcgataacagcgcacttaccccccgctatctgcccgacgatcaggtgaacatggagggctggcaccccgattgggtgaaatcgttgattctggcccagctgcgtgtggaaagcgccacggaggagggcaccttccaggcggccgtccgggtgctcgatcactatcaaaaaatgggcgtcaacgccgtctggctgacccctattcaggacaaggggcaaaccggaaacggctacagcaacatggggctgcacacggtcaatccccgcctgaccggcaaggacagctatgaggagagctggcaggtggtcaaatggttcgtggacgaggcccatcgccgcaacatccgcgtctatatcgatctcatcgtctggggcaccgtcaaggaaagcccgctggtcgccgagcatccggactggtacaagggattcctcaacgtctgggacggctacaagtggaactggtacagcgaatccctgcgggaatggttctgcgattgggcggtgaaaatcgtcatggagacgggaatcgacggctaccgggtggatctggagcctttcgtcaccggccacgccatgttcgccgggctgcgcaagcgcctgttgtccatgggccgcaagatttccatttttgccgaatgcaccagcgagcgggacgaagcctatgatttcgacgagcagatcaccaacgaggatcccgaacgctggaacatgcacacgatgttcaccgaacggctcaacatcgtggacgccgtgcgcaacggctggggccacggcaccatttacgcccaggaaagggacatgggcggccgggcgcgcttttactgtttgtgcctgtcctgccacgacaatccccgcccctgcatcctgggcaatcgggtgacggccggctacggggctgtcctcgccccctacattcccctgtggttcatcggcgacgactggataaaccccctggagcccggccgcgccatgttcaacaacgtcatccgctgggatttattggaacagccagaaaatcgcgcctttcacgaggatttcaagaagctcatccgcatccggcggcaatatcccgccatcttcgactgcttccccgacaaccatcgggacagcaacatcgccaaggtggaatccaactgcggcctgcaggcctacgcccgctacgccgacggccgggccgtcctggttctgccgaactacgccgattcccctctcgaggcgcaggccgctttcgatcccactgctctcgggatgaatcccgccgacggatacgctttaaaggaattgttcctggacgagcagccggtgaagaccggcgcgagctccttcaccaccgtcattccgccccaaagcctggcggtcattctggtggaaccgctctcctaataagcggcaaaatgaatccaaccactggatttcctcatcactcacctagggggcgtgaccgtgtacccaacgatacatatcgcttgcccggaacagcctcaaaccatccggccggcgctgttcggctgcaacctggaggtcacccgccgcaccttttgggcggggctcagcgcgcagatgctgaacaaccggaaattcttcgccggcaccgaggaaccctgcgcctggaagctggccggggatgccgtctacagccgggaggaaaccggttgccgcgtccgcctggccggcggcggcagcgttctccaggacgtttccgtccgcccgctgtgccggggccgggcttaccagattcgagttctggccgcggcgcaaggggatatcacgctgtccgccgaaggcggcggcatctccgcagcctggacgggcatcggcggcgaaccgcagacgctgacagccaccatatcagcccccggcgatcgggagtgcttttccttctgcctgcgggcagaaggaaccggcgccgtcaccctgtacgccgtttctctcatggaagcggatcatttccacggcatgcgccgggatgtgctggagcgcctgaaggagctggcgccggctgaactgcggtttcccggcggctgcttcgcggaggtttaccggtggaaggacagcctgctccctcccgaccagcggcccccggtacagccaacgttgtacgaaggcgacttccttctcggagacacctttggccaggactgcatggatctcggtatcgacgaattcatggcgctgtgcgcctatgtgggcgccgcaccggttctgaccgtacctatgataattatttccaatcaagacagtatcgatctggttgaatactgcaatggcggcccgcaaaccgcctggggccggcagcgcgcggagcggggccatcccgctccctatgccgtgagggactggtacgtgggcaacgagctgtattatttcggccggcggctccgggaggatccgtctctggcggcggaggaaacccgcgcgctggtagcggccatgaaagccgttgacccgtccatccggataatcggctgcttctgcccctcccttccggaatggacagcgggttacctgcggggcgcggccgccgtcctggacgccctgtccctgcatttctatctgaccgatccctttgcgccgaaccgtcacaccatgtcggacacggtgcgcgcccgcgtcctccccgacgccttcgttcccctgctgaaggagggaaaacagctggccgacagcctgctggagcagtctctccccttcagcctggacgagtggggttacaactggggcgatcggggcacccccgtctccatgacggtggatgccctgctgctgacctatctgtgcgcccatgccgacgactggggcatagaaaaggcgctgtatttccaccccattaacgaagggctgatcctcgcggatcccaaagaggcgcggctggattatacgggccgggtgttccgcttgttcgcggggcatcgcggcgcgcagagactagaggcgaagggcgccggcgacggcctggccgccgcggccagccgggggccggagggcctgctgatcaccctggtcaacgccgaccggcagaacacgcagaggttccggctgaccggtgacaggctttccgaggggaccgagggccacggcgtcatactgacggctggggaaaacggcccggaggacacgctcgtttcctggcgcgtgggcgacgtctgccccctgccgcccggggcggtggccgccatacactttttgcaggaagcttgaccaacgattcacaaggaaaggcgaggtatttggctatgacgcagcgtaggaaccatcccttacgtcgatggaccaccggcctgacggcgctggcgcttctgctgtccgcctatggcgccggcggatttcgcccgcaggcggaggaaacctcttccctgtccgttccggacgccgaaagcgccgcggcggagatcccttcctatgccgattaccggcagcgtcaggcccctgcgccctccggctcttttgttctggaggcgggcgccggctataccgccgccggcgcgtcgccggaaaaacggtcggatttttccggccagccgggcgatgcccttctgttgcccgacgagggctccgtcacctggagcttcaccgtggagcaggaaggatactacacgctggaattcctctactatcccgtcgaaggccagggaaacaccatcctgcgggacatcctgctggacggcgccctcccctttgccgaatcggaggaagtggcgttcgagcgccgctgggtgaacgtggaccgggagagcttcgacggcagcggcaaccaaatccgcccccggcaaaaggaagagccccaatggctgaccgccgccgcccgcgcctcggccgacacggcggccggcccgctggaatattatctgtccgccggccagcataccttgacgctggccgccaagcgggagccgatgctgctgcggcggatcgccttccgtcctgccgacgcggtgccctcttacgagcaggttctcgccgcgtatgaggcgaagggctaccggccggcctcggcctcctccgcccgcgtaatcgaagcggagggcgaatcgatcaaatccgatcaaagcctgtacccgctgaccgaccgcacctctcccaccgtcaccccgtacagcgcctccaagatcgtctacaacgccgtgggaggcgcgcagtggaaaaccgtgggccaatggatcgaatggccggtggatatccccgaggacggcctgtacgaaatcgccctgcatttcaagcagaacttgaaaactgacgccatgagcgtgcgggagctcaccatcgacgggcagcttccctttgcgcaggcggacagcctcaccttcgcctatgacagcgggtggcagaccgccaccctgtccgacgacaagggaaccccctaccagttttatttcaccgccggcaggcacactatccgtctgcgggctggcctgggcgcttaccgggatattttaacgcagaccgatgcctgttccgacgagctgaaccgtctctaccgccagatcgtcgtggtcaccggaggcgaacccgatatctatcgagactatcagttcgacgtcctgattccggatacgctcaaggacatggaggcggcctccgcgcgcctgaaggcgctggaaacaagcatccgcgcagccggcttctccggcaaccaggggacggacgccatccggcggctgtacacccagatggacagcatgacggcagatcccgccgagatcgcccagcggctgcggatgtatcgggacaacatctcctccctggccacctggcgcaactccatgactgagcagccgctgaccatcgaccggctgttcatcggcccggccgggatggccctgcccaaaggggaggccggcttcttcggctctctcaagcattattttgaacagttcttcgcctccttcttcaacgactattccgccatcggcagcctgggcacggaaaccgacaccgtcctgacggtttggatgaccacgggccgggatcaggcccagattctccggcagctgataaacgatcggttcaccccgcaaacgggggtgggcgtgtcgctgcagctggtgcccgccgacgcgcttctgcccgctctgctggccgacaccggaccggatatttccctgggcatgacccaggccgatcctctcaacctggctctgcgccacgcgctgaccgatctgtccgccttcggcgattacaccgaggtggccggccgattcctgcccgaagccatcgtccccttccagctggccggcggcatttacgccctgccggaaacccagagcttccccatgctgttttaccgcaaggatatcctggccgagctgggcgtggcgacagaggacctgaacacctgggacagcctgctgcaaaaggcgctgccggtgctgcagaaaaacgccctcaacatcggcgccgtgctgaacatcaacacctatctgacgctgttctatcagcggggcggcaccctgtacaacgacacggaaaccgcctccggtctcgacacgcccgaggccatcgagagcatggagctgtacaccatgctgtataaccaatacggcctgccctatcagttcgatttcgccaaccggttccgcagcggcgaaatgccggtggtgattacggattatctgtcctataaccagctgacggttttcgcccccgaaatcaagggcctgtgggggatgcttcccgtccccggcaccgtccgggaggacggcaccgtttcccatgcggcgcccagcacggtgaccggcgcggcgctgatggcttcggcgccggatcagaaggcgggctgggagttcctgaagtggtggaccagcgcggagatccagtccagctacggccgggatctggaaagcgtcgtcggctccgccgcccggtacaacaccgccaaccaggaagcgctgaacagcgtccaatgggactacggcatcaaacagcagatcaaggcccaggcggccgaggcgctggccgtgcccgaggcgcccggcggctacttcacctcccggcaattcgattttgccttccgcaacatcgccttttacggggacaacacccgcaccgcgctggaggaagccgcccaggccatcaacaaggaactgagcaaaaaacagaaggaattcggtctgaccgtcggcacctgacccgccggctgtccgcccattacgccgcagagaaaggaatggtttccccatgaagcgtatccagggaaggacaaagcgccgcgggcctctgcggcggtatgcggaggattacctgttcatcctgccgtattacctgatttttgttgtttttaccatcctgccggtgggaacggccatcgggctgagcttcacctatttcaacgtgctggaggccccctcctttgtgggcgtctccaattatgtacagctggtgctggacgacagcttgtttatgacggcgctgaaaaacaccctgtttttgtcgctgatcaccggcccgctcggctatctgctgagcatcgcgctggcctggctggtgaacgaattcggcgccaagctgcgctctgtgctgaccctgctgttctacgcgccggtcatcagcggcggggcctatatgatttggcagattatcttcagcggcgacgcttacggctatctcaacggcctgctgatggatttggggatcatctactaccccatccagtggctgaccgacgtggattacatgtggacagccgccgtcgtcgtcgtgctgtggatgagcttcggcgccggctttctgtccttcatcgccggcttcaaaaacatcgacacccgcctgtatgaggcggcagcggtggacggcatccgcaaccggtaccaggagttctggtacatcacgctgccggagctcaagccccagctgatgttcggcgcggtgatgagcatcaccggatccttcggcatgggcgacgtgctcacaggtgtgttcggctttcccagctccaactacgccctgcacaccctggtgcaccatctgcaggattacggcaacgtgcggttcgaaatgggctacgcctgcgccatcgcggtgctgctgttcattctgatggtcggcgccaatcaaatcgtccagcgcctgctgcgcaaggtcggcgattaatccacggcaaagctgggctctccccgtcggagagccggaaagggttggtttcggaagatgcggatacatttgaaagctctcaaccgcagccggcgggtcaatcgttcccgcgcgggaacggccgccatgtttctggtgctgctggctctggcgctgttcatggcgtttcccatgggtgtcatcatcggcaacgccttcaagccgctggacgaactgtgggtgttcccaccgaaaatgtggccctccgttcccacgctgcagaacttccgggacatgttcaatgtcatggcggactcctgggtgccctttttccggtatatctacaactcactgttcatcacagcggtgggcacggcggggcacatcatccttgcctccatgtgcgccttccccctggccaaaaagaagttcccgggccgcgcgatcctgttcaatctgatcgtcttctccctgatgttcaacaccacggtgacggccattcccaactacatcaccatggccaagctgggctgggtcgatacccatctggccatcatcgtgccggccttcgcctcctccctgggcctgtacctgatgaagcagttcatggaacagctgcccgactccctgctggaggcggcccgcatcgacggggcttcccagtggacgattttctggcgcatcgtgatgcctaacgtcaagtcggcctggctgacactcatgctgctgtccgtgcagaacctgtgggccgtcggcgccaaccggttcatctataaggaggagctgaaaaccctgccctacgctctgggccagattctcagcggcggcattgcccgcgccggcgtcggcgcggccgtgacggtgctgatgatgctggtacccatcgccatcttcgttttcagccaaagcaacatcatcgacaccatggcctcctccggtatgaaggactgagggccgcgtctgatcggcccattcggcacaaaggagagcagcgtatgtggaaaaagatatgcagcatggcggcttgtgccctcctgctgacgcccatggccatggcggcggactcggccgtccatgagttgccttacgattcctatgttttcagcgcggacggcacccctctcgagctgcccgcccccttcgtcccccaacagatcgtcaccggcgcgggcctgggtgtcggcggttttcaaggcctgagcgatatcttctgcggcagcgacggcctcctggtgctggccgacgcgggcaacaaccgcctaatcctgaccgacaccgcctggaacgccccggtggttctcgcttcgttcgacaacggcggccggcaggacgctttcaacaaccccaccggcgtctatgtccggggaaacgacctctatgtggccgacgccggaaacgcccggatccttctcttcgaccgcgccaccctcaccctgcgccgggagctgagccgtccctccatcccctctctgggcgaggattacacctataagccgctcaagctgaccgccgacgcggcgggccgcgtgtatgtggtggccgaggggatcaaccagggcctcatcgagctgaacgaaaccggcgctttctccaccttcctgggcgcgccttcggtgacgccggactttttcgaactgatttggcggaaattcgccaccaaggagcagctggcccagctggaaaaatacgtgcccaccgaatacgacgcggtgaccatcgacagcgacggctttctcttcgccgtatccaaaaacgcggaaaacacccctatcgccaagctgaacaaccagggaaacaacgttctgcttttcccacaaaagctgggagacgcggaattttacgaaaataagccctatttcacggatttggccctggacgagcgggggattgtcttcctgctggactccaagcaggggaaaatctacgcctacacgcaggagggtgatctgctgttcgccttcggcgccaacgccacccagcagggctgcttctactccgccagcgccatggagctggcgggcggcctgctctacgtctgcgacagcaacaagaacaccgtcaccatcctggagccgacggccttcggcgccgccgtggtggatgccactattctggaggaacagggccgctacgaggacgcctacgcccattggcgggaggtgtcgcgccgctgctcccattacgcgcccgccgaggtgggcatcgcccaggaagaaatccgccagggccgctacgcagacgccatgtcccgcctgaaagctatccgggaggaggacgtatacgccaccgcctttgaaaagggacggaacgaatggatacgcaatcactttcttccgctgctcggcggggcggcggccctcattcttttgttgctgctggttccgcgcctggtgaaaaaatgggcccccgtgcagcggctgcgcgccgcgccgctggttcggaaattccgctacgccacctacagcgccttccatcccttcgacggctattgggatatcaaacgggagggccggggcgacatgaagtccgccctgctcattctgggaattttcattgtcttttacgccgtgcgcgcccagttcagcggctactccgtcaccggtacggtgagcagcgaggtcaatgtgctgttcgaatgcctcatgatcctcctgcccctggccttctatgtcgtggccaactggtgttttaccaccctcatggacggcgaaggaagcctcaaagatatcttcatcgcctcctgcaccgccctgaaaccctacctgctgttcagcatccccctgttcctctgttcgcacctgcttacccagaacgaggccgtgttctatcagacggcggacgccctgtgctggatctgggtggtggccctgctgttcctcggcatgatgatgacccacgactattctttgtccaaggctcttctggccatgctgctcaccatcgtgggcatctgcttgattatcttcatcggcctgctgttcatcaacgtggtgcaggacgtggtgtccttcttccgggatatctacaccgaagtgtccttccgattctattaaaggaggcgtcgtcatgacgggcaaacaaacatggaccctggcgctggcggcgctgctggtctgcgttcctctctccgcctgcggcgccaaggaatccccgcttcccgacgccgccacctacgataccggcgacgacagcgggtgggaaacggtcgaaggcggcgaggtactcatggagaacgaccgggtgtccttccggttcgacgccgccaccacccatttcaccgtcaccgataaggcaagcggccgggtatacgcctccgccccggaggagggggacaccgtgtccgacgaggcgctggcccgcctgcgctccgaagtatccctggtctactacaacagcgacagcagccggctgtatatgacctccgccgccgacagcgtggacaacgagaacttcgtcgtccgccggcagggcaacgccctgcgggtgacctacaccatgggcagcgaaaacgccctgctgctggcgccccaggtctttaccaaggctttcttcgaagacaccatctgcgactccggcgctctcagctccagccaggtacggcgcatcgagcggtactacgatttgtacacgccggaggatccgactgaggaatacgccgccatgcgggaaatctaccccgcactggatacccaggcgctgtatatcctcaaggacaccgtcgacaagctcaagcgcatcgaaatcgacggatacatgcaggcctgcggctatacccaagaggactatcagaagacgctgagctctctgggcatcgaagcggcccaaaccgacgaggccggcttcgtggtaccggtggaatacgccctgaccgccgacggcttcaccgcccgcatcctcatggacaaggtgaccgagcagagcgaccgcttcaccctccagcaaatcgacctgctggaattcttcggctccgccggccaggaggaaagcggctacttcctcgttcccgacggcgtgggcgccctcatccagttcaacggcgaggccggcagctattcccagcggatttacggcgaggagccctccaagaaatccgccacgaaaacccagctgacccagcaggccctgcttcccgtgttcggcatttcctatggccagtcgggtatcctcgccatggtggaaaacgccgcccaggcggcctccatcaacgcgaacaccctgtccgccgccaatcccctgaacaacgcgttctgctccttcaccgtgcgggaaatggacgtgaccgatatcggcaccgaccgcaatatcccggtgttcaacctgtacagcaaaaatctcctgcgggaaagcccccaggtgcgctacgcgttcctgaacggcgacgccgccggctacgccggtatggccgcctacacccgcagcgccatgctcgaggacggccgcctgaccggccaaaccaccgacagcggcctgttcctggattacgccggcctggctgccgaggacgcctccttcctaggtgtcccgtataccaagaagctgaccctctccaccctggaggcgattcgccaagacatggaacggctggccagcgagggaatcaccggcgtggatctgcgcctgcgcggctattccggcgaggggattacccacggcgtcaacaacgccttttccattgatcgccgggtgggcgacgcggacgggctgcggacgctggcgaacgccctgtccggcggccggctgtacctggaggcggatttccagctggtctataccgacacctggttcgacggatactccctgagggccgataccgcccaaaacctgagccgcggcctcaccgccctgaaacagtacgatccggtggaccgcgccttcctgaacgaccggttcacccggtatctggtgtcccctcttctatacggcggcctgtcagcctccttccggcagagcctggacgccgccctgcccgacccatccgtcggcttgtcctatgcctccgcggcctcgctggtgccgggggattacagccggaagcggaacattgaccgcaccggcgccgccgcctatatcaccgacgccctgcgggatgcggccaagcagcggcccctgctctcggagaacggcaacgccttcacgcttgcctacctgtcccggctggcgggcatgccgctgtcctcctcgggcttcgacgtgctcagcgaaaccgtccccttctaccccatggtggtgcacggcagcctgccctataccggcggacccctgaacctggcggcggacgcggacaccgcgtttctccgctcggtggaatacggcgcgggcctctccttctccctcatcacggggagcgatcggatgctcagcggcaccgcctacgccaccggcttttactcgatgaacagcgccgagcagctggacgaggtgatccgccggtaccgcgagctggacgacgtctatcaggccaccaagcaggcggccttcaccgcccacgaacggctcagcgatgaggtcaccctgtccggcttcagcaacggcgttcaggttctggtcaattacggcgacacgacggtgcaaatcgacggcgccgccataccggcccgcggcttcctgctgcggcagaatccgaaagggggcgcgtcatgaacaagcgcagaaagtccaccctgatgcggcggcgctcctacgcgggctatttctttatcttccccctcattctgggcgtgctgttcgtgtttctgccgaatctcgtacagaccttccgcttcgctataaacgatatcgaactggctccggagggctatacgctgcagcccgtgggcctgacgtattttaaggaggcgctgcaggtcgatcctcattttgtcccctatctcatcaccagcatgaaaagcttcgccaccgatatcccggtcatcatcattttcagcctgttcatcgccagcgttttgaatacgaaattccacggccggggcctcgcgcgggtgatcttctttgtgccggtcattctcgccaccggcgtcatctccagcgtggaagcctcgaccaacatcatcagcgtggtggaggaaggccggtcgctggacaccggtcttgccgccggcgacaaaatggaaatcgcctccctgctcacctcggtcaatctcccggaggccctggtttccctcatcagctcctccatcgccgggatttaccggattgtccagtccagcgggatgcagattttcatcctgctggccggtcttcaggaaattcccggctctctgtacgacgcggcccaggtggagggctgcaacaaatgggagctgttctggaaaatcaccttccccatgatcggcccgcagatcaaggtctgcgtcgtctataccatcatcgacatcctcgcggacgagcggggcgagctggtcagctatatcaacggcctggccttccgcaacaacctgtttgcccagggaacggccatgtatgtgatttatcttctctgcatcgccgccatggtggcgattgtgctggcggtcctgacccggtttatccggtacggcggcgaggatcgggccggctgactccatgggaaaccgtcattcacgcgggaatttgtccttccggccctgccgccgggggcataaattccagtttcatcgaaagattggaatggttgtatgagcgctgttcgtcggatccccctgaagcagcgggttcccggcctgcttctgtccctgatacgctttgtcatcattttcggcctggcttttatcatcctgaagccctttgtgtataaaatcctcatggccttcatgagcccggacgatttgctggattccaccgtccgcctggtgccccggcacttctccctgtactactggaagacggccctggaggggctaaatctgggccagacgctgcgcaacaccggcctgttgtccctgctggtcggcgtcatccaggtggcttcctgcaccatgatcggctacggccttgcccgtttcaaattccggggcagcaagctggccatggccatggtcatcgtcatcatgctggtgccctatcacgtcatcagcatcgctcaatatctgggcttcgtctatttcggcgtcggcagcttcaccatcaatctgaccgacagcttctggcccagcctgattctcgcctttaccggcctgggcatcaaagaagggctgtacatttacttactgcgggaattcttcaaatccctgcccgccgaattggaggaagcggcctacatcgacggcgccggcaccatccgcaccttcttccaggtgatgcttcccaacgcccgcaccatgatgatgacggtgtttttgttctccttctgctggcaatggacggattccacctattccagcatctattttaacgaaatgccggtgttcgccaacaccatcgagtccttgtacatccgggtgggtctcaacgccgacatgctgggcaccaacatcgcccgcaacgccgcctccatgctgattatcattcccctgctcatcctgttcggcttctgtcagaaaatgctggtcaagagcatcgccctgtccggcatggccaactagccaagaggaggaaaccctatgagaatccaagcgttacgaaaaggagtgggatgtctgttgagctgtgctgtattgagcggctgtgcccgggaagcgccgccggtttccgccgaaagcgtctgtgcgtcctcttccgtatccgtctcgtccgcttccactgggcaaaccgtatcctccgcgccgtccacggtgcccgacacgtccggccccgccgggcgcagcaccgtcacccgcgccgctgttaccaccgccggttccggcggaaaaagcaccgctggcagcacgaccgcaccctcctcctccaagaccgccccggctcccgctcaaagtcaaaacaccgtggagctcatcggtcggttttacgaaaagggggccggcgtctatcaattcgaatggtcgggcagcaccatctccgccggcttcataggcaccggcatcgccatcaagctgcgcataacgctgccctcccccgatattcacggcggcctcgattacctgaatgtctcgatcgacggcggcgcacctacggttttgaaggtgaacgagaacaccgtccggtatcccctggcctccggtctgccggacggctatcacaccgtgcgggtcaccaagcgcaccgaggcgcagttcggctctcagctgcagttcgagggcttcgactacggcggcggcaagcctgccccggccccggcgcgtaaaacccggcgtatcgaggtgtacggcgattccatttccgccggctacggcaacgaggggaccgcccccggctttcgcctggaggaggaaaacgcctccctgacctatggaatgctggccgccgacgcgctgaacgcggaatgcaccgtcatcgccctgtcgggccacggctgctttgtcagcctcagcggctccaaaaccgaggtggtaccgaaatacttcaaccagatcctgtataaaaaccgccgaacatacgcctttccctctcccgacccggacgcggtgattgtgcacctgggcactaacgattacgccatgaatgtccttgacgccgatttttataccgcttaccaggcctttgtccgccgtatccgccgggaatatcccaaggcctatattgtcctggccgccggcggcggcaccacccgccacctggacctgctgcagcgggtggccgacgtgtgccgggagcgggacaaggatacccgggtcggctgcttcgtcggggtctataccgacgccgacgtggccgagggagcggacggtcatccctcctccgccggccaccgccagctggccgagcagctgacggcgtatttgaaggaaaccctgaactggtaacgcgcaaacccggctgccgccggttttatatcgccatcaaccatcgtctatacccattagaaggaaggaggatctcattcaaatccgccggagcccatggctctgaggctatcattcggatgttaggaggaaaagatccatgtcatcaaagactatgcttcgcaaatgcgtcgccgtcgccagcgcgggactgatcgccgcgggcatgctgggcgtctcgtcccttctcgtcggcgcggctcccccggagaacctgctgagcggtttcaccctcagctcgtcggataccgagaagtatcaggtagattcggcgaccaactccatcacggtcaacgatgccgccgagcacaccgtctacttcagcggcgtcaccctggacaaggacacgacttatacctacgagttcaccttccgcgccgccagcgtcagcaactcgccccagttccgcttccccattcgggcggaaggctttcaaagcggccagtggctgtccctgtggccggggatgaatcaggtgcgcctgagcaccgactactggagcaacaatgacgcctccgccggttccttcaccttcgccgccgagacggactatcgctttaaaatcgtctcggagccgcagaaggcctccatctacatcgacgatgtcctggtgcacgaagcggcttttgcctccctgtataccaacggtcaggtgggcttcggcggctataacctgccggcgtacaccctcagcggcgtttccctgtccaaacagagcgccgagccgccggtggaaaacctgctcgacgccttcaccctcagcgaacaggacgacacgaaataccaggccgacacggccaaccatgcggtcagcgtcaacaacgccgacgagcacaccgtgtatttcaacggcgtcgccctggacaaggacgccacctatacctatgagttcaccttccgcaccaccagcgtcagcaacgcgccccagttccgcttccccatccgggcacaagaccctcaaaacggccagtggctttccctgtggccggaattgaaccaggtgcgtctgagcaccgactactggagtaacaacaacgcctccgccggctccttcacctttgccgccgagacggactatcgctttaaaatcgtctcggagccgcaaaaagtctcgatctacatcaacgacgctctggtgcatgaagcggcctttgccagcgcctacaccgacggcaagctgggtttcggcggctataacctgccggcctataccctgaaaaacctgtcgcttaccaagcagggcggcgacgagcccgccggcgacaacctgctgaagggcttctccctgacctgggatgcccacgacaagtatagcatcgacgccgccaccaactccatcaccgtcaaggagggggacgatcacgccatcaccttcgccgacgtggcgctggagaaaaacgggatttacacctactccttcaccttcaacatgaagggcgattcggtccagctgcgcatgccaatccgcaccacgaatcccaacgacaccgctgcgggcggccagtggatggccgactggttctccttaaatcagctccgcctaagcgagcactacagcggcgatcctttccttggcatcggcaccaaggagctgaagcccaaccaggactatcggttcaaaatcgtcaccgagcccaccaagctgaccgtctacatcgacggggaaaaaatcgccgaaaccggaaacgacttccccctggtggaaaacggctccatcggcttcggcggctacggcatggcggaatacaccctcaaaaacctgtccctcatcaagaccggcacggcggaaggactggtggatgaggccgctgtgcaaaacgccatgaccctcatcgacgccatcggcaccgttaccgaggaaagcggcccggccattgaggcggcccggaaggcctatgacgcgcttaacagcgacgaaaaagccttggtcaccaactacgaaaccctcaccgccgcggaaaccgcttttacccagctgagtgcgtcggtcgattaccggtattacgccgtgaaggccagcgagctgatgggcaccaactattggaccaacagcgtcagcgccaccccgctgagcggcggcggcatccatttcggcttcaaggattccggcaccaacatgcggcagggcatcaaccgcccgctgaagctggacggcctgcatctggaaatgagcaatctccaggtcacggccggcggccagattgctttcttcctggccgattacgacgcgcaggagggctattcccagctgctgtacaaccagggcgcgcggtatgtccccatggccattatcctgaacacccaaaccggcgccatcgaatacgtgacggtggcgttcgactcccccgaagcgacggaaggcactcccaccgtccatacgctggccagcagcgacagcctgaaggccgcgaatctggcgggcaagaccatctccatgcgcatggcggccaagaacggcggctacaccgtcagcatcgcgggcgtcaccggcaccatcacggcggagatgctgacctgcttgaacaagctgtcggatttcaacaatgcgtatctgaccatctgcgccttcggcgacgcggtgcacaccctgtccttcgacctgctcagcctccacggcggcaaggagacctgcgccgacgatctgtctaaggaggaggccgatcaggtggacgaggtcatggctctcatcagtgccatcggcaccgtcaccagtgaaagcggggaggccatccaggcggcggaagacgccttcgacgccctgtcccatgtccagcagggcctggtgggcaataaggacgtgctgacggccgcccgcgtcgtctacgatcggctcacctccgacggcgtgtataaggatccgaactactattccatcaccaccgacgatctgatgggcaccaaccactggtcgaacaatctctcctatgagaacgtcacgggaggcggcgtgcgcttcacctggttcaaggccggcaccgactaccgcgtgggcgtcaatcgccccatgaagctggacggcctccacctggtgttcgacaagctctccatcacctccaccaacaaatccttcgcgatttatctggcggatctgttcactcacggctgggcggagcagtattcccagctggccgaggggcctctggccatcgtggtggataccgcgcggggccaggtgcgtgtcgtgaccgacgccgaccgcaacggcacgctgctgatggaaagcgacagcctcaagtacgaaaccctgagcaaaatcccctttgatttcaaaatcaccgccaagggcgacggcagctataccctgcgcattctggacaccgagggcaccatcaccccggccatgctggaagccgcgcccaagctgaccaagctgaacgaggtttatctgaccgtctgcccctacgattccagcggtgccaccagcatgagctacaaccttctcgccctccatggcggcgacgtggtctgcgccgatgaaatgacggacgccatgcaggccagcatcgacggcgtcatcgcggccatcaagcgggtctacaacgagaagggccagatcgttcccgcctccggcgccctgctggacgccgcctgggacgcgtacaacgctctggacgatcagctcaaggccctggtgcccaacctgaaggatctggaggccgccgacacggtctatgtcgtggtcagcgccatcgaaaatctcggggaaatcaccctggacagcgcggacgaaatcgcctctgtgcgcggcgactacaagctgctcggcgcggtcaatcggcccctggtgggcaactacgataccctcaacgccgccatcatgaagctgtaccagctgcaaaaggcggcgaacatcgataaaatcctgcatggcggcgattcctccggcgacggatccggcgggaatgcgaacagctcccccgataccggcgaacgttccgccctgccggccgccggcgcgctggccatcctgaccggcacggtcgtcctgtccgtctgcctgcttggcaaacgcacccgcagggatcactgaatgccgcgttcggcgcatcagaaaggagagcaagccctatgaaacgaccctttgtctcgatggctgcggccgcgctgctcagcgccgcctgcgtgctcactccgctcgcctcagcggcggaagagacgacagcctacatcgataactccgccctcattccgaaaatcgtggacgattcccaggtggtcatggaggattcgggtaacggcctcatgagccccgattgggtgaaaaccctgatcattggggaaatcaccatcgcccgctgcacgccggaaggcaccttccaggcggcggtcaaggtgctggatcactaccaggagatgggcatcaacggcctgtggctcacccctgtcttcgacaccagccaaggcaccggcggtcactacggcaacttcggtccccacaccgtagatcctgccctgaccggcacggaggactacgaggagggctgggccgtcgtcaaggaattcgtgaacgagtgccataagcgcaacatccgcgtgttttccgacatcatcacctggggtgtggaatggaacgcccccctgtacgtcgaaaagcccgcctggttcgccggcgaaaacgcctggggcggctacagtttcaactggaacaacgaggaatttgtcgagtggttcaaggtgcaatcactgaatctgattacgaacatcggctttgacggcctgcgctgcgactgcgaacccagcaccaccggctacggcatctttctggatatccgggaacgggccttggccgccggccggaaggtctgcatcttctccgaaaacaccaacgagcgcctgcagcccgcctacgatttcgatgagcattccagcgagagcttcacctggaacaactgggaaatgtacaccgaatactacaacatcgtggaatcggtcaagaagggctacggcctgggcaccaatttccaggaaatcctggacgaatccggcaccgcccgcttctacgccttcaacacctcctgccacgaccagccttacacggtcaagggcagcctggtcaacttcggctaccaatccctgctggcccccttcatccccatcttcttcatgggcgaagagttcaacaacccgctgtacggcaactccaccgccttcctgacccctctgcagctggatttgctggaacagcccgaaaaccgcgccttctatgaaagcgtcaaggaaatcatccgcatccgccgcacctatccagaaatcttcaactacttcccgcagaaccatcgggaatccaacatttgcgaggtggaggtcgtcggcctggaaaccctcaccggctacgcccggtacatggacggcaagggcatcctggtggtccccaacaacaacgtccacgataccaccagccccttcaccatccgcattccctacgaagacatgggcatcccggaaagcgcggtgtacaaggtgaccgacctgcgcaccggcaaagaaatcgcccggggcgatcgcatctccctgtatgacttccaggccaccgtcgcctacaacgatttgggcgtctacatggtggaagccgtgacgggcgccgcccccgcggcgaatgcggcggatgacccggccgaagcgcagccccaagccgcgccggccggccaggaggccgccgcgccccagcaggaaccccagacggaacaggccgctcaggacaaagccctgatggccggcaaccaggccgctcccctgccgggcggcgcggcggcagcgccggccgcggacaccaagacgggcggtatcctgcccgtgatcctcgtcggtgtcctcggcgtatccggcgcggctggcgccttcttcctggtaagaacccgccagcggcggcgcggctgctaactatcgaaacggggcggccttggccgccccgttccccgcaaaggagagactctgatgatcaaaaacccgctgacctgcctcgaccggtacgacccctcctgggcgctggcaccggtgtgggagggcgacaccctgtataacgaaagcgtcctgctcgtggaggacgccgacggccgggcgcaggcccccctgctctacccgccggaggagatcctgtccgtgcgggactataccttgaaaaccacctatgcccccggcagggactggagcgtgtccgacgggcaaatctgccgcgtccccggctcccccctcccctgcttcccctatgaggagttctactgcctgaacaatccgccggccgattcggtgatgaactacgccttcggccggcatatcctggtgggccccggccatgtgttccaaccccgcgtcgtcaacgtgacttatacccacaaaggcgcctggcgctggcagaaaccggcctttaaaggcgaccgcctgccccgcaccctggaaaaactccgccgcggccagccgctgaccttcgtcttttacggtgacagcgtcgtaagcggcgacgaggtgaccagctttctgaatctggagcctcatacgcctatttggtcggagatgttctgccgccgcctggaggaggcctacggctcgccgatccgcctggtggacaccgccgtgggcggcacccgcatggaatggggcctggagcatttgcagaccgaggtggccgattaccatcccgacctggccgtcatcggtttcggcaacaacgaccggttctccccggcggaatacaaagagaagttggccgccatggtggccgacctgcgctgtacctgtccggacacggaagtcatcctgatggatcccctgacccccaaccgcttcatcgcccggggagacgacggctacatgtggaacgtgtttcagccctattacgcgcagaaaaacctggagctggaacaggagatttccggcgccgcggccctggaaatcaaccgtccccacctgcagctgcaggaaatcaagcgtttccacgacatgacggccaacaacatcaaccatcccaatgactggttttaccgcgtggtggcccaaatcgcttctcgtctgctgatccccggataaccgaacggcacagcctgtatcacaaacaggctgtgccgtttttatttttgaattaattatattaacgcaaatattaatataattaattattatattgatatttctaatttttatggtataataacctcacggcgttctccaaagccttgcaacacaagcctttggacgcctgggagaacattgaaccactccgaaacggtcaaagccgtttcggaccaaggaaggcgctgcgccttgcgcaccgctttgtggtatagtgataaccagaaaggacgtgacggtttgaacaaggtcatcagccgctgcccggtgtgtaatcatgagctgaccgtggccaggctccaatgcgattcctgcgacacagtcattgaaaatcacttccggctcagcaaattcgattacctctccgacgaagagctgtatttcacagaaacgtttatccgctgccggggcaatataaaggaagtggaaaaggaactggggatttcctaccccaccgtccgttccaagctcgacgccgtgattaaggcgctcgggtatgagacccgcgcggacgaacagacggcgaaacgggaagagattctcaaggccctggaaaacgggtcgattacggtcgaacaggctatcgcccaattaaaataagtaaggagacgcatcatggatgagcaattgagaattctgaaaatggtggaagagggcacgattacggcggaacagggggcgaacctgatggccgccatgcacatcgaccagccgcccgctgcccccgcggccagcagctacgataaaaaaatgttccgcgtgatcgtggacagcgaaaccggcgacaaggtcaaagtgcagttcccggtaggcgccataaagaagatcctgaaggccaccggcaagctgcccatcccggaaaaggatctgcaaggcgtggatctctcgagcatgatggacgccatatccgaatgcctggacgacgaaatcgaaggggactttgtcagcgtggaggcggcggacggcaccattgtccgggtattcgtggataaatgacgctatgagaatacagatccgcaccaaggattttcggctgaatctgtccgtgccggccgccctggtcggcggggtggtacgcgtcctgcccgaccggctgttcgagagcctgcgggccaaaacgccggagccgtatgacgtcctgataaccaaagacgttgtccggccgctgctaaaggcatgcctggataccataaaggaaaacaagggcctggaaatcgttcatgtcgaagcggcggacggcacgttcgtctccgtcaagctgtgaatcacaaaacgagccgccggctttccgccgacggctcgttttcgtttgcttcgtaggatcttgtccgtttattcctgcggctccgccgccgcctcgctgcgcttgggcgccggattgcggagaatctgccgcgcctgccggatttccgtcagctgacgccccaatgtctcctctgcgctgcgcagcacatcctcggaaaactcctgcgcccccttgcgcatttcccgcgccttctgctgggactggctcaggatctccttggccttggcctgtgcctggcgcaccacttcctcgtgggacaccatgctgcgcgcccgctcctcggcggtgcggatgattccctccgcctcccgcttggcggtggccacaatatcggtgcgatcggccacgatggcccgggcctgccggatttcggaaggcatgttgccgcggatatcgtcgataatgtcccgcaggtgatccgcctcgatgaggcatttccccccggaaagaggcatgctccaggccttgtcaatcatatcgtcgatttgatccagcaattcatcaacggtcattttcctcatcccttccaatctttttcatgatgtccggcacgatgcaggccggcacgaactccgagatgtcgccgcccaggcccgccacctgcttgaccaggctggaggacagatacatgttgtccgccgccgtggtcaggaacaccgtttccgcctcggggtacagctttcggttggtcagcgccatctggaactcatactcgaaatccgacatggcccgcagccccttgacgatgacgtcggcatgcctctgccgggcgtattccgccagcagcccgccgtagctgtccacctccacgttggaaagccccgacgtggcccgccgcaggaaatccatccgctcctccttgttgaacatcggctgcttggaggagttggtcatcaccaccacgatcacttggtcgaacagctgggccgcccggcgcacaatatccaaatgcccgtgggtcaccgggtcaaagctgcccggacatatcgccactttcacgctcatcatccattccgtcacccgcaggtgaattcgatatcccttttgttttcacggcaggcagcctcgcggtgccgccgacttttcagtcttcctccggctccaccgtttcccagcggtacagc

SEQ ID NO: 1592 - DNA, 32759 bp, Unknown
  16S sequences of unknown bacteria
tcatcatcggctcctccggttccattgccggtctggctatcgcgctgccccaggcactcaccagcatcttccccatgaccgaactgcagtgcaagctctttgccgttctcatggtggtgctgctcaccgcagtcaactaccgcggcgtcaagttcggcgcggcaatccagaatgtctttatgatcggcaagctgattcccctggtgctcatcatcatctgcggcatcgcaatgggtcagcagacccccgacctcactccggtacctgccggcggtgcttccatcggcgagattctctccatggtagccttcggcgtggttgcaaccctctgggcctttgagggctggaccaacctcaacaccatcagcgaggagatccaggagccccggaagaatatcccccgggcgatcatcatctccattctggcagttactgccctgtatgtgctcttcaacttctccatctaccgggtgctgtcctttgaggacatttcagctcacatcgctgccggcgactacttcctcggcaccgctgctgccaacaccctgttcggtcactacggcaagatcttcgtggcaatcgccatggcagttgccatcttcggcgctctcaacggttcggtaatggtattcccccgcacctactacgcaatggccaaggacggaatgttcttcccctccttcaccaagctccaccccaagtaccacacccccaccggcgccatcatcgcttcgatgatcgtttcctgcctgctgatcttcgccaacaatctggaccagatcacttccctggtagtattcagcggcatgatcttcaagtccctgacctttgcttcggtaatcgtcctgcgtaagaagtaccccgatatgaaccgtccctacaaggtctggttctatcccttctcggtatatctcatcgtcctcatcatgatcggcctgtgcctgaataccctgctggaggacccccgtacctccctcatcggtctgatcgttccgctgttcggtctggcggtctatgagttccagctccgccggaaaaagaaggcgtcccgataaacataagcgcattaaatccaggtttcataaaaagaaagattggagtgtatcaatatgtcaaccattctcgtaaacgccaatatctatgtagagcgcggcaacttccaggaggccatgctcattgaaaacggcatcatcaaggctgtgggcaccaatgctgaaatccgtgccatggctcctgccggctgtgaggagatcgatgccgaaggccgcactgttatccccggcttcaacgattcccaccagcacctctacaatgtgggtgagagcctgcgcatgatcaagctgcatgaggttccctccctggctgaaatgatcgagcggggccgccgtttcatcgaggagaaccatgtggctcccggtgagatcgtactgggccgcggctggaaccaggacttcttcaccgataccgaccggatgcccacccgtgaggatctggacaagatctccaccgagcatcccatcatctgcacccgtgcctgcggtcatgtggctgtgtgcaactcgatggctctggagaaggccggcatcgaccgcaacactcctcagcccgccggcgcttccatcgacctggatgccaacggcgatcccaatggtatcgtccgtgagagcggcgctctggcaatggtgctgtccatcattccccagaagactgttgccgactacgagaagagcatccgcactgccatggactatgctgagtccatgggcgtgacctcggttcagaccaacgacatcaaggacaagaactatgctgagatgtggcaggcctatgagaatgtaacccatgcaggccgcagcgtccgtgcttatcatcagtgctgcttcacccagatcgacaacttccgctccttcctggcagacggctacaagaccggtcatggtgatgacctgaaccgggtcggtccgctgaagctgtttgtagacggctcgctgggtgcccgcaccgccaagctgaatgccccctatgcagatgatcccaccaccaccggcatcactgttatggatcaggcttatctggatgagatctgcggcatcgctgccgcaaacggcatgagcgttgccacccacgccatcggcgacaaggctgctgagatgattctcgaggcctatgagaagaacatgaccgacagcaccaacccgctgcgcaacggtgtaatccactgccagatcaccactcccgaaactctggagcggttcaagaagaacaacattctggctcaggtacagcccatcttcatccactacgacaagaacattgtctatgatcgtgtgggcgaggagctggcaaagacctcctatgccttcaagaccctggctgacatgggcgtgcatgtatcctacggcactgactcgccggttgaggatatgaacccctacaacaacctctactgcgctgtaacccgtatgtcgctgaccggcgagggcgagccctatctgccggagcagggcgtggacatctatgacgccgtggacaactacaccaaggagagcgcctttgtttccttcgatgagaacaagaagggccgtctgatgcccggctatctggctgacctggtgatcctggaccggaacatcttcgaagttccctccatggagatcaaggatgtacgcccggttgccacaatgatcggcggcgagatcgtataccgcgcctaagagaaatccgcgcgtctgaaatgctttctccgggttaacccattctccacaaaaaggacggatcagccgatccgtccttttttctgtgaaaatggcgatggaaagtccgggtgcgccgatgtaaagccgccttggtggactttctcccggggagatggtacaatagggcgcagaaaaataccggctctgatgccgaaacaggaggcctccatgacattcggagaaaaacttcagtacctcagaaaagaacagaactggacccaggaacagcttgccgatcagatcgggatctcccggcagtccctctccaaatgggagctgggcgccgccactcccgataccgagcatgtggtgcggctgagccggctcttcggcgtatccaccgacaccctgctgctggacgatgctcccttcccgccctccgccgtccaggctgccggctcccgccgccgctgggaactcatcggaggcggcctggcctcctccctggcagccaccggcctgctgatcctcgggatctgtgcttccatcttcccggcggtctatatcgaggctcccatggacaaggagtgggtgcgggcctattccgggctctccggcttcctgatgacaaacaacctctgctggctgttctggctcctctgccttgctctggcaggcggtctggcggcgctgttccgccccaggcttcagcccctgttcggacggctccgccatcgccttgcgcacagacagtcctcccagccccctgcggaggaataaaaaaagctctgccgaatctgctcggcagagctttttactgcttatttaccgctctctgcgggaatcctggcccttgcggaagtccttcttgccgcggcgggaggaaggcttgccctcccggtggtcgccatgggagcggccttcccagttctcccagccggacttcttcttgccgttcttctggaaggtgtcggtacggcgtccattgccgtccacccgtccgtagggcttgccgccccgcttgtccggacggcgctcctcccgacggcctccggcattcttgccggcaaggtctgccttggtgagcagacgcacctcggtcttgtgtccgttgatgcggcaggtcgccatggtctcggcggtcagtcgggcatcctccgcaccgagctgtaccacagtgtaatcgtcatagatgtcgatcttgcccacctgcttgcccggaataccggtggcatcagcaatggctcccagaatgaagttcggagcaatgcgctggcggcgtccgatgctcagcactacgccggtctgcttgccgttccggctctcgccccggcgggataccacctgcacctcgggcaaagccttgcgctggcctgccagcaggcgctccagggcagcctccgccacctgctcggcagtgagacccataccggtcagacgatggagcatggcctctccctcgggcaggggctgggccaggctctccgccaggctggcggcaaactggctcagacggctctcatagatctcgctggcagaggggatctccgcctggacgatcttggcaccggtggatgccatgatgtcccggagctgatagaactgccggcgcccgctgatgagggtgtaagccttgccctccttgccggcccgggcggtccgtccgatgcggtggacatagaactctatatcctggggaatatcaaagttaaagactgcgtccacattctccacatcgatgccgcgggctgccacatcggtggcgatgaggatgcgggtgcgatgggacttgaagcttgccatcacctgggtacgggccgactggcgcatatcgccgtgaatgcccacggcctgatagccggcattggtgagatactccgtgagctcgtccaccatcttcttggtgttgcagaacaccaccgagagcttgggatcatactttgccagcagcaggttgagcacatccatcttccggcccatggggcagtcgaagtagaactgctcgatgttctctgcggtgcggctgcgctcgctgccaatggcgaccatcaccgggtccttctgatactcccgggtgatgtccagaatgggctgcggcatggtggcggagaacagcacagtctgccgctcctccggcgcctgggccaggatggtttcaatgtcctcccggaagcccatgttgagcatctcgtcagcctcgtccaggatcaccatccgcaggctgcccagacgcagggtgcgccggcgcagatggtccataatccggcccggagtaccgatgacaaagttggcgcccttcttgagctggaagatctgcttctccatcgaagcgccgccatagacagccacaaccttgacgcccttcttgtaccgggcgaacttctccacctcagcggcggcctgcatggccagctcccgggtgggacagagcgccagcacctggacgccttccaggtcgggatcgatcatctcaatggcgggcaggccaaaggctgcggtcttgccggtaccggtatgggaacgaccgatcacatccttcccctccaggatcagcgggatgctctgggcctggatgggggtgggttcggtatagccgacttcggctacggcacgctggatggcttcggacagcggaaaatcacggaatgtaatgctcataatacctctttctgactgttccgcaccgggggcctctgccacagagcctgcccgcaggcggaaaactcggatcatttccgggctctaaaaaagtgaggagtcaatttgtcgaactcctcacctgatcgcgcccttgtactgaatgtctattgtaccatggattgtataaactgtcaaatattcttccattcattcatactgactgcacaaatcactgccactgagccgacccatcccgggctttgagggcttcgcagacctgttcgatccgccactgctgctcctcggggctgtgggcagcacgcacatagcctgccatccggttctgaagctgggggctgagctgcgcaaagaactcccagctcccgggagtggcctgaatccggctgagcagcggcatgggcatgccaaagccctccatccggtcatggacccggctctccgggccatattttccataaaactgctgatagtccatgttgtaacctcctgtctgtttcagtctgcccgattcggacgaatttatgtccattccgttgacagaccccaggaaaagaggtataatgtgtatcatctaagacataacgataaaaaattaacgatttacagaggaggaacagcccatgcacaccgatgaccgcaggaccgtaagcggctgctttctgtttgcggatcatgggctcaccgaagcagcggaggccattctggaccgctgccccatccggagctaccggaaaggagaactgatctactcccgggactgctttgaacgggcggtgggagtgctgctctccggggaggcggaagtgctcaagggccggggcgtggtgctcaacaccctgtccgccggggacagcttcggcgttgccgggctcttcactgaaaatgaccgctatgtttcagatatacgggcggtgcgtccctgccgggtgctgctgctcagcgctccggctctggaacagctctttgcggcagacaatgccgctgcccttggctatatccggtttttgtccgggcgcatctgcttcctcaaccagaagctggacgcctttacctcctcttccgcggaggggcgcattgtggtgtggctgctggaaaatatggacgactcccgggtggtgatcccccggggctattccgatctcagccgtaccctgggcattggcagggcttcgctctaccggtgtctggacggtctggaagcccagggcgctctgcggcgccaggagcgggagatcgagatcctgcgtccggagctattgcagagccgcatcggctgaccatcgtttcaatccctgtattttacgggaatttcccgtgaaagatatattcaaaaagtctgcaaaggagtaatttaccaatgaagcgtctgcttgcacttgcaatgtccgctgtgatggcgctgtccctgacagcctgcaccagcggtaccgacaacagttcttccgtaccggaacagtcctcctcggtggctgaggagcgtgctaccatccgggtgggcggtctgaagggccccaccgccatgggtatggtcaagctcatggaagatgacgccgccggcaccaccgccaatgactatgagttcactctggctggctcggcagatgagatcaatcccctgctcatcaagggcgaactggacatcgctgctgttcccaccaatgtggcttcggttctctacaacaagaccgaggggcaggtggaaattctggcactcaacaccctgggtgtactgtatgttgtagaaaacggtgactccatccagtccatcgaagacctccggggcaaaaccgtttactccaccggtcagggtgctactcccgaatatgccctcaactatatcctcagtgagaacggcatgactgtcggcaccgatgtcactgtggaatacaagagcgaacacagcgagctggctgccctgctggctgccggtcaggctgacatcgctgtactgcctcagcccttcgttaccagcgtactgacccagaaccccgatgtgcgcatcgctctggatctgaccgaggaatgggacaaggtaactgaggacggcagcaagctcaccatgggcgcgctggttgtacgcaaggactttgctgagtccaatcctgaggctgtggaggccttcctcaaggagtaccaggcttccaccgagtatgtaaccgatgaggccaacctggacgatgctgctgccctgattgaaaagtacggcatcatcgctgcaaatgtggcaaagcaggctcttccctactgcaacatcgtctgcatcaccggtgaggagatgaagaccgcagcagaaggcttcctctccattctggctgaggccaatcccagctcggtaggcggcgctctgcccgctgaggacttctactacctcggtgcgtaaccgcaagggaatcttcatatcgctggctgtatgcgccgtctggctctctgtgtggcaggcggcgcatatgctggtttatgccggaatggggaccagtctgctgctgccctccccggctgaaaccttcctgcgcctgcggcagctgctgggtgacccctcattctattccatcatcggtcacaccttcctgcgcattttcagcggcttcctgctgagcacagcggcagggtgcattctgggcggactcactgccttttccccgctgctctaccggttctttgccctgcccatgaacgccatcaaatccacaccggtggcctcctttgtgatcctggcgctggtgtggatcaaaggggagaacctctccaccttcatcgccttcctgatggtgcttccggtgatctggcagagcgtccacaccggcctgggaagcgctgacccggaactgctggaaatggcacgggtctaccggttctcccgggggaagaaactgcggtacctctacctgcccgcggccctgccctatctcatctccgctatgcgggtgggactgggcttcagctggaaatcgggcatcgccggggaagtgatcgccattccctcccaggccatcggtacccagctctacaacgccaagatctatctggatatgcccgggctgtttgcctggaccattgtgattatcctgctgtcggcagccattgaacgggtggttctgttcctgctgcctgaccccaagggaggtgacctggatgcctgagatccgaaatctttccttctcctatgatgggacaccggtcttttccgggctctgtctctcgctgccggacggcagccgcactgccttgctggcgccctcgggattcggcaagaccaccctgctccggctgctctgcggcagtctcaccccccagagcggcagcatcaccgggcttccggcggaggggatcgccatggtattccaggaggaccgtctgctgcctggctgcacagtgctggaaaacctgcggctggtggctccggagcggccggacacagaactcactgccctgctgggagaactgggactgtccggctgggaaaacgctcgccccggaaaactatcgggcggaatgcgccgtcgggcagccattgcccgggcgctggtattccacagcccgctggtcatcatggacgagccgttcaaggggctggacgaaaccaccctggcggcgaccctcgcctgtgtggaccgctggctcggggaccgcaccttcctgctggtgacccacagccctcaggaggcggaacgcctgggctgccggatcacccgtctggacgagctcacccgaaccggctctgaaaagcagaattaaaaaacctctcctgccccacaatgggacaggagaggtttttgctttatagaaggggaaattcactgttccagaccggcgtcctccaggaaacagcgcaccatagcgccccgatggggattgatgctgtaaaagatccagtttccctcccgtcgggcctggaccagaccacagtcggtgagaatgcggatatgataggaaagggtgggctgtgtaatggcaaaatccttcagcagggccgccgcacacatctccttctgacagagctttatcacaatacgcaggcgggtctcatcggacaaagccttgaacaccgatacataatcggaacaactgaacctcatcttgtcttctcacaactccttgggtttgtaatcacgcatggactattataagacccggtccatggctttgtcaatcatcgcagcggtttcctgccgccacttccagcagtgtttcccggtgctcctgaagatattccagcaacagggcgatctcacactcgctcaggccgaacagctgtgccaggctccactgggccagggcatctgccataccgcagccagcctgtttgcggctgcagctccggtcggtgagccacaggctcagggatgcgccgggacagggcttcccatccgctgtgcagtccagaaagacctggagcggattctctgccggaagctgatctgccaccacccgcaccgacagggcacgggtctcgccgggagccagccgtgccagatccaggaccggcaccggcagccgccggcagcagggacagttcttcccttccgggagcagccgcagtccctcgggcagacggaactccagatggagatcctccaccggctcacagccgctgttgtggattacaccgcagagcaataccggctccccggcgcctgccagggtcttgtcagcactgcagcagagctccagctgccggtgattctcccgggctgtgagctcctcgatctgtgtatccagaaacgcccgcagctcctgaagctgccgcaggcgatcggtttgttttcttgattcggtcatgacctgcaccgtcctctccggtttcgaaaggcttaccgggggttcgaatcccccgacggtacagtgtatgcccggtcagtccggaaggttcccggcagggtcgatccccacccgggacagcagagcttcggcctcctcccgggacggcgcatgggtgccatagtgcagacaggccgcgctccctgccgccacagcccggcgcagggcctcctcccggggcaggccggtgagcagcgccgctgtgaaccacgccagcatggcatcgccggcgcccaccgagctgcgcacctccacctccggggcacgggccagaagcagcccctcctggtccagcagaaaggcgccgtcccggtccaggctcaccagcacccgctccgctccataccggagcagcagccgggccgctgccacacagtcctccaggcgctccaccggcagaccggtgatctcccccagctccagacggttgggcttcatcaccagcggacggatgcgctccacctgggccggacgcaccgccgccgtatccagggtaacttccgcccccagcaagtggatcagctcacacagcgccgccagatcgtccgccgtgatgccctcgggcagcttgccgcccaccagcactgtatcgccggggcgcagccgctcccgcagcaccatttccagacgccccagcgcccgatggtctgcccggaatccctgccgcatgacccggtactgcccctggggtgtttccagcgagaggttctcccggatgcgcccgggcagcgggatggggatacagcgcactccagcggcgtccagcagccgcaggaacagccctgcgttctcttcccccatcagacagatgcaggcacagtccagccccagagcggtcaatgcagcggctgtgttggcgcccttgccgcccgcttcactgtgctcccgctgagccggcagttcccgcaccggttccattccctccagatacagggtggtgtcgatggcgggaaacagggacagggtatagatttttccactgggccgggtcatgtccgatcacctccacggttgaaaaaacgcccctgccagtggcaatgcctgggcagaggcgtttttgaagttactcagtaaaaaagtcagcgcttggtgttgaagatgttgaggatctggaagaagtcctcatcgtcctcgtcatcttctccggcagcggttccctcggcagaggcagtgccggcattctcagcagaggcattgttttcagcagctgcgccggtcaccttctgggaaggctcgctcttgaacttgtagttggggatctcaaaatcctccgggtccttttcaaagccggtggcaatgacggtgatgtggatctcgtcctccaggttctcgtcgcaggatacaccccagatgatgttcgcatcgggatgggctgcgtcatggacgatctgggaagccaggtccacttcctccaggctcatatccaccgaaccggtgatgttgatgataacgcccttggcgccgtcaatggaagtttccagcagaggcgaggaaatcgccatcttggctgccacttctgccttatccttgccggtggcggagccggtgcccatgtgagccaggccagcgcccttcataatggaaacaacatcggcaaagtccaggttgatgatgccggggatattgatcaggtcagagatgctctgtacacccttcttcagcaccaggtcggcctgggagaaggcattgagcagggtgatcttctcttcggagatgagcttcagacgctcgttggggatcaccagcaaggcatccacattctcacggagagccgcgatacccagttctgcctggctcatacgccgggcgccctcgaacaggaacggcttggtgacaatacccacggtgaggatgcccatatcgtgcgccacttctgctacgacaggagccgcaccggtaccgggaccgccgcccataccggcagtgatgaataccatgtcggtgcccttgagtgccgcggcgatctcgtcacggttctcctcggcagcacgctggcccttttcgggaataccgcctgcaccctgaccacgggtgagctttacgccgatatggattttctgggaagccagagagcgcttgagcgcctgattatcggtattgatggcgatgaattccgcactctgcacgccttcgctgaccatgcggttcactgcgtttccgccgccgccgccgacacccacgaccttgatattggtttctttctcgaagtcattgttgtcgatgttgaaattcatctgcataatgctcgtaacccctttttatacttctcgaatattttaaggccaaggcctgaaactgtcctgcccgaattaccagaatcctccactgatttccagggagctttcgataatataccaaacttagtttatcagaaaacagcgcttttcgcaactgtttttatcccaaatattgtagatgtcccataaaatccacaggattttccgtaacttcgattcactctttcatcataatccgcagggactgcggaagatggcgaaataccgccggtcagctgttttcttccggctgggaagctccctcctccgaggacgctgtctctccgccgtccgcctctgctccggtctgttcggattcctctccgtccgcagtttcctcgccgtccgcggtctcctcgccgtcggtttcctctccctcttccggatcggtctccaccagctctccatggtagcccggctcgtggatctctgccggcagaatgctgatcttcttgaccatggtggcatccatgatcccttcaaaatcggcccggacattgttatccagcgcgtatttcgcaaagtccagcttgtcaggcagctggttctcactgcccagctcgatcttcacccgatcctcatagacaatatacatattcagacggtcggacaggtcaatcttggtgatgttctcaaatcctgtggcattgatcgcctccaccagataccgcagcattcccagggattcattgttctcctccgggatattcttgcagagctgcgcatcctcgatggtgacgccgttcaccaccagaatcccggacggcggtgtcccgctgcccagctccagcacacgccccttgtcactgaccaccacatagctgccatcctcctgtaagaaggtacccagcggctgggcttcggtgattttgagggtcagtttggagggaagattccggcgcagctgcaccgattcgatatagggatatgtatcggtgagcgcctgggatactttccggtcatccacccggaacaggttatcctccatctggattccggtggtctggatgacctcttccggcgtatagtgggtcagtccttcggcttcgatggtttcgatcttgaaaaacaccgtcagcgacagaatcagccccactgccacggcaatcatggtgaacatgatgtaatagagcagatttctcccccgacgccggcgttttttacgcaccggcaccttcttctgaggtggtcggctgttcggtttgggtttcctctgcttctgtttcatggtcgctccttgtgatattcgcccccagctgacggaggctttcgtccaggtgttcatacccgcgttcaatatgatggatctcggcgatcacactctgtccttcggcagccaatgccgccgcacacagcgccgctccgccccggagatcggtacagcgcaccgatgccccatgcagccggggcactccggtgacgattgccaccttgccctcggtgcggacacgggcgcccatccgggccatctcgttcacatggcggtaacggttctggaaaatcgtttcggtaaaaacggtggtgccgtctgcccggagggctgccgccatcaatggggcctgggcatcggtgggaaaaccgggatacggcatggtgcgcacccagcccagtgaccccagacgctccggcacagtgatggcaaccgcgtcccgccaggtacgcacccggcagccggcctgttccagcggcggaagcaccgctgccagatgggcgggcacacagccctccacggtgatgctgccccctgccgccgcagcacagcacagataggtggctgcggcaatgcggtcggggatcacccggtgacgcaccgcatgaagcgaatccaccccgtccacgatcagcgtcccggcaaagtcctgccggattctggcgccggctccgttcagaaagcggatcagatcatcgatctccggctcctgggccgcgccccgcaaaatggtgcgtccctctgccagcactgccgcaatgaggacattctgggtcgcccccaccgacgggaaactgagcacaatctcagctccgtgcagccgtcccatggggacagtgcagtccagggcgccgtggtcctcccggatcaccgcacccatgcgctccagcgcggccagatgcagatcaatgggccggggccccagctcacagccgccggggaaggataccctggcccgtccgtaccgggtcaggatcgccccgagaaaaatgatggaagaacgcatctcccgcatacagctttcgggaatttcccagccttgggctgagcgggaatccacctgtgcagtgccgtccggctgctgctccacccgacagcccagcgaccgcaggatattcattgccgccgcggtatcgctcagccggggacagccttcgatctcgctctccggcgggagcagtgctgctgccagcaccggaagagccgcgtttttcgctccatgcacccggatattcccgtgcaggggcgtacttccctcgattatgtaaactgccatgaaatggtcccaccctcctgatttgatgcggtttggaaagcgcttttagtctatcctatgcaatccatacaaaagggtgcaggttttttcatcttcaggcctttgccggctcctgtgccagctcgagaatctcccggctgatgcgctcattggcatccagccgggccagagaggccgccttcttccccagctcggtcagacgggccgggtcagagagcagctcctcaatggtctggcagagccgttcgccggtgagatccttttcttcgatcaccaccgccgctccgtgttccgccagcaccatggcattgtggtactgatggttctccgccacattgggcgagggaatcaggatggatgcccgtccggctgcctccagctcggtgagggtcatggcacccgaccggcagatcaccagatccgccgccgccagacagtccgccatatcccggatatactcccggatatccatgtggggatcaccggtgatgtccgcccccagctcccgcaggcactcggggaacagctcggtgccataggcgccggtggcatggatgtgatgggtgcgcccggtgggtgcaaagtgcgccaccacctctgccatagcccggttgatgcgctcggctcccaggctgccgccaaaggagagaatgcacacccggtccccgacgcccagcttttcccgggcagcggcacggtcggcaaagaggatctcctcccgcaccggactgccggtgacaatgggttcccggcggcattccagatgagccgcggcctccggcactgccaggagcaccttgtcggcggtcttggcaatgagccgggtggtcatgccgggataggcattggattcatgggtgaccgtcttaaatcccatccgggctgcctgccgcaggaccggcccgctgacatagccgccggttcccaccaccacatcgggctggaactgacgcagaatgcggcggatcttgccccagcaggtgcagagcagctccatggacgagagattatagcagaaattgtgccaggagagccggcgctggattcccttgagctccaccggagcaaagtcatagccggcttccgggaccagacgggcctccattcccttggggctgccgataaacagcacctgggtatcaggataacggcttcggatatagttggcggttgccagtgccgggttgatatgtccggctgtaccgccgcaggcaaagagaattttcatggatcattcgtcctccggcttggtttgacgggacacggaaaggattacgcccacctgtcccagcagcatcatcagcgaggttcctccataggagaagaacggcagaccgatgccggtattcgggaaactgttggttgccacagcgatgttgagcagcacctgcagtgccagctgggcagtcagacccagggcaatgaagctgccgaaccggtcccgggcccggaccccgatgacaaagccccgccagatcagcaaggcaaagagcagcaggatcagggtggcgccgataaagcccagctcctcacagacaatggcaaagataaagtcgttctgaggctccggcaggaacagatacttctgccgggaattgccgatgccggtgcccatcaggccgccggaaccgatggaatagagcgactgcagtgtctgccagccatcgccccgggcatctgcctcggggttccaccacacctggagccgtcccatcagacggtcccatttacccatgacaaagatcgccagcaatcccagcggcacaccgcctaccacagtggctcccagcagacgcaggttgagtccgccgaggatcagcatgatgagcgccatgcccaccacaattaccatggcggacagatgcggctcggcgatgagcagcaggatgatcacacccagcacacagccatagggaatgagtccctcgatccgccggacagaaccgggattgatggacatccagtgggcatagaggattacaagggagaacttggcgatctccgagggctggaagttgatgaggtcaccgatgaagatccaccggtgggcattgttgagtgccggcatgaagaatacgatcaccagcatcaccagggaggccgccatcagcggataggcaagccggtggaagatatggtagtcgatccgggagatgacgagcatagcgatcacacccggcacagcaaagagcagctgacggctgatgtaatggaagctgttgcccagcagataataggcattggcataactggcagaaaacagcataataaacccgatcaccaaaagcagcatggtgatcaggaaaaagaccatatccatctgtcccggcacaggccggaacagtttccgtctcggggaatcggacattttagccaaatcagcttccctccgtttgcattccaaaaatcagataaagcgcactgccagcacagccaggacagcgcccaccgcggtgacagcagaaaaagcaaagtcgatcttcacttcactcagcccgcacatctcaaaatgatgatggatagggctcattttgaagatccgcttgccggtggtcttgaaggagatgacctgcagcaccaccgacatggattcacagatatagatgatccccaggaaggcgaggatcaggggcatgcccacaccgaaggccagaccggtgaccataccgcccaggaacatggagccggtatcgcccatgaacaccttggcgggatagaaattccagaccaggaagcccaggcaggcagctgccagcgctgtggacagcaggttgatgccgccgaagcccatggccgcggacaccatcatgaagcccagtgccgatacacaggtcaccgaaccgcacagaccgtccaggccatcggtgaggttgaccgagttggtgatatagacgatacccaccacacacagcgggaagtagacaagccccagatcgagctggcccaggaagggaatgatcagcacggtggaagtatccccggcagtgtagaggatcagcatatacagtcctgccgccacaaactgcatgatgagcttctggatggcagtcagaccgagattgcgttttttcactaccttaatatagtcgtcaacaaagccgattataccaaaagataccgccagcaggatggtgccccagtaccgggcaatctccacctgtgtgccatgccagaggtcatttttcccctggctcagcatgaagtatcccaccaccgacgcggtgagaatggcaaaaatgaacatgaagccgcccatggtgggagtgccctgcttattcttgtgccagctggggccgatgtccagaatggtctgtccaaagtgcagcttgtgcagatagggaatcagaaaatatccgctgactgccgacaccgcaaagccaatggctgccacagccagtattgctgttgtattcatcgaagaaactctcctgtaattttggttttatcctggctgcagggcttattccgcatcgggaaagacaacccgcagtacctcctccagattcatgagcagactgcccttgaaccagacaatatccccgggacggactgcttcccgcaccgcctgggtcagagccggacggtcggggtattcccgggcatccgaaagaccggcggcattggctccctccacatagagatgggactgggggccatagaccagcagcttgtccgccactcgggccgcatgctgtccgatggcccgatgggactcatccgacgcgctgcccagctcccgcatatccgcaaagacacagatcttccggccttcgcactccatgccggacagggtatccagagcggcattcatcgaatccggggcggcgttgtagcagtcctccaccaccttgatgccgttccagagccgcacccgctggcgcattcccgaaatggcatacccggacagggcctcagcggcctcctcgggagtcatgccggcttcgattcccaccaggaacccagccagggcgttcatggaattgtgccggcccatggcaggaatccgggcaggatagcgtccacccttccagacgatgacaaagcgggtctccccttcgccggtgacaatttcctcagcccgggcatccagctccggcgcttcaatgccgtagcgcagcacccgcagccgggggatcttcacagtggagagcaggtcgttgtccccgcagaggatcagcgggctgccgtctgccataccctcggtgatctccagcttggctgccaggatattctcccgggtgcccagccgttccagatgggatactcccacattggtaatgacgccgatatccggctttaccaccgcggtcaggcggctgatgtccccacgggcatccatgcccatctcaaacacaccggcctgatagctggggtccagctcaaagactgtaaccggcaggccgaactcattgttgtgattgccctgggatttgagtgtcttgtaccgggcagacagcaccgccgcgataaagtccttggtggtggtcttgcccacgctgccggtgacacccactgtcagcagggaatagcgcttgcgataggctgccgcaatcgccagcggcgcatagaaggtgttctccacccgcagcagacggctctcctcctcgggagtgaggccctccaccggcttctgtaccgctgccagacgggcaccgccgcgcagcgctgccgccacataacggtgaccatcggtgcgctcgccctccagtgccacaaacagacagttccccgagaggtcccgggaatcggtggagatgtggtcgattgccacatcttccccatgatattccgcattcagtgcctttgcgatttcataggctgacatctgttccataactgtattacttctccgatccttcggttctctgccgggcaatcttacgggaaagctcccctacaatttctttttcattgaaatagttcgctccgcttgccagaacctggtagtcctcatggcctttgcccagcaataagagtatatcaccttccccgcaggtttcaagcgcatattcgatggcttcgtaccggtcggagataattttgtacggtttgccgctggcagtgagaccgggaagggcatcattgatgattttctcctccggctcctcccgggggttatccgaggtgaggatcacaaagtcggcatactttgccactgctgccgccatggcagggcgcttggagctgtcccggagtcccgggcagccgaacagcaccaccatgcggtcatcggtaatgccccggacagtggacagcacattgtcgatgccgtcaggggtgtgggcatagtcccggatcacggtaaagcccagggcgttgggcacgacctcgaaccgtcccggcacaccggcgcagtccgccaggtctgccgccgcctgtgccatgggaacacctgcctcggtcactgccgccagagcgcccagcgcattgtggatggagaagtccccgggggtggagatattcaccttctccagctcgccgccgtgcagcaccacaaagctgctgccgtccgaacggatgcggatattccccgccagatagtcggcggtgtcgtccttgtccgagatggtcacagtgcggcaggagagctcctttgccaggatgcgtccgtgctcgtcatcgatattcagcacagctgtatcacaccggtcaaagagcttgcgcttggcagcgaaatactcctccatggtgtggtgatagtccagatggtccagggtcaggttggtgaacaccgccacatcaaagtggatgccgtccgcccggtgctggtccagcgcatgggaggatacctccatcgccacatattcacagccggctgcccgcatcttcgccagcatcgactggagctgataggggtccggtgtggtgaactttgccggcagcaccaggtcaccaatctcattctgtaccgtgccgatcagtccggtgcggtgtcccgccgcggtgagcaggtgcttgatgagaaagacgctggtggtctttccgttggtgccggtgacgccgatcatcttcatggaatctgccgggcgtccgaagaagttggcacagagcagcggataggccgcatgggtatcctccacccggatctgccggggaagtcccaggtcccggtccactaccacagcggctgcccccagttccagtgccttcgcggcaaagtcgtggccgtcgaaccgctgtcccttctgacagacatagacccaacccggttccagctgacgggaatccgcagtcagaccgacaatttcacattccggggcttccccttcccaggtgatcccctccagcagttttgtaagaagcatgatagaccctcccggtccttgtagcgttttttaatccggcagggcatttccctgcacttcaaaggtgacggtgatgacggggccgatctcggcattttcgcctgcctcaatggactggctccctgccacacagccctcgtgctcgatgctctcgccctcgatcttgatattgaagccggcattgaggatcatacgattggcctcattgcccgacttgccgatgacatagggcaccgcagccgtctgtctttcggtctcctccgtgtagagcacaacggttccgccgccggggataggcatcgccgcacccggggtctggtccacaactgtggtgccgttgcccactacccggtactgcagaccagcctgcaccagattggtctgggcctcctggaggccatagttgatcagatagggtgttgccatatcagccgaggagagctgctcctcggtgtagttgggctcgaagcccagatagggcagaatatccgccagaatattgcccacaaccggcgcggcgataaccgaaccgtactggttgttcttctggggctcatccagcatgaccagcacagcgatctcaggatcgtctgccggggcaaagccatagaaggaaaggatgatgtcatcgccttcctggtccagcttctgggaggtaccggtcttaccgccgatgcggtagccgggcacagcagcacgggcacccgaaccgccctcgccgctgacaacctgctccgcataggaggcgatgagggccgaggtctcctccgagatgacctggcgcaccaccaccggctcggtattggaaaccacattgccgtcgctgtccagcacctgggaaacgatatagggctgcatcaggtagccgccgttgaccgaggcattgaccgccgtcatcagctgcagggcagtgaccttgaaggtctgaccgaaggatgccgacgaaagggacgccatgttctcattcatcatggtctcccggctgtgcatgatactggtggcctcgccggggaggtccacgccggtgatgtcatagaggccgaacttatccaggtactccatgaacagttccgcgcccagggcctgaccggtcatgataaaggccgggttgcaggaacccttgatagcgcctacaaagtcgatggcaccgtgtccgccgatcttccagcaggaaatccggttgcccgctacctcgatatagcccggacagtagaacggggtggaaccggtgactgtgccggtctccagcgccgccgacgcggtgatcagcttgaataccgatcccggttcgtaggggtcagaaatggccttgttccgccactgggccatctgggcttcacccagggctgtatagtattcgtccagtttttcctcgtcgtcgccggcttcctctttcatctcgtccagctccgccttggtattggtatcatagatctcactggggttgttggggtcaaagtccggcttggtggacatgcccaggatctcgccggtcttgacattcatcacgatgcccacagcacggttctgcacctcatgctcctgtacggcattttccaggtgcttttccagatagtgctgcactgtttcatcgatggtcagcaccaggctctgcccgtcctccgcatcgtagatctgctgctcactgaagggcatggcagttcccttggcgttgcgcaccgaggcgatgacgccgttggtaccggacagggtcttgttgtaataggcttccaggccataggcgccggtgccgtcattgccggtaaagcccagcacagtggacgccaggttgccatagggataatagcgcatggtatcttcgctgagatagatgcccttgacatcattttccttgatgaaggatgtcacttcatcggcggtgtcgttgtccgccttcttcttgatggtctcattataccgccaggtcttgagcgatttttcatagaccatgtcgtaatccacatcgaggatctccgaaaggcccgaagccaccagctcccgctggtcctcctccatctccgccggcgaaatgaacaccgtccagacggtgacgctcttggcaagtgttttcatattgcggtcatagatattgccgcggttggcggaaatggatgtggaatacatctgctgactgctggctttttccttccacatatccgcctggaccacctgcaaataaaacagacggattataagaatggcaaagcctgcgcccagcgtcatgataatcagccgtgtgcgcgacccgaacagtcttgaacccatgcctttctgctccaatgcgctgcctccctgcaaattgtgataaaatccgaaatttcccgtgaaaagaaatcaagagttaaggacagacacggttcttaactctcaattcaacttaatttttattgaaactgatcctcagatattccaaagcggaaccgatcgtatctgtaatttcctccaggatcgaagctcctgacggtgtgctttcgttggtcacgatcttatcgccgccgcagcggttgacataggtgacctgatacggctccagctcggagagccccagctcgtttttggcaatgtcctcaatgttccgcagcgacatccggctttcgatggaggtctgcagacgctcattctctgccagaagcatctggtgcttttcctgggcctctgccacctgatcgctgagctcggtcagcactgcgttgctgtacagcagcatacacagggatacggtcagcagaaccaccagacccactgcctttgccagcatcttgggccgggccagttcctcctgactgtgctgcgctactacccgtaccttcggcgactgttctgcctgtcgtttgggcttgggctcgtatattgaaagatcgtatgctgcgctctgcatggcggctcactcccttgtatcgtaagaccgttttttgtccggtcctggtgtcctatattcgttcacatacccgcagcttggcgctgtggctccggttattttctgccagttcctcctccgagggaagaatcggcttgcgggtaatcagtctggcctgcggggtacgcccgcatacgcacaccggaaagtccggcggacagatgcacccctttgccaagtcggcaaatttctgcttgaccatgcggtcctccagcgaatggaaggtgatgatggcaaatcgtccgcccggtgccagacagtcaaacgcacggtccagacactgggacagatggtccagctcgctgttcaccgcaatgcggatggcctggaaggtccgttttgccggatgaccgccctcccgccgggccggagccgggatcgactccttgatgatctccaccagctggaaggtggtttcgatgggggcctgttcccggtgcttctcaatgttccgggctatcttataggcaaaccgctcctccccatattcccggaggatgcgggtcagctcgtccacactgtaagtgttcacaatgtcccgggcggaaagtccgctctggctcatgcgcatatccagcggcgcgtccacattgtaggaaaatccccgttcgccccggtccagctgatgggaggatactcccagatccagcaggattccattgacctgagggatctccagctccgccaggatgcggtccatatcggcgaagtccccctgcaccacctgagcacagggatagggcgccagccgctcggtagcagccgcgatggcatccgggtccttgtcaatggcgatgaggcgtccggtagtcaggcgtttggcgatctcccgggaatgtccggcgccgccggctgtgccgtctacatagatgccgtcaggagcgatattcagcgcctcaatgcactcattgagcagcactgagtaatgactaaattccatgtctttgttcctcccgcgtcagaatcccagttcgtccatggcagcagccacatcatctgccgaaacctcgctgcacagggcctgatactgggctgtatcccagatctccgcccgcaccgaggcgcctactacggtgacatccttgtccagatgggcatattccctcaggttggcgggaatgaggatgcgtccctgcttatccggttccacttccaccgcaccggcaaagaagaaccgctgcagggtccgggaacggctcatgggcagagccttgatcttggcctccagttccgcccactcactgagcgaatagacaaacagacagttgtccaggcccttggtgacaatgaacttgtccccgagatcttcccgcaggcgcgccggaaagtgaaggcggcccttgaggtctatactgggattgtattccccgatcagcatcgccttcaccccctttttggtgagaagaacaccacttctccccacttttacccacttacttaagttaattatactcatgcttgggttaaattgcaagactcttttaccaattcatgaaagttttttgaatggaaaattatgtgcaaaaagcggacgaaacctcagaaaaatacactttgccttgtaatatattccaaaaagaacatatattcgcatcccctctttcctgaatgcggcgttttcatttttccagttatggtaaaatatgtaatgtatcaaaccacaatatatagtggcgcaatgaacctcttccggctcgaaaaagacctctttccaccacattcgactgatttctgcatgaaatatgtcacaggacgcaaaaaaacggccctccatacggagagccggttcatggatatgccataaaggccggtacaatatttccagccggaactgggccggatgggatcagtttccgccccggaagcccttgccgatcacctgactggtgttggtaataaccacaaaggcatggggatcggcttcccggatcacacgctgaagccggctgccctgctgacggcccatggtggtcatgatgacggtgtggtcctggtgggtatagatgccctctgcccggtaggtggaggccgaacggttcagatcttccacaatgaaccggcagatgggatcgggattatcggtgatgatggtgaaggacttgctcaggttcatgttctccatcacgaagttgacggtcaggctcttggtacccagacccagcagggagaacagtccggtggtggcgccgaaagccgggaaggcagcggcggcgatgaagaagtccgccaggaacagggcgctgccgatgtcagcgctggtgtacttcttgaggatcatggcgatgatgtcggtgccgccggtggaagcgcccacattgaacagcactgccgcacccaccgaaggcagcagcacgccgaagatcagttccagcaggggctgatcggtcaggggttggctcatggggaacagaacctcaaacaggctgaggaaggcggacatggacacagtgacataggcggtgctgacaccgaagctcttgccgagcatcacagcgcccaggacgagcagggccaggttgagcacccagttgatgccgcccagcgaaagctcggggaagtaatggcccagcacaacggtgataccgctgacgccgccaaaggagaagtggttggggtatttgaagaagtaagcgcccaccgcagtgatgaacgctcccacattccagatcagaaatgttttgagattttctcggctgaaaagcttctgcattgatttcatgtgacacctcaaagattcacttgctgtttgctattttggaaaacagtatgattatacacatttccccggcaactgcaagtactttcgcagtacttcttcgatttttgcaggaaaacagtcattttagataaacccccccccttcccgccccggggaatcactgttctgcgcatcagctttgcagcctgataaagtcacagcaatgcgggtttccggcaatttccggtaattgcaggatttccgtcatttcagggcaaaaaaacaggagagccaacgctctcctgtcctggatcaatcagtttttattcttgcggatgatggttccctgggtgaaggagccctcgggacagggcatggagaaggccatcatggcatggggtgccgcgggaaccgactccccttccccattgcggatctccgccactgtcagcttgtaagggggctgaccgggctcgaggatctccacctcgtcccccacagcgaaccggttgcgctgggtgccatagagccagccatcggcacagtgatccaccacagccacaatatcgcattcccgcacatagccgccggacagatagcactgatccgggcgtccgtaatagaagccggtgcagtactcccggtggctgaccttgtagacttcctctgccagccagcctgccaggtggtaattctcaggatcagccacatactgatccactgcctgccggtaggcattggtcaccaccgacacataataggcactcttggcccggccctcgatcttcagcgaggtgatgccggcatccaccagatcatcgatatggtcgatcatcgacatatccttggcattgagaatataggagccatgctcgtcctcaaagatggggaaatactgtcccggacgcttctcctccatgagatagtagctccagcggcagggctgggcacattcgccccggttggcgtcccgtccggtgaggtagttggagagcaggcaccgtcccgagaaggacatgcacatggcgccatgcacaaagcattcgatctccaggtccgcaggggtgcgccggcggatctcccggatggtctccagcggcagttcccgggccagtaccacccgcttggcgccgagcttgtagagctcattggcggtgaggtagttcactacgccggtctgggtggagatgtgaatgtcgatctgcggcaccagacggcgggccatcatcagaatgcccacatcggccacgatcagcgcatccactccggcatccgctgcccggagcaggaactcctccagctggtctgcctcctcattggtgggcaggatattgcaggtgaggtacacccgcaccccatgctcatgggcaaacttgacgccggcccggagctcctcttcgttgaagttgccggcattggcacgcatcccgaagctggtcgctcccagatagactgcgtccgcaccgtatttgaccgcagcctgcagccgctcaaaatcgccggctggcgccagcacctccggtttgatccgattgctcattctgatgcttttcctcctgttttcagtcagattcccgcatcccggatattggcctcatgctctgccagtgtctgggcatacaggaaattgccgtccttatcggtgatgaagtaatagtagtcatgctctgccgggtagagcgctgccttcagcgcgtcttcacccgggctgcagatcggccccaccggcagtccgttgtggacataggtattgtagagctgatcatagaagtcctcggtatcactgccggcatagggcaggatctcgtcccggatataaaagactgtcacatccgactggagcttgggatagtttgccgggtcattcagacggttgtggaatacccccgacacattcgccatctcagacggataggaacactcggcctggatcaccgaagccagggtcaccacctcatcgatggtcatgcccatttcctcggcacggtcccggatctcctgatccacgatctgctcgaaccggtccaggaaccgggccgcaacactggcaggcgcttccccgagatagaaatcgtaggtatccgggaagatatagccctccagacggtgatagcggtcatcgtccggcagttccgccacaaagtcgtactgactcaggtcggcagtgtccagatagtccaggaactcatctgccgggcagacacccttttcctccagcagatccgcgatctcccgcagggagagaccctccgggaaggtgacccgtgccacatcttcccgctcgctgccggcagacagggcctcgacgatctcggcatagctcatatccgaacgcagcacatagctgcccggcttgagccccgctccggcaccggtcatacgcatataataatagaataccgtcttatggctgatgatgccgtcttcagccagctgagcggcgatctgtctgccggaactgccggaggggatcttgactgtcacctctgcgctgctctggaagctgccgctgtaatccgcccaggtatggacgccatagacagcgcctgccagcaccagtgccgccagacaaatcgccagtattctgcctttcttctttttgaccggacgctcccgccgtcttgtgcggcggcgctgattttcttcgttcatttcattctccttggatcatgggtagttcttccggcgggactcagtcccggtcatggagccggctgcggtcggtgagccggaaaaagctctcggtgacgatcatatccaccggaatatcataccgtccatagtgcaggaaccgcaggatattgcgccggtaggtaatgccgatcttatagccgtcatagccggacaggaaacggtcataatacccgccgccatatcccagccggtagcccttgagatcatacatcagtgccggaacaatgcacaggctcccggtaaaatcggtgagtttctcacaccccggcaccttgggctccaatacgccgaaggtgcgcttttccaggtcatccagactgtgaatccgatagaattccatctgccgggtgccttccacacaccggggacaggccacctgtttgccatctgccagagcccgctgaatcagtggaatggtatccacttcgatgggcttggaaacatagcacagcagagtctgcgcctcccggtactgatacagcgaacagatccggtcggtgatctgccggtccatctgtgccttctcctccgggtccatgccccgccgcatggctttggccttgtcccgcagcgaattcttataagcacggatatccactttgcgcatcggtttcaccccttttttgcattctctcctggcagtttgccttgattttgttaccagtatactataccggctgcttttttgtctacaccatgggtcaaaatccgcccgattctgccggatgctgacggcgcagccaggcatccacttccgccagtacggcctggtgaatctgctccggcggatagggatcactgccgtcacagcagcggatcaccttccagccccagtgctccgccgcatagagcgccgcgccccggcaggccatcagataccgcaggttggcctcgtgcagatccttccggctctcgtccccgccgtaccgcttttccagcagccgtcgggaggtattcgggtccatatccagatagatcaccagtcccggttcaggcagtcccatgcgggtgtattccagatccgccagccagtccagatagccatcccactccttctgagggagcttgaccatctgatggcaggcattggaggtggtgtaccggtccgccagaatcagccggccttccttacagtcccggctccagtcggtctggtaggagatataccggtcgatgctgtaaaaggtggatgccgcatagacattgacctcctccaggctgccgatctccccgttcaggtacatctgcaccggaatggaggatttgtgggcatagtccgggaaggagatacgccgcaccggcgttccggcggcagtgaggctctccgccagcagaccggcctgggtggccttgccgctgccgtccagcccctcgatgacgatcagtcggcttgtattactgctcttcggcatggcgaatcctctctctcagctgacggtattcctcccggacatccgccattttgccgcagctcatctttccctcgggacagggaccgctcacgcagctcggaccggcgtttacaaacagagtgggcgccacctccgatacctgccgcagcatttcctttgccaccgcccggatctcccactgggcacggttgcagcagcggtgccggaagaagtgcagcagctcccgggcattcatggtcatgatcatgttggtgtcggcggcattgggcagtacgaaccgggcatcttcaatggccatcttctcagcctgacgccgggcagccttctcctccatgccctctgccatcagctcggcagtgtgccgctccttgagccggtctgccagggcgtcataggactggatggcattctgcatggcctggttgtagattgccagggtctcggggtccttttcgatctccggcggtgtgacaaaggagaactgcttctcccggacataccgctggctctggacactgaaggacgcgatacggtgtcgggtgatctgtgccagcagcgaccgggaaaccccttcaatgccgaaggtgaagctcacatgctcaatggggctctcgtgtcccatcgaggcgagcatctccacaaactctgccgccttttcatcggtgagcttgtccagcagggtatccacgccggacgcgctgtaacagagcttggctgccgcggcaatataccgctcgggatcgggtgtgtgagtgagaagtgttacctttgccatgcttgtcctccttgggttccaggaaaagggagccctttccgggcccccgttttccagtgatggtgtgtatggatatttgtgggaatccttcccgttaccggtcgcagccgcaggacttctcctgactgatctccgatgcgttgggcgggaagaaggaatcggtggggaacttgatcttcttgaacagctcgcagggatcgccggtggtgggagcttccggttccttggtgggaatgcagaagtcgtaggccggcatgagcatctgcacccggcgctccatctggacaatgatgaagataccgatggtgatcagaacctgccgctgcgaaccgcaggaattacaggaattattgcagccgcacgaagtattgcagccacagtcggtctggcagtcacaggggttgcaggaagtgctgcagccgcagggattgcaggaattgcaggaattgcacggattgcagcagccgcagctattgccgcagccggtattgcagtccacgatccggcagcccagagccaccggcgcgctgacctgcaggcagaccttgggcataccgccgttctggttggtgccgttctggtcactgcagaataccttgacattgccttcactgccgtacaggatcatcttgcgggtgaaggtggtgacaccggtgatggtcacacaggacatacccggcatctgggcctcgaaggtggcctggaagaagaaggtgatatccacggtatagaagcccttgttgaaggggatgggctccacatccatgtagacattctccacttccacttccttgagcttgagggagcagcagttattcacaatggactgtacatcatccggaaaggtgacctgcaggtcctccaggcagttcttgtcgctgacgctgtcatagacacggttggtatcgatgcagactgcttccttgaagtttgcaccgggacgcacgctgggaacacggccgcaggcgccctgatatgtattagccatacaaaagatcctcctgtcaaaatgatgaatttg

SEQ ID NO: 1593 - DNA, 3676 bp, Unknown
  16S sequences of unknown bacteria
ccttatagccggcgtgctccagcacccggctgatgatggcgtggccaaaggacgggtgatcgacgtaggcgtcgccgatgatatagacgaaatcgcattggctccaacctcgggcggccatatcgcgccgggagatgggtaaaaattcctgcatcgcgcgctcctttacttgccgccggtggagccgaagccgccagcgccccgatccgtttcggtcaggtcctcagcgagttggaagtccgctgtcagatacggggtcagaatgagctgggcgatgcggtcgccgggctcgatggtgcggactgcgtcgctgtgattgtgcagcgcgatgaggacttcgccccggtagtccggatcgataacgccgactttattggccggggccaggccctgcttacaggccaggccgctgcgggcgtagatcagcccggcaaagcctgcgggaatctccagggcgatgccggtggggaggaagaccgtctggccgggggcgatggtcatcggggcgtccaggcaggcgtaaagatccgccccggctgcgctggcggaggcatagtgcggcggctttgcgccggtgcgcaggcattttactcggagcgtttgcatgtttttttcccctctttttcatcggtccaaagcacgacttgcccggcctgttctgttttgcgcaggtcgatcaggcgctggttttctgagccgcggaagcgcagctgcagcttttttctggcaaggataaattccccatccaccaggacatccaccaggccgagcagcgcccgggtgacggcaccgtcgccgattttcccggcagcaagatcgtcgtagagatagccggagaagcaccagatgttttttcccgggtaagcctgcttgacctgccggaccagatccagcagggccggctggttctccggctccataggctcgccgcccagcaatgtcagcccggcaatgtaatccggctgcaggagccgcagaagctcgtccaccgtgtcctgggtgaagggctggccgtaggaaaagtcccaggtctggggctgaaagcagccggggcagtggtgccggcagccggagacgaacagcacgacccgcacccccgggccattggcgatgtcacaatttttgatcacagaataatacatgatgcgttcctcaattcccacgcggtgatcttacccgctgatttcttgttattataccagcttccgggaaaaaccacaagtagccgcgcggagaatggaaaatggtttgcatttttgcaaaaagccgttatactaaaagaaaaaacggagtgtgaggtgtgtttttatgttttcttatgaagatcgctgcatttatcgccgcagtccgctgatcgaagtgatctgccagctgcgttttcctgcgattttgcgcattgacgcgcaggcgccggcccagtttcaggaggccatccggggcgactacccccaattctcccagcggatggagaatctgccgccccggaaggagggcggaaagctggtgcctcaggggacgcagccgaattatcaatttctggccaaggacaaccactggaaggtgaacctgaccaagaattttatcagcctgtcgaccaatcactatacccgttgggaagactttgccaagcggctggataaggtcctagcggcgtttatccggctgtatcagccaacgtattttgaacgggtgggcctgcggtttatcaattccatctcccgccgtgcgctggagctggagggggcccagtggcgcgagctgctgcagccgggattcctgggcttgcttgctgagccggatatgaaggagcagggcgttatgggcgaggggcagcggtacgatttgccgctggccggcggctgccgggcgaagatccagtccgccccggcgatgatgcagcggaaggacctgcgcacacagcaggagcagcaggaggccgtgtttatcctggacctggatatttatatgagcggccaggtcgaagcgccccacgccgccgccgcactgcagacggcgcacctgcaggcagacagcatcttccgcggggccatcacgcctgcactgcatgaggctatggacccgatgcagccgtaacgcgggacgaaaacagaacctataacgcacagcgccgctggggaaaccctggcggcgctgctttttgtggttgacagacggcagaaaatcgggtactatttgttggagaagtaggaaaagtgggaatttctcctgcgatattcttttctatttatattactgttttaaatgtaacgggaggtgacggcctgtgccgcggggaaagcatcggttgggtatgcccaagggaaagcatatatttggcacggcgcgggtcggcgataagggccagatcgttatccccaagcaggcgcgggcgctgtttggcatccagccgggcgatacactgttgcttctgggcgatgaggagagcggcattgttatcacaaagccggaggtcgtgaacgatctggcgtgccaggttttggagcgggtcaatccaagccagcatttggaggaagaggggtaagcgcaaatggatcgggaaatggaactgcaatatgaaaatatgggcatcagcccggcggtattcgcctacggtgagacggtgctggaccggctgaccgagcggtttgccgaggtagaccgggtggccgagcacaatcaggcgaaggtcctgcacgcgatgcagaaaaaccgggtcaatgccacctgctttgccgccacaacgggctacggctatgacgacctgggccgggaccggctggagcaggtctatgccgactgcttccatacggaggcggccctggtgcggccccagatcacctgcggcacccatgcgctgacggtggcgctgtcggccaatctgctgccgggggatgagctgctctccccggtgggcggcccgtatgataccctggaggaggtcatcggcattcgtgagagcccctgctccttgaaggaatacggcgtcagctaccggcaggtggatttgctgcccgacggaacatttgactacccggccatccgggcggccatcggcgaaaggacgaagctggtcaccatccagcgctccaagggctatgccacccggccgacgttcagcgtcgagcagatcggcgagctgatcgccttctgcaaaagcgtcaagccggatgtgatctgcatggtggataactgctacggcgaatttgtccagacgaaggagcccagcgattttggggcggatatggtcgtcggcagtctcattaaaaatcccggcggcggccttgcgcccatcggcgggtatatctgcgggacgaaggcgtgcgtcagccgctgcgccttccggctctcggccccgggcctcggccaggaggtcggtgcgaatctgggcctgctgccgtctttgtaccaggggctgtttttggcgccgacagtcgtctccggggcgatcaagggcgcaatctttgccgccaatatctatgagagcctgggctatccggtgatccccaacgggtcggagccccgctatgatatcatccaagccgtgacgctgggctcccgggaggccatgctggccttctgcaagggcatccaggccgccgcaccggtagacagctatgtcgatcctgtgccgtgggccatgccgggctatgagtcggaggtcgtcatggcggcgggg

SEQ ID NO: 1594 - DNA, 3577 bp, Unknown
  16S sequences of unknown bacteria
cctaaaattgacaaagacaaaatgcttaagaaaacaaatagcattaagggttcaaatgctctgccgccgccttcgtagaatttggagaacagctccacaaactgaagtcggtcggtatggacatatgcgcccaaaaggtttatggcgatattggccgtgtgggccgtcaggaaaagaataaagagaagaattccttcggcaacggcgtttgacggcatggcgcctatgagatttatgacctgtgcgatacagcccgtagcaagaccgagggcaagcaatcgcgaataggaaagaatgtcgcttaaataccctgtggcaacattgtataggccgtatattccgccgaaaaatctcatgaaaatattttttgagcttcttgaggaagtgagaaccacaagaacaactccgacaattgcaacatatcctccgatttttgaaagaccttcggggacggacgtgagtatacccgccgcaagaggcgccgctccgagcaccgtaagcatgacgggaatcacatcacagacggcgtcaagcctttttcccgccttccactccttatagaagtttgccgacagtcccacaaaaagatgtatgatgccgagaccgaaggaaaagagcagcagcttcataggcttatttatcggttcaaaccaaagcgccgtcgagccgatgtcctttccgaaaaagtcacgggcaatcacctgcggcaaatcgccgtaccagcttccgaaaagcgcgccccaaaagacggtggagataccgcaatatcggaacatacgcattgtttcccgcatcttcgctcccagattgaactttttgagagcaacggtggtgacaatgaccataacaagcccgtatccggcgtcggaaagcatcattccgaagaaaaggtaatagaaaaacgacattatgggggtcgggtcgagatcgtcctttcccggcagcgaatacatttcggttatgccctcgaccggtctcgaaaacctgtcgttttcaagcaaaacggggacatcatcctcctcgtcgggctcgtaaatcctcaccgcagccgaaaagctcttttcaagctcctcggaaatacggcggccgtatttttcgggaatgtagccggatattatcaccgtttccttgctttcggcggatttttgcagagcacaaagcctatcctcctccatcgaaagcccgtcataataaagctcggcgtccttaagtccttttgaaagctcggtgagacttttttccttcgtttcaacggtgctttgcttttgctcggcctcggccctgtatttttccgaaagctgcgccggcgttttatccgctttgtcggatatttccgaaaatcccatgtcccgaagcaccgaaaacacctcgtcggcgtcggattttaggcaaataacacatatatcggtggaagtcttttgccgatttataacatgaacgtcggccttttcgcttatgtcggaaaaaagtccgtcctcaaatttcagcggaacgctgccgacaaagctgacggtaaattttgtttcaacgcctgccgtcggaatgtcgagctttttccaggtctcaaggctttcgcaaagaaggccgagccccgaaataccacttttcaattcggaaatttccctttcggtatcgagggtgatttttattttctcctcaatttgcccgaaagacttgcttttctccttaaattccttttcgccaagctcccttttcccttcgagagaatcaagaagcgacggctttttttcggaatacctttgcaaaatttcaattgcgttttgcgcctcggtccgctttttttcaagctcggaaattgccgacgcggccgaccgttttgcaagagcgtcgtccgaaacatcgcatatttccaccgagccgcgccgctgaagacggtttatgatttttttgccgtcttttttcagcgctattatctcaatgcgctgcatttttaattttcccgtaaaatcaccttctttcccctgcggcggttacgcctgtttacggtaaatcgaaccggcaaccgccgacacggctttttcgcgatttttctttatctgcgtttcaaggtcggaaagctttttgtttgtttcggcctctatttgaagcctgctttcttcggttcttttaaggtttttaccttccatttcctttatttttttatcggccttttttaaaatagcatttcgcttttgctcggcctctttttttgccgaaagaattatctcgtcggcggtgcttttcgctttttcaagcttttgctctcccgaggcttcggtttgcagaattttttcgacagattcggaaaccattttatttcctcccttcgcaaagaatattattcccgaaaataaacaaaaaaggagcgcatcctacagacagctcccatctaatttaaattcgtttttcaaagttcctttgttgcttttataatagccgtaggaaaatattttgtcaacatttttttgtgttaaaaaatcagtcaatttatcttttttgcacaaagttatgacacaaaggggttattcgtcataaaaaatttttaaaaaaccgcaaaaatacccttgacctaaagttaacttaaggtataaaatatactcagtcaaatattcaggagatgattttatgaaaattatttcaagcgattattttgaaaagcaaaacgttttcggaaagggcggagaaaacacagcctttgcaaaatattttgtgggcaagtcgtttttaaatcctctgaccgacaaggattctcccctttttgccgcaaacgtgacctttgagccgggctgccgaaacaattggcacatccaccacgcaaaaagcggcggcggacaaatgcttatatgcaccgccggcgagggttggtatcaggagcaaggcaaagaggcgcaggagcttgttccgggcacggtcgtggtgattcctcccgaggtcaagcattggcacggcgcaaaaaatgacagctggttttcacacatcgccatatagctccccggagaggactactccaacgaatggtgcgagcctgtggacgacgaacaatataacaatctttaagtaagtgtttttatgagtaaggttacggcgggcagagacgccctcggggagtttgccccggaatttgcgcatcttaacgacgacattcttttcggcgaggtgtgggcgcgggagcaaaagctttccaagagagacagaagtcttataaccgtttcggccctcatggcaagcggtattctcgacagctctcttaaatatcacatttcccatgccaaggaaaacggcgttactaaagaggaaatggcagaggcgattacccatcttgccttttacgccggttggccgaaggcctgggccgccttcaatatggcaaaggaaatttactcggaagacaaataagcctccgtttttgcctttaaaagggtaaaaatcacatacagccgacaaaatcggcaaaaaaactcccgcagctgtcattcggctgcgggagtttttgttatcttgatttaagcggggaaattcgagccgctctgtcttgaggagaaaggattttgagaagatgaggacaactgcttttccg

SEQ ID NO: 1595 - DNA, 1663 bp, Unknown
  16S sequences of unknown bacteria
aacggagatcatggaataagagatgaggaagggactgcaaagcagtcccttttttcttaccttgcatttggtatgaaatcgtattattatagaatataaagcatagccaaaacatatttttttattttccttttttgtattttcaccatgcatttagattttgtttgatgacaacatatatacttgcatagcattgtaaaggggcctttgcaaagggcgcctttcaaaatagtaaataggtaaggagtaaaaggatgaagacattttccaactttaagttccacatgtacacggacgtattgtttggcaaggggaccgaaatggaagtcgccaacatgatcaaaaagcatggcggcacaaaggtcatgttcgtatatggcggcggcagcatcaagcgcagcggcctgtacgataaggtggtaaagtgcttgaacgatgcgaaaatcgattttgtagagttgggcggagtaaaggctaatccgctgcgctccctggtagaatccgggctgaaaaaggcgcaggaggaaaaagtggacttcatgctggcggtaggcggcggatctaccatcgatacggccaagggcattgcgctggggctggccaatgacggcaactattggcagttctacaatggcgtgatggcggaaaaaatgattccggttggcacgatccataccatttccgcggcaggcagcgaaaccagcggctcctctgtgttggtagacgatatggagaccaagaaaaaatttggctttatgaacccggcttgccggcctgtgtttgcgattatgaatccggaattgacctattccgtatctaagtaccagaccggtgcgggcacggctgatatttttgcgcatacctatatgcgttatctgaccccggatgccagcttcctgggcgaccaatactgcgtcggcacgctgaaaaccgtcgtgaagtacggccccattgccgtcaatgatccggaaaattatgaagcgcgcgcagaattgatgctggcaggctctttctctcacaacgatttgacgagcattgggcgcgcggggatgcctaagggcggcgagcacggcctggaacagcagatgagcggcatgtacgatacggcgcacggcgcaggcctatccgtgatgatgccggcgatgctcaattatatcatcaaacatggaaacgaggcgcaagtggcccgcgtggcgcagtttgccacggacgtgtttgaagtggatgcggactatgctgatgccaagggcgtagcgcaggaaggcgtacgccgcttcaaggcatggctggcctctttgggcatgccgctgaccatcaaggagctgggcatcgatcctaaggagatcccgaacattttggatgccacggtgccgacggaggactccgccatcaacggctttatgaagatggatagagctgcggttaaagagatctatgaatccgcagcggaataattggtgcaaacgtaagggctgcagcaatgtctgcggccctttttttaggcgtttttccggggaaaaagcggaattagccattgacagaaaagggaagttatgctattttcattaggtgaccccgactggggctttattcatcatgtcgtgattttgaaaccatggaggtgtggatacaatggcagctggaagccgtgtaaaggttacgc

SEQ ID NO: 1596 - DNA, 10443 bp, Unknown
  16S sequences of unknown bacteria
gatctctgaagacggttctgtcgccacctccagaagtccatccatgccacagaccaccttcacatccagatcttttactctgtcttttaattcctttgccttttcttctttccatacagctaccagtcccggatggaactcgcggatctgcttttccagcagttcaatattatttcccgccgccagtgctgtgatctgaagatcaccattttctcttgccacttccaatgtctgtgtgccaatggaaccagtagagcctaagattgctatcttcttcatctgctgttctcctgttctcctgcagtcgcttctgactgccttatttattcccaaccgatcatccaagcatccttaatgcaagtacatagatcatgggagctgtaacgatcacgctgtcaaaccggtccaggattcctccatgtcccggaatcagcgtaccataatccttaatgccatgttgtctcttcaccgctgatgccgccagatctccaatctgggaagccgctgcacccactgcgcagatcagggcaaaagctgccgtatacttacccagcaacgctccatacgctgctccaagcaatgccgcacctacaacgcccccgatggctccttcaatggatttcttcggacttaataccggtgccagcttatgctttccgatcagtacacctgtacagtatgcgcaggtgtcgcagccccatgcacttaagaagatcagccagaccagttgaaatccattttccagcatccgggtctgataaataaaactcagcatcaccggcacatagaagatgccgaaaaatgctgccatgatctgctgggtattgtatttaggataggaaatcacatattccagcatgatcagcataaatgctgcaaccagtgtaagccacagattttctttccatgccagatctcctccgcagacaatccactctataaatgcccacataccggttccgatcataccaatccaccagagcagatcatttttctgaatatccactgcccggtaaaattcatgcagtcccacaaagccggccagcgtcaccgcaatccaaagaggccagctgccataggcgccagtcaccaaaatgattgccaccagaagaattccgcttcccagtctggttaaaaatgctttcattcttctttcactcccccataccgacggtcacggccattgtatttttcaaccgctttttcaagctccgccttattaaaatccggccacggtacatcagtaaaataaaactctgtataagcaagctgccacatcagataattggataatctaagctctccgctggtacggatcagaagatccggatcagggattcctgctgtatccagatgatcactgatcacctgctctgtaatatcctccggtgcgattccttctgccacgatctttttcactgcacgacagatctcatcccgacttccataattaatggcaatcgtaaagttcagtccatcctgatccttagactcttcctccagctttgcaatgcttgcctggatatcctctgccagtccgctcttatctccgatcacacgcacgcgcatatgatttttcttcgctgtcttgacacaggtcttcatataattgcgcagcaatgtcatcaatgcatccacttcatccttgctacgcttccagttctccgtggaaaatgcatagactgtaagatatttgatacccatataatatgcatcttcacagattttctccacattttttgctccctgtacatgtccataattgcggggcatgccttttgctttggcccagcggccgtttccatccagaatgatcgccacatgctgcggaatattcataccggtttcctccaaattctctctaaaacgtgttttaggctgctgtcggacaagaagacccgtgatccacagctctcctcatgttacccaacagcagcctccctcattgcatgcctatacggtcatgatctcttttgttttctcttctacagctttatcaatgtcgctgatgtatttatcagtcatcttctgtgcctgactttccagatccttctgatcatcctccgtcagctcattgttcttgttcatcttcttgaatgcttcgtttgcatcacgacggatattgcggatcgcaacctttgcctcgtcgccttttttcttcacatctttggcaagtgcttttctgcgctcctcagtgagctccgggaagatcaggcggatagacgtaccatcgttggtcgggttgataccaagatcagaagtcatgatcgccttctcgatctcacggatcagctttttctcccacggctggatctgaatgattcttgcctccggtacagaaatatttcctacctgctgaagcggagtcggggttccataataatcaactttgatcttgtccagcacatgcggattggcacgtcctgcacggattgctgcataatctctcagcagcgcatcaaatgattttgtcatcttgctgtcatatacttttaatctctcatccatctatatatcctcccttatacggtcacttttgttccggaaaattttccttttaatgtattaacgatactgttttcttcattcaatccaaataccatcatcggcatcttgttctccatgcacatgatagatgctgtcagatccatcacgcccagcttctgatcgatcacctgctgaatcgggatctcatcatatttctttgctttcggattcaccttcggatcgctgtcatagacaccgtccactgccttagccagcagaatcacatctgcctcgatctccactgcccgaagagttgtagtggtatcggtggagaaatacggatgtccggttccgcctgcgaagaaggtcactacccctttctccaggcactcaacagctgcatccttggtaaacatctcagccatcggtcccatggtaaacggagtaaataccttggtcttcattcccacgctgcggaaaatctcagacacatagatacagttcatcacagttgccagcataccaatctggtcagattttgtacggtcaatattgttgctggtacggcctctccagaaattgcctcctccgatcacaatagctacctgaacaccgctgtcacacacctgctttacctgttctgcaacctgaaggcaggttgcctcatcaaatccggtatgcttctcaccggccagagcttctccactcagtttcaaaagtacacgtttcatatcgcacctcaattttttctcgcagcacgcagtatccccgcatgcctcatatctgtcgttattctaccataacaccagaagattttcaactgatacgtcagtcgtcggaacggattccagtcacttcttacagttggtctgaatccagcagaatcgtgaacggaccatcatttaacagttccaccttcatatccgcgccaaattcccctttttccaccaccggtacctgctctttgcattttgcaatgatgtactcatacatttcgttggccatatccggctttcctgcctcaataaagctcggacggttgccatgacggcagtttgcatagagagtaaattgtgagatcagcagaagttcaccttccaccgtatgtatatccagatttgtcttgccgttctcatcctcaaaaatgcgaagtcccagcagcttttttaccattttatcagcaatctctctcgtgtctgtatccgctacaccgatcagcaccataaatccatttccgatctttccgatcacctgactatctaccgtgacagatgcatgtgtcactctctgtactacaaatctcatatttctgactcctgtctcttatcttctatagggttcgcagatccacatctgcaatggcctttacttcctgatacagtcttcccaccggcagaccaaccacattgttgtaatcaccttcgattccggatacatatgcggcaaagagcccctggatgccatatgccccggctttatccatgggttctttgcttgctacatatgactggatctcctcctctgtcataggaaacacatgcacacgggtagtctctgcaaaattgatggtggtctccacctcgccttttttcaagatcacagccacaccggtcagcacctcatgatcccgtccctgaatgcggtggatcatccggaccgcatcttccggatcctttggttttcccatgatctcgccgtctacagcgaccacagtatccgctccgatcaccacatctgcatccgcgcggcccgcaacctcctgcgctttctgcatggcaagctccttgaccgcttcctccggatcatccgtcgttatcttttcttcaccttccgccttcaccacttcaaaggagatgccgatctgtgtcagcagttctcttcttcttggcgatccggaagccaatatgatcttcttcatttgttttctcccgtccataaactggtttttaagcgccagtcagttctgcattatcatatcatctatgccggtttctgtaaatcatgaactttgctcccgcccgtcatcaacagcaaagggattccgaaaagatgccagctctcctaattcttcctgtatccgcagcaactgattatattttgccgtccgctccgcccgacatggcgcaccggtcttaatctgtccggatccgcaggctactgccagatctgcgatcatatcctctgaagtctcaccgctgcgatgagatataatggtgcgatatccggccttgtgagccatatggatcgcatcaaaagcttctgtcagcgttccgatctgattgagtttgatcagaaccgcattggccgtctgaagcttgatcccgcagctgatccgcctggtgttcgttacaaacagatcatctcctaccagctgaatattctgacccagacgacaggtaagcttctgccagccttcccagtcattttccgccagtccatcttcaatcgataccagtgggaattctgccgtcaatgattcataatagtcgatcatctcatttgcactccgactgatctgacagccttcctgacttccttctccaggaaaatcataacagcctgtccgctcatttaacaactcgctggctgccgcatccatggcaaacaccacatcttttcccggatcgtatcccgccagttctactgccctcatcagatattccaacgcttcccttgcatttttcagatccggcgcaaatccgccttcgtcaccaactgcgctgaccatctgatctttgttgagaatcaactttaacttgtggtacacctctgttcccatacgaatggattccttaaaattctctgcacccacaggaaggatcataaattcctgaaagtccaatgaattcttcgaatgacggcctccattcaatatattcatcataggaaccggcatactgtctgtccggataccacccagatactgatacaaagggagtcccagtgcctttgcagaagctttggcaaccgccatagagaccggcaggatcgcattggcacccaggttagacttattttccgtaccatccgcatcgatgagcagatggtcaatatatccctgactcaacgcattttcccccagcagagcattggcgatctttgtgtttacattggagactgccttttctactcccaatcccaggtaacgttcctgtccgtcccgcagttccaccgcctcatactgcccggtggatgctcctgacggaacggatgcccttgcctcatagacaccatccagcaccacctccgcctccacagtagggtttcccctggagtccaggatctctcttgcgtaaatataggtgattggcagatatcgattcataaaaaaagaacctcctatactattttttcatagtataggcaggttcctttctttctattcggcagctaccagatactcgctcttcacgtagccttcctcattattcttgctggtgcatcggatctgtacccattcctgagatgcatcaccaagaacttctaccgtatctccatttgccagactggttacgacagagctggtggtattggcttcacttcttacattcagagagcttgcattgaccttcatagtcacagtctgcggctcttccggttctgcttcttcttccggagcagtctcttcagtctcctctgtctcctcagcatctgcttcctcagcaggctctgtatcatcagcagtatcgccatcacccttgatcaccagatcagcagctgcatcttcatctttctgctgttcttctgtctgagacgatgtcgcgctgtcacccttgtttcttcccatgaaccacatggcaccaagtccgatcacaacacaaagaatcactgcaacaactgctccaataataatcatcttacgaccatcgtcttccagatcccagtcgtaacgatcctcatcgtcttcgtcatcctcatcgtcatcatattcttcatcatcgtcatcgtattcctcatcctcatcgtcttcatcggaatactcttcttcgtcctcatcatcctcttcttcaatgacaggctctgcttttttcttcttcggcttttcttctgtcagatccacatctgccacaaaatactcaaagttgtcttctttcttcggctgttctttcacgcctgcagcagcggatgccttctcataggtcacatccacccagtcagcagctactgccccaaggatctgacggtctgcgcctgccagaatcgtcttccagcctgccagccatacagcattctcctgcggctgtccctgtgtaagggtcggaagaatcttctccagcttctcaagctcgccttcaatcttctccgatgccagaccaagcactgcgctgatctgttctgcgctgaagtcatcctcataagccatcaccagcatcacacgatgaagcagcggaagtgccgccagaatctgtgccagattctgtgcttttcccggagcctctttgtgctgaatgcttaaaagcttctgatattcgcggcggatctttttataatactgctgccagaaccagagattctgatcctctgctttcagtgcttcgccgatctcttttaatacacctgcataaaaatcttccaccagactcaatgcctgtttttcttcctgtgtgatcagaaaactcttgcagtatacctcttcataagttgcatcgtatatttttctatatgccccgtcagcaccttttttcagatcttccagagcacgtttcatctccagtaccataagccactcctattttacaagcagagattttccggtcatctcagcaggctgctccattcccatcagttccagcagagtcggtacgatgtctgccaggcatccgccttctctcagcgtatatttcggatccgcatttacaaggatgaacggaaccgggttggtggtatgagcagtgaacggttcaccggtctcataatctttaagctgctctgcatttccatggtcagcacagataaacatctgtccatccacttccttgagtgcctctactgccttgccaacacactcgtcaacaacctcgatggctttgatagctgcagcctctacacctgtatgacctaccatatccgggtttgcaaagttgatgatgatcacatcatatttttcagaacggattgcctcacacagacggtcgcatacttcatatgcgctcatctccggcttcagatcataagttgcaactttcggagattttacaaggatacgatcctcgccctcgttgggctgctccactcctccgttgaagaagaaggtcacatgtgcatatttttctgtctcagcaatacgtgcctgagtcatgtgatgtgctgccagatactcaccaaacgtattgtggagttctactttcttgaatgcaatgatcgtatgcggaatcgttgcatcatactgagtgaagcatacatatgtcagatccagcttcttctctcttgcaaatccgtcaaactcatctgcgcagaaagctctggtaatctctcttgcacggtccggacggaagttgaagaagataacagaatccttatcctgaatggtcgcggtcgggtgtccgtctttcataaccacactcggttttacgaactcatcgtatacttcttccttataagaattctctacagcgcagatcgggcagtcagccgggatgccttctcccttggtcagagccttgtatgccagctccacacgatcccatctgttgtcacggtccatagcgtagtagcggcccataacggttgccacttcgccaacaccgatctctttcatcttatcaactaactgggcaacaaaatcttttccagatgcaggcggtgtatcacggccatccaggaagcagtgtacatatactttgtgaagtccctgctgcttagccatctccagaagtgcatacaggtgagtattgtggctgtgaacacctccgtcagagagcaatccgtacagatgaagtgcggaatcgttcttcttagcattatccatagcttccagaagtgcttcattcttgaagaaatcaccatcctggatctctttggtaatacgggtcagctcctggtatacgatacgtcctgcgcccatattcatatggccaacctcagagttgcccatctgtccatccggaagtcctactgccagtccactggcatttccttttacatacggatactcagccatcagtttgtccatcaccggagtattcgcctcagcgatcgcattggcttcttttctgtcattcagtccatagccatctaaaatcatcagcactgttggtcttttgctcattttttcattctcctttatcttatctatgtatacggcctgtcttcagaacaaacctgtaaccagccatatgtcattgtacatgatgtccgcagaacatgcaagccgtcacttgacaaattcagagaattttcatttcttctgccgaagccttccggctcgaagatatgccgacagttcctcccggcttctggtaatatactcatatgtcacatacaaaggatcgatccgtctcaccagatcttccacaccttcagctgtaaagggctcatgccggtcgatctggaagatgtgctcatacactttgcagaaccgttccatgggatctttgggaagttcatgagcggattgaagccatttctttacataatctccggtcagagactgttgcagatgaatcccctttatataggaaatcatatttctatgggcatccagcatcttctgaatatatgttaccccctcttcctgggtctccagatccagattggtatgaaggaaatgtccggtatccaacataaatcccttcttctcataatgtaccctgtcaaggagtatctgtgtatcctccggatgcagaaatgtcagtccaggccaccatagattttccatcaggaaccagaaatcatacttctgcccatccagcagttcattaataaagtcagctgcttcctcgatcacttcccgatccgtgtgcttaagcttataagttatcccctcttcatcatccacctgcaccacatgaaacaccacatattccgcacccatgcgtgtggcataatcaagatccctgcggtacccttcgatcagcttctgccggtcactggctatccagtctccactgcagcagcaatgaacccctgtcaccatctccggccggatcagcggacactcctctgccgataaatatacatccggagcatccttcgtagaatatcctaacggcatcacttccaatccggtacacccgtgctccgtataaaattgctgcagctcctccgctgagccaaagcggatcacatcatcatacgatgtggtaaaattcatctgaaatttcatgcattcctaccctcttttcctacatctcctatattcctgctctctgataagaacagtataacatacttgataaaatcggcaggggtgttttatcatcaggtaacaatctccacctgatacccatactccttacaatactcctccaccttcgagtccttccgacaccggatcaccgtattacggttagcaatgagttcgccgatatattcaggatcatgcctgatctccagcactttcaggcggttgcagccgcggaatgcgccatcacctatatactgcacactctccggcagggtcacctgctccagatgcatccatttgcaaaatgcgcggctgcccacagacgcaaccttcgccggaaggtgcagctcctttgccgcgcagaaataaaatgcttcttcaccgatatgtgtaaacttggcgggaaaatgaatctccgccagcgatttgcagcggcggaatgcccggtcaccgatcttcgtcacgctgtccggcagactgatccgctccagtgccgtacactccgcaaatgcatcttccccgataacggcaagtcggctctcagccgcaaaccgcacctccgttatgaagtgacttttgtcaagaggtaatttttgaaaatcacaaacttt

SEQ ID NO: 1597 - DNA, 2454 bp, Unknown
  16S sequences of unknown bacteria
aagaacggaacaacggcgctgaaaaacggaacggacttcacaatgtcggcctcggcccacttggcaagctgatgctgggtaacggtctttccgctgccgaaaggaccgggaatggccgccacgcctccctttgcaatgggaaacatacaatcgataaccctctgtcccgttataagcggcatatcgggagaaagctttttcttatagggtctcccgcggcgaaccggccacttttgcataagcatcagcggtttttcgcccttttcggtttgtacaacggcaaccgtgtcggtgacggtgtattcgccgccgtttatcgattttatctttccgaaaacgccgttcggcaccataattttatgaagcacaatgtcggtttccctaaccgttccgataatgtcgccgggaaccacgctgtccccttccttaaggcagggtacgaatttccatttaagctctcttttaagcgacggaacctctactccccgcttaagattgtttcccgcaaccttcataatatcgtcaagcggccgctgtatgccgtcatatatgctaccgataagtcccggtccgagctcgacgctcatgggttctcccgtggagaccaccttttcgccggttcctattcccgatgtttcttcataaacctgcaccgaggctttatctccgtgcatttctatgatttcgccgatcagatgctcgtcgctgacgcgcaccacgtcaaacatatttgcgtctttcattccctcggcaataacaagcggtcccgagacctttaatattgttccttgactcattttttgccctcatttctaattagtcagtatatccgaaccgaccgccttttccacggccttgtgaagatctctcattgcctttcctgtgttgtttttaactcccggtatgagaattatcgcaggaaggcttttacttcggtatttttcaagagtcggctcgattttttcggcaagctcctcggttatataaataaccccataaccccgttcggcaagcgtgtgaacggttttttcggcctgtgcctgttcatcggcaaagaagaccgaaagaccgagcgccgcaaagccgcaaacgctttctctgtctccgacgaccgcgattttatacataaagctcaccgagcctttcctttgtttgttcggccgacagtccgatttttttgcacacaagcagcatctttatcgcctttacctgcaccgtcacggccgtgtaataggcaaaaatcgggtcggggccgaaggactcaagctttgccccgccgacaatttcgcaaagacggtcgtttccccatttttcaaatcccggcggattgtctttaagcagcagggctccctcggaaatttcggaattcgacaaaaacgcaatcaactcgtcggttccctttttggcaaatgaggcaagagcctcggcgtcaagcccgtcgctgccgcaaagagccgacagcacaaattctttattcttttttgttttggaaaagcgaaaggcggttttggcgtcgcagagcttgacaaagaagtcgatatattttttaacaagctcgctgccgctttgctcggccgtttttttcataagcttaagcgtctctttgtcgataaaggcctcaagcagctgcccgtcgagacttccgcttataatttcacatcccgtttcggcaacaaagtcataaggctttttcagctcgtaaaagcttctgctttcaagtgtgccgagaagcgatgaaaggtcaagttcggtgggataaaggtaaaagcgccgagcgtccctttcccccgccgccatacatttaagcgcggccttgatattatgcatatcgtttaaagcgataaatattttaagctcctcacagtcgggcgcaagagcgcgcaagctgtcaaaggtatcggccttgtattttttcaaggcggcctccgggtcgggcctcaaatcaagacccatgctttcaagcatatcgagaaggtcgctttcgtcctttgccgaaataagacgttcgagctgctgcggtgtaataagctcggtttccatagctcttacggccgaaacggcaaacgcatattgctccgacatacctacaccgccttttcaaaaagcagagcggcaatttcatcgcgcagcgtctgctctctgtctcgcacaatggcgtcgagggtgcaattttcgcaggtttcgccgaagtcaagcacaaatccgttttttatatcaaagggctttgtgcaaaccgagatattttcggtatctttacagccccccagacggtcggaaaagccctttggaagcctttttaagtccttttccgaaagccgcatgacgcactcgtcccctgctgcatattcctttgcaagagagaaaatcatgtcaaaatattcttcgtcgggaagattttcaagtcttgcgagagcctcggcgataaatctaatagttctttttttgtatagaaca

SEQ ID NO: 1598 - DNA, 5630 bp, Unknown
  16S sequences of unknown bacteria
ccggcggaaacggtcaccgagattgtggaaaacggcgtgcgctaccgggtggattttgaaaacggccagaaaaccggctttttccttgaccagaaatacaaccgccgggcggtggcgcgtctggcacggggcaaaaccgtgctggactgcttcacccacaccggttcatttgccctcaacgcagcgctgggcggcgccaaacatgtcacagcggtggatgtttccgaagccgccgtggccctggcccgggaaaacgcagtgcgcaacgggctggaacatcgcatggactttcaggccgccaacgtgttcgatctgctgccccgcctggcggaagggccgagacagtacgattttatcattctcgaccctccggccttcaccaaatcccgcaaaaccatccgcaacgccatgaccggctataaagaaatcaactaccgcgccatgaagctgctgccccggggcgggtatctggccacctgctcatgttcccactttgcatacgaggatttgtttttgaatatgctccgcagcgccgcctcagatgccggcgtgcagctgcggcagattgaagcgcgccagcagtgcgccgatcatcccattttatggggcgttccggaaacgaattatttgaaattctatctgttccaggtgatttgaggaggcatgcgccatgcgtaccctggggaaagtttcctttgttctcgcgcccatgctgctgtttgccagctttctctccggcgcaatgctgcaaaataatacagcaacggctgtccgcatcgtgctggccacggtgttcctcattctggccctgctgtgcaaagtcctggaggttcacgaagcttccaacaccaaaaaggaggaccaaccatgatcgatctgcgtcaggccggcgttgacgacgccgcagagctgtcccgcatccaggtggacagctggcaggcctatgagtccattttttcccccgcctatatggcccagcacaacaccttcgaacgccgtttcctgtattggatgaatgtgctgctgcgcggcgacggccgcacctatctgatcgaagacgacggccaaagcatcggctatgtcaccatcagctacccccgggacgaagatcttccctccggcacgctggagctgaccagcctctacatccgcaccgcggaaaccgggaaggggtacggcagttatgtcctgcggcggctgttcacatcggtcaagaccgccggttacgaccgcataaccctttgggtactcaaagacaaccgtcgtgccatcgctttctatcgccacttcggcttcacccccgacggctttgaaatgtccctgcccatccagggccccattctggaaacccgcatgtcacgggagctgtgaaccacaaaaccgcgcagatatccggcttcccgcattacaaaaggagcgccctgcattctgcagagcgctcctttttgttttttcgattggctgcgagggaccgcagcccctgtttcaaagactcaaagcgtcagcgacggcgcagtatagacccgcgcagccagctcgctgttgagcgaatacagacccttgggatcggaaccgtacaggtcgtacttcttgagcatgtcgtcggcgttcttctcttcctcgccctgctccttaacgaaccagtccaggaactgcatggtgcggaaatccttgaccgcataagcagcctcatagatggtgttgataaggctggtgacatactgctcgtgctcatagcccacttccagcgcacagcggtggcagttgaactccttgtcgggcttggcaatggcttccagggtcaccttctcgccgttgttctgcagatactgcaaaaacagcatggcatggtcgcgctcctcctgcgcctggatggtgtaccagttcgcaaagccatccagtccctgatcggcataataattggcaatatcaagatagagataggccgaataaaattctttgttgatctgctcattgcacagtgcggcaactttttcgttcagcatagtaaaacactccttttttctttgtgacggtctgcatccgttcctgcaaaatccgtatgttgatgtatattataccatatcaaaaggaaaaagggtatccaatttgccaaaggttcaaaaatttttcacaattttccccactgccagagcccccaaagaccggcgcggcgcacaaaccggcgcagcgccgcgccgcgcgctgtggtgcgcaatgggcttccattccactttgcgccgcagcgctgccacagccagagggatgtacgtcatcatgaacagcgggaaggtaaacacataccccagtttctgcgcccgcgtggcccggatgcggttccattcgcacagcacggtgatcaggcccagcgcagagaagccgcagtagccagtcgccagattcgtcgccaggaacagcagttccgcccgcagcactgcgccggccagctcgccgggctgggtgagacagaccaccgccgcaagcagattcaccagcagcagagaaacggtcagtagcgcgcccggcgccacgatcatcaatacatcgtagcaggaaaggcctttcctgcccccgcggccaacgccgcggatcaggttgggcgcataacgccaggccacctggtaaaagcccttggtccagcgcaggcgctgatcccagctctggcggaacgtggtgggctgttcatcataaagcaccgccttgtcgcaatagccgatgcgcttcccgtctgcggcgcagtcggcggagaactgcagatcctcggtaagcagatggaacggccagccgccgttttcacggataacatcagccgagatgagaaacccggtgccagacaccgtgcagctggtacccagaagcatccgcgggaaattcaggaaccgcgcctcccgcagaaaccacagggaatagccggcgctgatccagttggcgccgtagtttttggagttgcggtagcaggtgacggcggcgaaatcgccgctgcaggcagtatcgttcatacgccgcacaaaagcgcggtccaccagattgtccgcgtcaaagacgaagtagcctgcgtaatcctgctccagccccgcctcctgcaggcggcagaacaggaaatccagggcgtagcccttgcccacgcgggccgtgtcaaaccgctcaaacacctgcgcacccgcctggcgggccacagcggcagtggcgtcggtgcagttatccgccaccacaaaaatatccagtttgtccaccggataatcctgcgcgtgcaggctctcgatcagttctgcaatcaccgcttcttcgttgcgcgcagcaatcagggcagcatagcgccgcagctcccgcgccggcggtgcgtcgtattgttccgcccggcggcggttgagaaagcccaccagcataaaggctccctgataggcaaacgccgccgtaacggcaacgctcagcagcagattaaacgcatggatcaggtccagcatcgcgctcacatcctttcggtaagcacatcataggcgcgccggagcgtctttgcaatgcttccaagggattcttgcgcaagtcttaaggagaacttaaagtttgtcgccgctttgtttcttttttgtcgctaaaatgatgcagcttgtgcggcgcggtcattgacatttgcctgcagtttgctatcatattaaacattagacacatcaccggcccagccggaatttctgcgatatgaagagggtcctaaccatgcttacactcgaccagttcaaggaggcccgcggcgtgctgcggggcgtgatctccgataccgaacttgttcacagtccctatttttccgacctgtgcggcaacgaagtctatctgaagcccgaaaacctgcaggtcaccggcgcgtacaaaatccgcggcgcgtactataaaaccagcctgctgagcgaggagcagaaagcgcggggactcatcaccgcctccgccggcaaccacgcccagggcgtggcctatgccgccaaggtggccggcgtgaaagccaccgtggtaatgcccaccaccacgccgctgatgaaggtgaaccgcaccaagcagtacggcgcggaggtgatcctccacggcggcgtgttcgacgacgccgcggactatgccatgcagctggcgcaggagcagggactcacttatatcccgcccttcaacgatctggacgtggcctgcggccagggcaccatcgcctacgaaattttccaatccctgccggatgtggatgtgatcctggtccccatcggcggcggcggactggccgccggcgtctccaccctggccaagctcctcaaccccaatgtgaaggtgatcggcgtggagcctaccggcgcggcatccatgaaagcttccgtggaagcaggccatgtggtcacgctgccctcggccgtcaccattgccgacggcgtggccgtgcgcacgccgggcgatctggtgttcccctacgtccagagtaacgtggacgaatttctggccattgaggacgacgagctggtggacgccttcctggatatcatggagaaccacaaaatggtggtggaaaacgcggggctgctgaccgtggccgccctgaagcatctggactgcaagggcaaaaacgtagtctccatcctctccggcggcaacatggacgtgatcaccatggccagcctggtgcagtacggcctgatcaaccggggccgtgtgttcaccttctccgtcatgctgcccgaccgccccggcgagctgctgcatgtggcggatattgtggcccaccagaaaggcaacatcatcaaacttgagcacaaccagttcgtcagcatcaaccgcctgagcaaagtggaactgcgggtgacgctggaggccttcggccacgagcacaaggccgccatcctcaaggccctgcagagcgagggatacgacgctcagctggtggattccacagcaatttacgggtgagccgccgtttccccctcctccccgcatcacaaacaaaaaaggagcgcagaaaagtatgagcattaaaatcgcaccgtcgattctctcggcggattttgccaacctgcagcgcgacatcgagcgcatcgccacagcagattacgtccatgtggacgtgatggacggcctgttcgtgccgaacatctccatcggcatcccagtggtgaaatccatccgccccgtcaccggcctgcctttggacgtgcacctgatgatcgaccgtcccgtgcgctatgtggagcagttctgcgacgcgggcgccgatatcgtcacctgccacgtggaagcggacagccgcgaaaacatcctggaagccctttcccgcatccatgccaaggggaagcgcgccggcgtggtgctcaagcccggcacctccgccaccgcggtgctgccctttatcaaccaggtggaaatgatcctcgttatgacggtggagccgggcttcggcggccagaaattcatggccgaccagatgaaaaaactgggcgctgttcggggcctgatcgacaccatgaatccgcaatgcgaactggaagtggacggcggcatcgacccggataccgccccggcggccatcgaagccggcgccaacgtgctggtggccggcagcgcggtctacggagccgaagatatcgccgcgcgcatcgaagcgctgc

SEQ ID NO: 1599 - DNA, 3159 bp, Unknown
  16S sequences of unknown bacteria
aagcatccccctcacccgccgcttagggctccgcgcacttgaagcgggggaatacttatctgcgttcatgatatctcgtatcatgcagcagcgcacttttcttgcgtagcctaagcgccagcaccacaataaccaaaagcatcccggctccaaccgctgcaaatatagaaatccaccacgcatttgtctcctgtgtatcgtccgcttccagtgagagcactttcggctttttgatttcactctgaaatgtctcagtctgcgtatgtgtctctccggacgcatcctcatactgcagggtaatcgtcccatttaccggcccgtatttttccacatcttctgtcccggaatcatccccgatcgcatgcatggttctggtaccgacatagacctgcatggctccgtttccttctgttcctgcgtccatattcccaatgaaaacatcctccgccggaaacaggcctgttcccgagagttgtatacgcacgttgtaaacaagaacccgactcagattcaatgcctggatagaaaactcctgtgtatctgttgcataaagcactgccggaaaagcagcattatgcagctccacctctgttggctgaccaatcagcaacggcatgctctcttttccggatactgccgtccccttcttatcctcatattcaaaatcaaagctcagcactgcgcttgtatcctctgtcgccatcgccacctttactccatcctcaattgcaaccgtctcaccaggcgcgacactggaaaaataccacgaattgcgcagcggctgcaccgccttggtatctgtggaagcggttaccttcaggttgtagattgtctgtgtctcactgcgattgcggaactgtaccttcatcggctcttccgcccctgctttaagcgacacatcggaaaggctgcacgtctccagcagaagctttggctgatgtaaaatttcctcagcagcttcaccactttccccgcccgagtaacccccgcctcctccggcacctccaccggaaccgttgtcctttgaacccgcaaccggttctggctccggaacgctgacaaaaatctgacaatccagatttacccgctcaccatccatcgtatacccccatgccctcactgttacggagtattgaccgggcgttgcgttttcctgtagtggcacctcacaagtatagcagtaggcatcctgctggtcggcaggtgatgcgattccgtcctggtttgcaatgccgcccggcacttctgttgcggtcaggtcgtttccggatgtcccctttgtatccgttccctgcggcgtcataattccatcctgcaaccgataagaatgaagtttcacgtccttttgataatttttaaagacaaatggtgcattttccttttccgcaaaaatgagatcaaccgtcagacactcattctgcaatgcaccgctggcggtaaacggaacggtaagatatagcttgccatcccgtatttccggctgatagccatctgcaaacgactgctccattccttcatagcgatgacggttgtcgatgccgagatgtaccttctcactgacaggtgcttccgtagccggttctgtacactcggtggataactcactttccagaccttctgtctgttcaacactagcttcgccatcggctactgtcgtgctttgcttctcctttgtatcctcgcctgacaccgccccgtttaaagcagcagacgcctctccggcgccgccacacccttctgccatgggatctggctcggtctcaatcgaggtaatcgtaagtcccggctccaagtccgctgaaaatgtttcttctatatttacatcatgcacatccgaagcgcttccctgcaagtctgatcgctcttcttccggcacagttccctctggcagtatttctgtccggctatttggggcatctgcgggctcatcacctgctacgggcatgaagcttacagatacatttgtttccggctccgctgcataagacggcataccatgtgcaccaccccctatgctctcaattccggcaagcaataccagaagcactgccgcaatcactttctgatctcgtcttcgcatttccgaagtacacctccgtccatctcatatacctcatcgcacaggatgcggatatcttcttcattatgacttgccagcaggatcgtctttccttcctccttcaattcaagcaaaagctttcggatctccccaaccccatgcttgtccaagccattaaacggttcatccagaatcaggagttttggatcttccatgattgcctgagcgatcccaagcctctgacgcatgccaagcgaataatttgccaccggctttttcagcgccggatccaccccaaccttttccagtacctgctgaatctctgccggaccgattttccgccgcatgccagccagaatttccagattcttccgcccggtcaggtttgtgagaaatcccggtgtctcgatgatcacgccaaggctctctggaaaatccacatcctgcccaatgctgctgccgaacacctggatcagtcccgtcgtcggaatcagaaaaccgcagatgcatttcatcaggactgtctttccggaaccattatttccaacaatcccatacacccttccctgctctaaagtcaggttcacttcctttaataccagttcctgaccaaattttttcgtgacgtggataagctctatcttatcgtcgtgcagtctcttttctttcatccagacattccctccggttattattatcccgcttcaatttttccatatatcgttgccgcatgccctcccatcaatacggcgagcatcagcaaaagaaagagccacagaccttccccacgttccccccacctggctgccccggaaatccactgtggcggatagagccagagtgcatccggaaagtaacgttccttcaagatcatgcagaaatagtagactacaagcggaatgccaaaggccatatctgcagagccgcccaaaatcccgcaaattcctccaagtgaggcaaaggaagccccgaccaggctgcagcgcaatactgtagcggcaagcatttggacaggctctgctgcaatgcttcctgccttctcctgtggaaagcatacaagaaagcttccaaaggttaccactatcgccgccagccacaca

SEQ ID NO: 1600 - DNA, 7900 bp, Unknown
  16S sequences of unknown bacteria
ctgaaagcgcagaaattatgcacgcagcagggtgcaatcctcttcaaacgcgagcccagcgtagcgggtcgtgtttgagagcgtgtcaaaaaattttttgacacgctctcaagtccgtacggagattccgtacgggcttgtttctgcttttttcggaaattgatttgccgctgccgcgtgggcgtggtatactaaaggaaaagaatgcccggtgtaagcactgggcgcacgccgatttgtccggcagaaaggagctgcgtatgaaaattgagacgccgcatattgttgcagaggaatttgattttgccgcgacggttctgatgcccggggacccgctgcggtcaaagtatatcgcggagcattacctgcaggaggcgcgcctggtcaataatgtccggggggtccaggggtatacgggcctgtatcacgggacgccggtctccgtcatggcctccggtatggggatgccgtccatcgggatctactcccacgagcttttcacccgcttccatgtggagaatatcctgcgcatcggctccgccgggtccatctcgccggagatcaaggttcgggatatcgtcatcggtcagggggcctgcacggattcccgctgggctgcccaattccacctgcctgggaccttcgcgcctattgcatcctaccggatgctctcgacctgcgtcgatgtttgccggcaactgcaggcgccgtggcatgtgggcaacctgctgacctcggattatttctatggtgaccacgaggccgtccctgaagggctggattccccctacgcctggagcaagatgggcgtgatggccattgagatggaggcggctgcattatatatgaatgccgcccgttatggcaagaatgccctggctatctgcacgatttccgaccatgtcctgaccggcgaagggctcagcgcccaggaccggcaggcgtcgttcacccagatgatggaggtcgccctggagacggcctgtgtcctggaccgggagaggagctgaacgcaaagtgaagcgtgtatttttgatcgttttggattcctgcggcgccggcgcgctgccggatgccgctcagtttggggatgacagcagcgtcaataccctgcgcagctgcgcggggaccgggcttttagagatccccaacctgcgccgcgccggcctcggccttgttccggggctggaatttctgggcgggacagatgccccccggggcgcttggggcaagatggcagagcgctccatggggaaggatacgaccatcggccactgggagattgctgggatcatctcgcccaagccgctgccggtctatccaaacggctttccccaagatgtgctggatgccttttctaaggcgactggccggggcgtcctggtcaatcggccatattccggcacccaggtcatagctgattatggcgatgagcaggtgcagacggggaaattcatcgtctatacttcggcggactccgttttccagatcgcggcgcatgaggacgtcgtgcccctggaagagctctacgccgcctgccgcgcggcccgtaagatcctacagggggaccactgcgtcggccgtgttatcgctcggcccttcaccgggacaagcgggcactatacccgcacaccccaccgccacgatttttccctggagccgccgtcggcgaccatgctggatgtgctgcaggcggcgggctacggtaccatcgccgtcgggaagatctatgatatttttgccgggcgcggcatcagcgagcacgtctatacagaatccaatgccgatggcatggaaaagacactggcgtatgcccggcgggatttcaccggcctgtgctttacgaacttggtggattttgatatgctctatggccatcgccgcaacgcaccgggctatgcccaggcgctgaacgcatttgacgcctggctgccgcggctgttggccagcctggggccggaggatctcgtcctaatcaccgccgaccacggctgtgatccaacctatacaaagacgacggaccacacccgggaatatgtcccgctgctggcgctggggccgcgggtaaagccgggggcgctgggcatccgtgcaacgtatgcggacgttgccgctaccgtctgccaggcgctgggcgtcccggcacagctggcaggggagagcttcctggcggtgttgggctgtgcgggagagggggcgaggcgatgaaaccgcaggcagagactctgctccaagctgccctccgggtacgggagaacgcatacgcgccgtattcgcatttctgcgtcggcgcggcgctcctgggcgctgacggcgttgtttacaccggctgcaacgtggaaaatgtgtcctttggcgcgacgaactgcgcggagcggacggcgctgttttatgcggtcagccagggctgccgcacctttcaggcactggctgtcgtcggcgggccagccgggccgatccaagctgtgtgctcaccatgcggcatctgccggcaggtgttggcagagttttgcggtccggatttcccagtttacctctgggacgggcgcgccgcgccgcaatgtgtgccactttcgcggttgttgcccgccgcgttttctgcagccgcgctggggaaaaccccaaaaagtgaatgaataacgaataaaaatacggataaaccatgcgtgcccaactagtgcgttcacaatttgaataaaaaaatgccgggaaagcgacttgaaattcaccgatagggaatagcaagacacaataaacgactaccaaaagcggaccaccaactgggaaggagttttgtaaaaactcaccgaaaaaagtgcacaaaacagcggcggaaatcgtccggatttgccggaaggcatttgggaaatttggcggatgaatttgtaatacaaagcaaaacgtccgggaaagagcataaaaatcaccaaaaaccgacgggataatttggcaagacagacaaatgcatctggagactatagtgcgatattcacaaatgcgggatttgataatttgccaatagtgccaaaaaatcattttcgctgaaaaattcattgctatttgaaaaaaatcgtgctatcattttacttgtaaatcacgtgtgagattaagaacgaaatctgtcgaatggaaatttctattcgatactgttgaatgcaaatttgttttattagccgtattttcccgtaggcaaaaatcggcttgcaaatagtatacattcacacatcaggaggaacaaacatgacacaagaagaaattttggcaaaaatcgcagaagcaattgctgacggcgacgaagacgaagctgtcgaactggttaacaaggcattcgaaatgggtctggacccgatgaccgtcctgaacaagggcgccggcgtcggcatggacaagatctccgaagactacaacaacggcgatgcgttcctgcccgagctggttctggctggcgacgcgatgactgctgtcaacgagatcatctttgaccagatttccaagagcggtgacgccaatgcgaaggctggcgttatcgttatcggtcaggccaagggcgacgttcatgacatcggcaagaacgtttgctctgctctgctggcctgcaacggctttgaagtccatgacctgggcatcgatgtccccgtcagaaaattctatgacaccgctctggagctcaacgctgacatcgtggcaatgtccaccctgctgaccacttccctgcccttcatggacgacaccctgaagttcatccgtgataccggccatcgtggcgacttcttctacatcctcggcggcggccctgtcactgtggaattcgctaccaaggttggcgctgacggctggtcccgtaccgctttcgactgcgtcgagctctgcaagcagctgatggctaagggcaaccccggtgcagatcccatcatcattatcgactctgaggcttaattacaccaaaacgctaactcatttgtaaggagaaatatcaactatgtataatatcaaagtgcagcgtctgctgagaagcttggacaaggcatacaacggcgaagtccttcccatgaaggaatgggataccaagagaattccgaagaccatcaagggcattctgaagaagtacggcctggccggcacccttgatatggaaaaccccatcaactgtgatgatgatctggccgataccttcttcaaggctggctgggaactggctctggaacttggcatgtactgcgaagacaccgagcgtgtcatcaccgttacggaagatgagctgctggaagccatccgtgactatcccgatcagttgatccttggctccgatcaggaccaggttatcatgaagccgcgtcgtccggaagatccctacaagccgctgctgtgcgcttccctgggtatcgtttgctccgagcagtactacctgcccctggttcagggtattgttaagtatccgaagctggtcgacgttctgcatggcccgaccctggcaactgttttcggccacaccatccgttctggcagcccgtacgagaccctgatgggcaactacgagtcccacctgaagaaggaagccctgtggcgtgctggccgtcccggcatggcttgcaccggcgttgctggcgcttgcaccgagtttggccatctgggcggcgctcccgagctggctggccgtggtaacgtttccatgtccctttgcccggttgagctgaagtgcaccttctccaacttccatcgtatcatccagggcctgaactatggtcataagctgcgtgtcggcgcattctcctacatcggcggctatgctggtcctgcggaaggcgctgctctggcttgcgtcgcaaatgacctgctgatcccgaccgttatgcagtgcgactacacctcttcttactgctatgacatccagctgttcggtaactgcggccgtaaggctgtctgggcgaactccgtttccatccaggctatttcccgtaacactggcttcatgcggaacaagatcgtcaatgagaccggcggtccgtgcacggagatgttcatgtacgaagctgctgtcggcctgatgaaccactgcgtatccggtgcttccaagaccacccagcccagagctgctggcggccgttacaccgactacatcacgccggtcgagtgctggtgggttggcgacgtcttcaagtcctgcgctggtatgacccgtaaggatgccaacgagctggcaaagaagattctgccgaagtacgaagcaaagctgggccatccggacaagggccagtccctcaccgagtgcttcgacctgcagaagctgcaggctaagccgcactatgtcgagctgttcaaccgtgttcgtaacgaactcatcgacatgggtatgcctctggacaaggccttcggcgagacctacatgggcttcgtcgctgacgagagaaagaccatcaacctgtaatttctcaactgaattagcgttatctaaaaccggattgtatcgggtggggagacccgatacaatccggattcccccaatgcccgctgtccgatggacagcaacctgtgcaatgatttaaaatatcccgtcagatattttggatttgctattcgttgtatataaagcgcccttcgtcaggcgttttatagatcacgaaatccgtttacttgtgaagtgggttacgtgctatatattgcgaacgcagaatcaacaggaggacacacatggtaaagcctattttggagatgaaaaacatcaccaaacggttccctggcgttgtagcaaacaataaggtaaacctcacgctgtatcccggtgaagtgcatgctttgcttggcgagaacggtgcgggcaaaagtacattgatgaatgtgcttaccggtatttatgctcccaacgaaggggaattgttttttaaaggtgaaaagattgagctgaagagcccgaaaacggctgtggatcttgggatcggcatggtccaccagcacttcaagctcattgaacccctaacggttgctgaaaatatttatatgccgtccaaaaactgcaaattcatgctgaatttgaaagaaatgaacgaaagaatcacggagttgtccacacagttcaatctgccggtcgacccgaaggcgaaaatttggcagcttgctgtcggtgaacagcagcgtgtcgaaattgtcaagctcttgttcaatggtgcggagatcctgatcttggatgaacctaccgctgttttgaccccgcaggaatctcgtgcgttgtttgcaaatctgcgtggcctagctgacgagggcaaagccgtcttgttcatttcccacaagctgtacgaagttattgagaacgctgaccgcattacggtattacgcggcggcgaatcagtagcgacgatgctgaataaagatttaaatcaagacgatctggtcagtgttatggtcggtaagcgcctggaaatggctgcttcgacgcgcgaagttcctgatgtccccaaatcctgtgcactcaagcttgagcaagtttgtgcaaagaatgataagggcctccaagctttggataacattgaccttgaattatatcatggcgagattctcggcgtcgctggcgtttccggcaatgggcagcgagagctgtgtgaggcgattactggcttgcgcccggtcacccagggctcaatttccctggagggcgaagaagtgaccaatgcccatccgcggaagctgatcgacaagggcgttgcttacgtcccggaggaccggatgctggtcggcctggtcggcaccatgaatatgaaagaaaatgccatcctgcgggactccaccagtccggagatttccaagcacggcattttgaaccagaaagcaattgtagagcgtacgaatcgctttgttgaaaatcacgccatcaagcacgctggcatccagcggccggtcagcctgatgtccggcggcaatttgcagaagctgctgctggcccgcgaggtaaatggcagtcccgatgtcattgttgcagcttatccggtccacggtgttgatatcggcgcgacgaatgcaatccatgagatcctgctccgggaacgcaagcgcggcgcggcaattttaatgatctctgaggatctggaagagctcttcacgatgtcggaccggattgctgtcctctttgagggcaagatcaccggtatcgtggatgtccccgaacaagtcacacaggcaagttatgatcacattggccatctgatggtcggcaatgtggaagcagccagcggcgtgaatgggggtgcagagcaatgagattacgctttgataaacgagataaaacttccaaatggttggccccgactgtttatgtggtctgtgtgctgctgtctttcgtcatcagtggcttggtgctggccgctttgaaaatcaacccgatgaaggcgttcgcgaaaatgttctccggcgcatttggcagctcgaagaacatcgcagaaagcttactgcagtccattcccctgatgctctgcggcttgggcgttgcggtcacgttcaagatgaatgtcagcaacatcggcgccgagggtcagttcaccatgggtgcctgggctgcgacggcttttgcggtctatgtcgatatcggtctgccccagtgggcggtcttcccgttttgcttcctggtcgcgttcctggcgggtgcaatttggggcgtcatcgcggtgcttcccaaatcgctttggaaggtcaacgagattattatcacattgatgatgaactacattgccctgctgtggctggattattggtgctacggtgcctggcgagacccggcagctgcaaacctgcccttctgtaaacccttcccggtctacacacgcttgtccacctttttcggtcgtgccaataccgccttcttctgggcgattttagcggcggtcctgattttcctcttctataaatataccag

SEQ ID NO: 1601 - DNA, 4100 bp, Unknown
  16S sequences of unknown bacteria
atcacggaccacggcgtgatgtacggcgtggtggatttttacaaggcatgccgcgccgccgggatcaagccgatcttaggctgcgaggtctatgtcgcaccccggacgatgcaggaccgggtccacgggatcgacaacgaggcccggcatctggtgctgctgtgtgaaaacgagacaggctaccggaatctcagctatctcgtctccatgggctttattgagggcttttacagcaagccccggatcgacctggcgctgctgcggcagcacagcgagggcctgatcgccctgagcgcctgcctggcaggcgagattccccgtcagctgctggccggggattatgacaaggccctggaaaagacgcaggagctggcagaaatttttgggccggaccacttctatctggagctgcaggatcacggcctgccggagcagcagcgggtcaacgcagggattctgcgccttgccaggcagacggggctgcccttggtcgtcacgaacgatgcccactatctgcgcaaaagcgacagcgagctgcacgatgtactcctgtgcatccagacgggcaagacgatggacgacccagaccgcctgcgcttccagacggatgaattttatctcaagagcgaggaggagctccgcgccctattcgcccaggtgccggaggcgttttccaataccgaggagatcgcccggcgctgcaatgtcgagatcaccttcggcaaataccatctgccggcgttccaataccccgcgggctacgacggctggagctactttgaaaagctctgcctggacggcttcgcccgccgctaccccgatagcccgaccggctaccgggagcggctggagtacgagatgcagatgatccgcaagatgggctatgtggactatttcctcatcgtggcggattttgtcgcctttgcacggcgggagaagatcccggtgggcccggggcgcggctctgccgccggggcgatggtctcttactgtatgcagatcacggacttggatccgatgaaataccacctcttcttcgagcggtttttgaatcccgagcgggtgtccatgccggatattgatatggacttctgccaggcgcgccggggggaggtcattgagtacgtcatgcgcaagtacggcgcggaccatgtggcccagatcgtgacctttggcacgatggccgcccgggccgccatccgggatgtgggccgcgtgatgaattttacttatgcggagacggatgtcgtcgccaagcagattccggcggcgctgcatatgacgctggacgaggcactgcgcatctcgccgaagctgcgggagctctatgacggcgatgagcgggtcaaaaagctggtggatacggcccgggccattgaggggatgccccgcaatacctcgacccacgccgctggtgtcgtcatcaccaagcggccggtgagcgattatgtcccgctggcccggaacgatgataccatcgtcacccaatttacgatgacgaccatcgaggagctgggcctgctcaagatggattttctgggcctgcgcaacctgacagtcattgatgacgcggtgcagaagatccgccgggatacaccggacttttctatggagcatgtcccggacgacgacgctgagaccttcgccatgctgggccagggccggacggcgggtgttttccagttggagtcggcgggtattaccggcgtgtgcgtcgggatgcagccccagtcgatcgaagatatgacggcaatcgttgccctgtaccggcccgggccgatggattcaatcccgaagtttatcgacagtaagctccacccggagaagatcacctataaaacgccccagctccagtccattctggacgtgacctatggctgcatcgtctaccaggagcaggtcattgaaattttccgcaagctgggcggctacaccctgggccaggcggataatatgcgccgggccatctcgaagaaaaagcagcaggtcatcgtcgccgaacgcaaggcatttgtctatggcgatccggaccggggcatccccggggccattgcaaacggcgtggacgagcaggcggccaatgcgatctacgatgagatcctggactttgccaactacgcctttaacaaggcccacgccgtctgctatgcaaaggtttcgtatgacacggcgtatctcaagtgccactatcccaagcagtatatggcggcgctgatgacatccgtgcaggataactccatgaaggtcgcgggctatatcgccgcctgcagggagatgggcctgcagctgctgctgccggatatcaaccactccgagagcgccttcaccgtcgagccggaggggatccggttcgggctggcggcggttaaaaatgtcggcaaggggctggtggagcagatcgtcgccgaacggaaggcggacggggcctttgccagcttccgccagctctgcgagcggctgagccagacggatctcaacaagcgtgccatggaaaatctcatccgctgcggcgcaatggattgcttcggccacaagcgggctcagctgctgctggtctacgatcaggccatgaccgacgcggcgcagaaccgccgccggaatctggaggggcagatcgatctcttttccatggaccagacggaaaacgaggcggagattcccatgcccgacgtgccggagctgccgcctcaggagcgcatggcgggggagaaggagacgacgggactctatctctccggccaccccatggacgcctatcggccgatgctgaaaaatgctcacgtggcgtccctcggcgatattatgacgagctttgccgagggcgacgaccgctatcgcgacgagcaggtcgtgacggtcgcaggggtcatccagtctatccggacgagaccgacccggaacggttcgcttatggcgtatatcgttctggaggacgatacagcggccatggagatgctggcgttttcctccatcctgcggcgctatgattcgtttttaaaggagaatcagccggtgatgatcaccgggaagctgactgtccgggacgaaaaggacccgcagctaatggtcgaccgtgcccgtctgctgctcgacagcgaggaaccgattccactgccggatctaccgtcccggtcacagattgcgccggaccagcggctctatctgcgggtggacaagctggacagccgcgatttccgcaagacccgggcgattttgaacctattcccggggctgacgcaggtgatcctggtggcggcggataccggcaagcgctacggcacaaggtgcgatccggagcccggaatgctccaggagctgcgccgggtgctgggcgagaaaaatgttgtaataaaatagcgagcgggggagaaaacgcttgcaaattgtgttataatctattataggaaaaaggattgcgtgcagtgcgcgccaatccagtctgcgggcgaaaggagggggactggtgtgaaacgaaaaatgattttaatggcgctcttgtgcgcgctgctggcactggggctctctggctgcctgtttaagccggtcaatgcgctttataccctgccgcagcagccgccggaatacgacgcgctgcaatcggagctggaccggctgcttgccaccgggatgcagtacagcgccccggcctccggcgataatctgcaggcggtgcagatggccgatctgaccggcgacggggtggacgaggtcctggcatttctcaaggccagcggggaaaagccgctgcaggtctatatctacgaaaagcagggcgggcagtacgagaatattgcagtcctcaccagcagcggcagcagctttgatcgggtggactatgtccagctggacggcgcgccgggcctggagatcattttggggactcaggtcagcgcccaggtgctgcaatcgctgcatgcctataccctgcagagcggcggcgcggcggagctgctgagcacaaattattttcgctataccacggcggacttagacgccgacggcgtcgaggagctggtgagcttccggtccggcgaggccgatcagcctggcgtggcggagcgattcgtctgcgatggcgggcagcttgtcccggcggggca

SEQ ID NO: 1602 - DNA, 2399 bp, Unknown
  16S sequences of unknown bacteria
agccatacgatggccattgccagacacggcatccgccaatgccttcccccgcaggtcaagctgatcagcggtccgggctgtccggtctgtgtgacgccgggaggcgccatcgatgccgcgctggcgctttccatgcgtccggatgtcatcatctgcagctacggggacatgctgagagtgccgggatccgcgcaggacacgctgctgaagcgcagaggaaaaggcggcgatgtccgcatctgcctgtctgtaagtgacgccatccgcatcgcgcaggcacatccgcatcagcaggtcgtgtttctcggcgtcggcttcgagaccactgcacctggcacggcggcagccatcctggaggcagaggagctcgggctggataacttttccgtgctcagcctgctgagaaagagcgagccggccatccgcgccatcgtgcatgaaccaggttgcgccatcgacggcttcctttgtcccggccatgtggccgccatcatcggcgaacaggggtttcggtttttaaaggaagagtgccatcgcagcggggtcatctgcggctttgagccggaagacatcctctatgcgctcagccagctgattgacgcagtgtcatgcggccgggtgatcctggaaaacgcctatgccaggctggtgcgcccgcagggcaacatcgccgccatggcattgatggatcaagtgttcgaaccagaggacgcgctgtggcgcggactgggcgtgatcgcgcaaagcggcatgaagatcaaggcgagatatgccgcgtgggatgcccgcgtcaagtttcaccttcccccattcgcggatcatgaaccgcccggctgctgctgcgcacaggtcatcagcgggaagatggccccgcgggaatgtccgttatttcgacagacatgcacgccgcagacaccggtcggcccgtgcatggtctccgctgaaggaagctgcgcggctgcctggctgtatggcagcgaatgagcagagaaaggagaagaggatcatcatggatgaacgaatcacactggatcatggcagcggcggacagctgagcgccgaattgatcgaaaggcatatcctgaaggcatttccagccgatgccctgcatgagctgcgcgatggggccatcgtgcctgccggcacacagccgctggtgatgtccaccgacagcttcgtggtcagcccatggcgctttcccggcggcgatatcggcaagctggcggtctgcggcaccgtgaacgatctcttgatgagcggcggcatcccggcttatctgaccttttcgctgatcctggaagaaggcttcgccatcgccgatctggatgcggtgctggcctctgcggccgactgcgcagcacgatgcggcgtgagcatcgtcactggcgatacgaaagtcgtggaaaaaggaaaaggagatcagatctacatcaatacggccggcgtcgggttcttgaagaaaaagacagattatgcttaccagccgggagatcaggtcatcctttccggcagcgtcggccgccatggggcagcggtgttcatggccagggaagatatccgcctgcagggagagctgcgcagcgattgtgctccattgtgcgaagaggccagagctgccatggaaaccgaaggactgcgcatcatgcgggatccgaccagaggcggactggccacgacatgcacagagctcgtcgaacatacgaaatggggcatggagctggatgagcgagccatccctgtcgatgcggatgtgcaggcgctctgtgacctgctcggctttgatccgctctatctggcctgtgagggacgcatgatcgccatcgtcagccaggcacacagcgcacagctgctggaaaagctgggaaaagacgcccgcatcatcggcacgatcagtgacgatcatccaggcacggtattgatgaagaccaggctgggcaccacgaggtggctgcgcaagctgagcggccagccgctgccgcgcatctgttaaaaaaggatcacggtgaagtgatcctcaagcatggtcggtttccagacgggtgatgatggcctgcatatcggcgcagaatcgtgcggcatcaaatgaagagacaggcagtctgccgcgcaggatgatgtcttcgcactgtttcagcgcgcaaaagagatcgtcattgaccaccacacagtcataggcggaaaggtgcgtgctctcttccatcgcggtgcgcagccgccgcagcagcgtatcgaaggactcgcttccgcgcgcgttcagcctgtggtacaacgcatcagcctctgccgccacgaagatgccgcagatctcctctcggggaagcgcgctgtgttccaggatctggaagaagccatgataatcgatctccgcgatggcttgttttccttcggccaggatccgg

SEQ ID NO: 1603 - DNA, 5438 bp, Unknown
  16S sequences of unknown bacteria
tcttgaagaaatagtctttcaggtaatccagcctgcgcgatggaaggatatcgatcgggatctgatcatcatgatccagcagcacacaggcatatttactatgttcggaacgaaacgcgtatacttcatcaaaattcaaatgccttggcaagggccttctggggatattgacatgatgttcaaagatagagatgacagaggtcggggaaatgtggtagcgtctggcaaccgagctgaaggtctcgtgatagcttttgaggtcttccaggatcctttgaacggtgaagattgagatcttcatacggttgaagacaaaaggattcctttcataataagttgtaccgcagacagaacagacatagcgtctggcgcgataacgaatgatgcaggaacggtcagtaagagcagagtgcgtgatcgtcttgtcaacataccctttgatctttatatgcgaatttccacaagaaggacagtcaaaaggatgagagacgagcgtgacgaaaatgagggtcttcccattttgattttcatggcggatggaatggatatccgcatctgataaattgaacaaatcaataagaagatccttataaatgatcagatcagacatcaatgatcacctccaattgtctttcatcacaatagtagcaggcatgcggaggagatgcgtagacatcttatgttggtaagaacagaaacgaaatatttttccgaggagctgagcaaaagggataggaatcgaaacaggggtacaaagaaagaaaaacaaccagcgagcaataagatggggaaatatcatgtttcatgagccaaggcgagatgtgcttgcataaacgatggatgacggatttgtcatgccagggaaagcggtcgcagaggctgttcaaggagggaggataagtttttttccaataagcaaaagaaagaagatgtccgagctggaaacgtcgaaagggaacaaggaaatgaggcagaagtgcgtgggtatgatgacaatgccggcagcgcacgcgttggatacggagaaagcaaatggatccgtcagttaaggaaaaataagagcgggaatagtggccataaaaaatgaaggcgccgcgcgcggaacaatgcgggcaagggacgaggaaaagaacgatggaacggatatcagcatcgtaatcaaattgagaataagagttgaaattactggcaataaagcatatcatagaattgttcatcaatgaacgggagcgaacgagagctgtggtaggttttagggcgctccttttttgggctcaaataacgctcgcgtatcaaggtcctttcatactgatcataacataaaagaccccatgaaactgaaaaggaagaccccaagcaggctcttcccatccccatataaaacaaaatacactagataccccatccacttttatatatcctgtaaaaaacgcgtcagcgaaattgacgtgttttttgaatgttcaccgggatgaaaaaagtgtatactaaagctgttggcggcatatatatgtccgccagctcgttcaagatgataacttgagcgataaatcaatacttctcctttttgggaccctctctgtatctttgcagggagggttttccatgagaaaacgaaacatcaaaacaggcgaagagctggatcgtcttcgcctgaaggatcagtcgtggaccttatagtttgccagcagcatttccgcgatgccgggggcttgtggatcatgatttcctttgccggtatccatggctcgcatctcctccatctctgcgtcgctcagcgcaaagctgaataagtcgatgttgctgcggatgcggtttggattcgtggatttcggcaggacgatcaagccatcctggatctcaaagcgcaggatgatctgcccgggatccttctgatgacgctctgccagtctggtcacggtcggatgcgtaaggagctctggattaccatgaccaaggggctgatatgcttcgatcttcacatcatcctcttttagcagctcacgcagctcgcgctgctggaagaacgggtgacattcgacctgattgaccgcaggcttggtggagaagaagggaacatatgtcttccagatcttcggtgtcatattgcttacgccgatcgatttcagcttgcctgctgccttggcttcctccagcgccttccatgccccgctgacatctccatatggctgatgcagcaggtacagatcgatatagtccatattgagcttgctcagcgatgcttcgatacccttctttgcggcctcatagccatagtcctgcagccacagcttgctcgtgataaagatctcctgtcgcgggattccgctgtctcgaacggcccggccgacatcggattcattgaaatacgccgcggcggtatcgatatgccggtagccggcctgaagtgcctgcagcacagcgtcgtaagtcggtccgtcgctggggatcatgaagacgccgaatcccactgacggaatgtcgtttccatcgttcaatatgatcgtattcatctgtttacctcttttcttcttcgtcgtgcatatccttcttgtaagggtgctggtcgttggcttcgatgagctcgcacagggtgatgtgcgcattgcggtaacgggcattgcgttttttctctgggatcgtcagctgtatggcgttcatcggacaggcgtgaatacaggccatgcaggctatgcacccttttggatcatattggcttttctgcgcctggatggtgaagcgatccatcggacagatctttctgcagatcccgcatccgatgcagtcttcgctgatcacgaacatggtcctctttgcatccggccgcatacagcgctctggttcgtcttgtgcatctggcggcaagatgaagtgccggcgggcgttcaggtctgtgcggatcgcatcgatctgcgcagagatgtgcttgtctgcggccatctctttctctatatccgctgcgggcaaaaagctgtccgccatcatcacggcattgatataggtaggatttatgcccaggcgaagggctagctcaaacgcttgttggggcgctttgccatagtggctcccgtaagtgaggatcatgtagaaatacggcgtatcgaaatgcgcgtcatgcagaaatgtgctgaccagctcggggatctgctgcgcatgcaccggacagacgatgccgatctgcgcgtcctgataaggttgaggatcatcgtggatggcttgtgcgatgctgatgcagcgcggatccagccgctttgccacatacaggctgttcccagtggccgtaaaataaaacaacatggcatcttttcccctttccttaccgcggcgaacatgggtgattgaagatcaatggggaatctgttatactcagcatgaatatcatctttcccgtgctgcgccatgttctgtctgtattatccttcgttttgacagagaagtacaatgccagacgggtatgccagtataaacgatatggatactgaaaggggatgagcgtgtgatcgaattacatgaactccgccaatttgtcacctttgccgatgcaggaacgctttcggaagcggctgagatcctgcatctgtctcagcctgctctcagccgcaatatgaaaaagctggaagaacacctggagatcaccctgttcgaccggcagaagaacaagctgatgctcaacgaaaatggaaagtatgtcctgacgctggcccgtaaggtattggaggaagcggatgcgttggaagaaaaggcacgggaatttgaccgcaggcagcggatgatccgtcttggggtatgtgcgccggcgccggtctggctcatcgttccgctgctttcccggttttatccgcagatgtccttacagacggagaccgattcggatgcacgtctgctggagaagctggataaagatgagatccagcttgcggtgctgcatgaacccgtacaggatgagcgctatttttgcaagatgtgcggaaaagagtcattgttgttcgccctgccaagagggcatcgatatgccagaaggaaatcattatcctttgcggagatgaacggagagaacatgctgctgatgggggatatcgggttctgggactttgtctgcacggagaagatgccagattcccgctttctgacgcagagtgaccgtttcagcttcaatgagctcgtgcaggcgtccacgctggcttccttcacgtctgatcttgcggagaaatacctcaaggtggaaactgaccgcgtatatgtcccgatctctgatccaagcggctcagtgacttattatctgttctgtaggaaagcgcagaaaagagaattctccgctttgttttctgcgatctgacatcatgcgcgcagaacatgcggcataggaaaaggagcggatgaccgctcccgtacttgtgccgcatttcttgttagaaaaacagatgttcgatcaggatccttgccccgatcaggatcaggatgaccccgcccaggatgccggcgtatttcttcagcagggaacccagcttgctgccgagatagaccgccgcaaagcagagcacgaaggtcgttacgccgatgatagcgatgctggacaggatgtccaccttcagaaaagcaaaggtgatgccgacggcgaatgcgtcgatgctggtcgctacggccagaagcaggacgtgaggcagagcgagattgcagtccgcatcatcctcatcttcgccgcggatcgcctcgcggatcatgttgccgccgatgagggcgagcaggatgaaggcgatccagtgatcgatggccgtaatcaaggattcgaacagtgagccgctcagccatcccagcagcggcatgagtgcctgaaaagcaccgaaccagaacgcgagcatcagcgcgcagcgcagccggtttccttttacgcacatgcccttggcgatggatacggcaaaggcatccatgctcaggctgatgccgatcagaaagacagaaaataatgacataagtgatcctcccctgaaaaaaagagactttcgcgtgttcaacaaacacgcaaaagtctcgctgtttcatcttaagccagatttctcctcaactggaaatcatgatgttgacttaatcgctccgcaagagccagctactcccttaagcaggatcatgataccagaatcagaaagggaagacaatcctttttacgatggttttacaaatcatgacatagatcggaagggagccatgtgcctgctcaacagcgaagagggggcgttcattttttttaatgcttcgccaatatccccgtcaatgcagatcgaacgatctgcaatttcttttggcgcataagcttctcctttgttgatgcagacatagaccgccttaggattctccgcggtcatcctccagaaggaaaaattcactatcccagggggatcatgtttattgcgcaccatattttcattcaatcagtccttcag

SEQ ID NO: 1604 - DNA, 2470 bp, Unknown
  16S sequences of unknown bacteria
aaatgtcattttgaaaaaaataagacattttatagttctcttacgtataaaatatgcccacactgatttctgtttccattacaaaacccccgccaatatggcgggggtataagatttaatattccttccccgccagaatctccttatagtccttcaggttcttctgcagcagctccggtgtattcaggtgatacgggcattttttcatgcaggcgccgcagtgcagacagtcttcgatcttcatcatctttgcctgcatttccggggtcagctgggcagcggacggggcccggcggatcatcagtgacatgcgcgcgcagttgttgatctcgattccggccggacacggcatacagtagccgcaaccccgacagaagtcgcccatcagctctttgcggtccttctcgatcactgcgcgcagctcgtcgtccatcttcggtggacagacgatataagagagaaattcatccagctcccgctctctctgtacgccccagatcggcagcacgttgtcatactccgcctcaaacgcataggccgctgccgagttcatgatcagacctccggagagcgccttcattgcgatgaatcccatgtccgcttccttgcagagcgctaccagacgcttgtcctcctccgtcgccagatagcagaacgggaactgtagcgtctcgtacagtccggaggcgatcgcctcctctgccaccttcagacggtgattcgtgataccgatatggcggatttttccctgcgcctttgcctcgagcatgcactcatacagcccgcttccgtcccccggcttcgggcagaatgcaggattgtggaactggtatacatcaatatagtctgtgcgcagattcgccagtgaaatgccgagctccttccagaagtcttccggcgtcatcgcaccggtcttcgtcgcgatgaatatcttctcacgcatcccctcaaatgccagcccgagcttatgctcactgtccgtatagtaacgtgccgtatcaaaatacgtcatgccgccctcatacgccttgcgcaaaagccgcaccgcctcctcatcacttaccctttgtaccggcagcgcgccgaagccattcttgtttgttacaattccggtttttccaagtcttactgtctccatagtatctcttcctttctatttcattcttatctggtcacgaagtgaaccgcaacctcttctgcccttcggacacccgtacaggcatccgtttaccggaaccacttattttttctgattacccaaaattcaagcaacaggcagaccagacaaagcagacagataatcgcatagccatgtggtgcgctcagctccggcatattgacaaaattcataccataccagcctgccaccagtgtcagcggcataaagattgtcgtcacaatcgtcagaaactgcatgatctcattctgcctagaatcgattctggtctgatgaagctcccgcagctgattggaatactctttgagcatctgtaccatatcaaacagtctcccgaccttgttatcgtacagcccgaacaaaagctccgcatgatcccatccccgctctgccgcctcctgctgaagtgtctcacccatatctgaaagctgctcataataggcgcccagcacagccagctccttccttacctgcaaaattctgcgttcaaaattgtcctgcttccgtgcaagcaaatcctcttccagctcattcagggaatcctcatagctttgcagaaacacgatatcgtccttaaccagaaattccagaaaatcaaagaaaaccatacgcggatcacggatatctgtcatctcgtatccttccatctgatgaagcaaatccttcacacagctccggtcatccaaaaaaatcagccgatcctccagaatacaatatccaaatgtcagtttttcgcctgtcagatcctgctgccggggcattgcataagtcccggctgtcgccttgtgcagccgctctgccttgcagaaacggctgctctgatatacatatccggaaaagctccggcgaaatacagccggatgtgcatgctgaaattcctgtgctgtcataagctcaatcgtacagggctgaaccgcatttttcccgtcttctgatgctccattatgttttctctgcggccaatgatatttcacgctctttcacctcgcttctgttagctattttatcatttccgcagcatcttttgcaagtggcaacaaagcaccgctctgtacggaaagcctgcgcttcctgttcatccagcagtaaagcatttgcagcttcgtcacatgatacaagggtcaaaagatcatgcgtttcatgcttgcatgaaaaagcatgacttattgacccgcaaaacaccgaaaagtagccatttttcgtagaaaaatgagcggatttgaggtgttttaggattgcgagagcatgaaatgcgaagcaatccgtgtatcataggggtcaaaaggtcatgcg

SEQ ID NO: 1605 - DNA, 15681 bp, Unknown
  16S sequences of unknown bacteria
gctcatccgcgtcatggtcgaggcacgcacgcaggcgcaggcagaccagatcgcccagcgcgtcgcggacgtcgtcgcggcacagatcggcgcctagcgccctcgctcgcggcattttgaggcgatatcgtggcgcccgccttggacaaggcgggcgccttcgtgcattcgccctgttcactgtgccgttccccaacttgtgcgttggcagatatagacgcgtggttataattcggtgttcgtaaatccgcgcatcggcagctctgcctgcccgttgcggtttctttcatcgtaagtagttggggacaagtaggggagaagaaatggcttcgaacgagtctgcgagccccgaccgcgcatcgtggtcgggcaaatgggcgtttatcttggccggtgcggcatctgccgtcggcttgggaaacatgtggcgtttcccgtatctggcggcaaagttcggcggcggcacgttcctgctgacctatctcgtgctcgtcgcgaccttcggcctttcccggcgctcggccgccacacgcgccagtccgtcatcggcgcgttctcgcacttcggcaagaagtacatctggatcggcatcctggcggcggtcgtcccgttcatcatcacgccgtactactgcatcatcggcggctgggtcaccaagtacatggtcgcctacatcaccaacgggccggctgcgctcgctgatggcggcacgttcttcacgggcttcatctccagcaacgtcgagagctacgtgtggatgctcatcttcatggcgctcgtcttcttcgtcgtcgcgctgggcgtgcaggggggcatcgagaaggccaaccgcatcatgatgcccgcgctcatcgtcatggccgtcgccatcgccatcttcacgatgaccatgccgggcgctctcgatggcgtcgcctactacctggttcccgacttcagcaagttcagccccgacctggtcatcaacgcgctcggccagatgttctactcgctgtcgctcgcgatgggcatcatggtcacctacggctcctacatgcgccgcaaggattcgctgcccaactcggtcgccaacatcgccggcttcgactttggcgtctccttcctcgccggcctcatgatcgtccccgccgcctacgttgccatgggctctgccgaggcagtcgcggcaaaggccggtccttcgctcatgttcatcaccctgcccgaggtcttcaactccatgagcccgaccatcggcaccatcatcggcttcgtgttcttcctgctcgtgctttttgccgccctgacgagcgccatcagcctgaccgaggccatggtttcgatcgtcgccgacggaacgggcttgtcgcgccgcctctcgctcatcatctgcatggtgttcatcgtggtcgtcggcatcatcgtcaacgcgggctacaacgtgttctcggcggtgcagccgctgggtgagggcagcacgatcctcgacttcttcgacttcatctccaactccgtgctcatgcccatcgtggcgatcctcacctgcatcttcgttggctggatcgtcaagcccaaggtgctggtggacgaggtcaaggagtccagcgagttcaaggcggagaaggcctgggtcgtcatggtcaagtacatcgccccgctcctcgtcgccctcatcctcatctcgaatatcctgccctacttcgtgggagcgtaaaccccgcaggcaagctgccctgcaaaccgcacaacacgagcggagccgccgataccgtaatcggcggctccgctttttcgttgccgtgaattctcctgcccggctcttgcgcgcgtcagctgcccgccatgcggtgcccgatgcgcagaccgcccgccttgccgggaggtggcggaaagggcggcgcgggaatcgtcgatgggcacgtgggcagctcccggccgcagttcgcgcatctggtcgcctcgaaggcgttcttgaaatcgcagtaccggcagacgcgccaccgaatcgtgtccgtgactttccgcccgcatctcccgcaatgggagcaaaacgcaccgcatcccatggctctcctcctcgtgccgcgcgtgctctcgatacgggtgggccgccgggcgcttgcgtgcccgacggcccaccgaaaaatgctgtttacgagattatccctccagatgaccagctagaaaggctacggcatcatgattaggccgcggccaccagcttcttcgagcatcttgccgcactcttcgatcgttccgtagtgcagcgcgctgccaaggcaggtctggacgcaagcgggcttttctcctctcttcacgcgctcagagcacatcgtgcaaagctcggtcggaatggcgtagtagttccaatggatgctgccgtccttgttttcgcgcgggccgtcttcgtggaccttgatgccccactcgccgaggccaaggccaatctcgttgcgacatgccagctcgcagctgtggcatccggagcagtacgtgtagttcagaaacaatgcgtttgccatgatcgtgcccccttcctatgccattcccttggccgccgcgacgcgcaagacgtcttgctcggtcaaaatgtcggtaacgtcgttttcggtcttctcgattcgggcaatgcagcatttgttgaggttgccccagccctgaaccccgtggtagaagttcggcaggccgacgttgatggaagacttccagttgccgaagaggttcggctcgttggggtcttgctcggggtaccaccatgcgtgttgcgcgtggatgacgcccttcttgatggtcggggtgcccttgacggcctgcttgcagctcccgaacggcgtcgagatcttgatccagtcgccgtctttcaagccaagctcttcctcgtcggcaggattgatgtcgataaatgggtacgggtcgatctcgcgcatggccggcagctggtactgctcggtgtggaaggtcgtgaagcgacgcgcgcccgtggtcaggacgaaggggaactcctccatcttctctggcgtcgagaccgggctgaacggaggctcctggtagtagggcagcgggtcatcgccgaaggtctggtaggcgaaggagtacagctcgacgcgtccggtcgtggtcgggaagccgggctggccgtcgggacggagctggccggtctcgtacttgtagtacggctcctcggtcatcagcgtgacgttttcctgcagatccttccacttcatcttgccgttcaggccgttgaactcgttgtactcgtcctcggtctgccactggttccagaactccgggtgcatgcgctggcccagcgccagcaagatctcgacgtcggacttgcattctcccacctggacgcacttctcctcggcgccgtagaacgagacgttcatgccgtagtgggcgactaccatggcatcgtgctcgatggtggacgccaggggcaggacgacgtcgcagcatgccatggtcgtggcgttttggaacagctcggtggcaaagttgaagtcgagcttcttgagctcctcgcaccacaggtcgggcgagttggtaatggcgttgccgcaggggttcgacgactggaacatggccatgtgcagctcgtagggcttgcccgtctgcaacgcgcgcagcgtctcgtcgggctgcgtcgtccacatgaccgcgccgacggcagggtacttgtcgacgccgatgcgcttgttccaacgctcctcggtcatgaagccttgctccatggcgatgtcgtagccggtgttcatctggacctgggattccttgtcttcctcggtctcctcggtgcggatggagccggcgcccgtgcgctcgtcttggtaggagggcgtggcgttgatgccgccgagaacggttccgccgggcgcatccaggcagccctcgatggtcatgagcgcgaggatgcactgccccagctgcacgccgttgggattctgatcgacggcgaggccccaggtgacggtgctgcgctcggcattgccgaacatacgcgccgccgcgtagatgtcctcgacggggacgtcgcagatctctgcggcgtgctcgggggtcatggtcttgcagcgctcggcgagctcgtctgtgccgtaggcccacttgtcgcaccattccttgtcgtagagcccttcggtgaacaggatgttcagcattgccatggcaagtgccgtatcggtgccggggcgcggacgcagtcggatgtcggcgcgcgtcgagaaccaggtgatgcgcgggtccacgacgatgtacttcgtgccgcgggccatcatctcaagaagcgcatggccgaacaggccgtccgggttggatttgagcggctccttgccccagacgatgatgacgtcgggcacgtggtagcccggatggtcatagcggtcgtaccacttctgggcatagtcgatttcggggtagccgccgccgatcatgaatgccgtgttggaaatacgcgggccatagcacgaccagccgccttgggcatagacgctgttcggggtgtcgaacacgcagttggcgaacaggttgtagtagttgttgccctcgcggccggtcccgccaaagaccaagatcgactccgggccgtacttcttctgaatctccttggcgttcttctcgatgatgtcgagcgcatcgtcccaggtcgtctcgacccacttgtccttgccgcggtcttccttgcggcgcttgatgggatgggtgatgcggtcgggatgatagatgtactccttcaggtcaaggcagcgcgggcacagcgtgccgtgcgtgatggggtgctccgggtcgccctcgattttcgtgaccttgccgtctttgacatggaccttcaacccacatccgacggggtggcatcccggaggagaccaggcacagcaccgtgtgactgtctcgccgtcttgagtcgtggttctccattcgctcattacgttcccccttcgttcgattcttccttttgggcgcctgtctggatggcgccaacctgacgtcttgaatgatgagggcggtcagggtgcggcgggagatgcctgattggtacctcggcgcatcaaaaaagtgcactcgcgaagcgtccggcgctcacccgacggtgccagacgctagaattgagaggagagttaactgagtcgacgttcttttatgagggggatgcgtatggaaattgcccagctgcggtactttctcgcggcgagcgaatcggaaaacttcaccgctgccgccaagcagtgctataccagcaggcagaacctgacgcggtcgattcggaatctcgaagacgagctggggacgacgctgttcaccaggaccggaaacaagacgtacctgacgggcgagggggaacgggccgtcgagcacgcacgggccatctccgacgaagcgcggatcttggaggacctgttcaagggttcgcccgaggccgcgacgctgcgtgtcttgctgagcaccaactcgaacctgttcttgccaaagcgggtgttcgacgaggcgttcttgtcgaactgcctgatatcggagcactcgccgctggactgcttccggcagatcgtgcaaggcgcgtacgacgttgcgttcgtgggcagcatgagcaggggctttcccggatgcagcgatgtgctgatccgcaagaacccgctgttctacctcgtgtcggagggttctcccctcgcgaacaggacgagcctcggcatcagggatctcgacggccacgagctgtgcgtcatgtcggaccccgcgtttgcctaccagccgtttctgacgcgctaccgggagctcggcatggacacgcgccagatccacgtcattgccaacatcccgctcctgcgcaacgagatgcgtgcgaaagacgccatcgcgtttggcacgccggagttccagctgcgtccgctttcgggcactgttgccgtgccgtgcgccgaggactttatggtggcgtgcatgtacgcgctgtaccagcgcgggtcggagcacgtgtcggatgtcttgcgtctcgtgtcgtgcgtgcgcaagctgtcgaacgaggcgtatgggccgagctgctgagcgcttcagctgtccttgtcgggcgctagtcgcccacgtaggtgacgctgctcgcgttgttcttgatgacgagctcgagctgctcgatgtaggcgcccagaagctcgcttgcggtgcgctccttgtgcgtcaggtacccgacggtcatcttgacgtcggtgtgaagtgggatcgagacgatgcccgactgcatctcgggcgtgagcacgcccgtcgaaagcgtgtagccctcgaagtcggtgagaaggctcgtcagcgtcgcacggtccgagtagcggatgttgcgcttgtgctggatgtggcgcagcggttcttccgagaagtagaacgagttgatcgtgccctgctcgaaggaatagcgcgggtattctgcgagatcttcgggctcgatgagctccctgtccgccagcgggtgcccctcgcccacgaaaacgtggaccggggcgatgaacagcgggtggaacttgaggctggcgtctttgaacgcctgcccgagcacgcgctcgttgttcttgtcggtgtacaggatgccgatatcgcttctgaagtccctcacgtcttcgatgatctcgttggtgggcgcctcgcggagcacgaagtcgtagtcctcgtcctcgcagcgctcgacggtgttgataaaagcgcgcacgcagaaggcgtagtgctgggtggagatggcgagcctgcgggtgcccgactcgttgccggcaaacctgttttccagcatgtcggcctgctcgacgacctgccgcgcgtaggcgagcagctccgtgccctcgttcgtaagcgtcacgccgcggttcgagcgcgtgaagatggtgatgtcgaactcgtgctcgagctccttcatggcgatggagaggttggactgcgatgcgtagatgttgtatgcggcggcgctgatggagcccgcctctgcgatcgcgatgagatatcgcagctgttgaagcgtcatgtacgatcctgctaactactttaccaatggctatacgctcggacaatctgcccgatggcgttcaagataacgcaataattcaataaaacgaatgaattagccatctaaataatcaatatgtgcgcatgaaaacaatgcatcgctcccaatcttttaaatggcagagaaaagtgatgaaatacatccagcgcccgacggggcgctgttttttggttacacagcggttggaaacaagcggttaggagccaggtaatggccaagaagaacatcccctacgatcagaagtactacgatcccgaaatcgagtgcgcttctcgcgaggacatcgaggcgctgcagctcgagcgcctgaacgaagagctcgccttcgcctacgagaacagcccgtactacaagcgcacctgggatgaggcgggtctcgagccccattgcgagacgctcgccgaccttcagaagttccccttcatcaacaagcagaccgagcgcgactgccaaggcgtcggctccttcttcggcgagctgtgcgcggttcccgaagacgacgtcgtctacatggccacctcctccggctcgaccggcgttcccacgatgagcccgttcaaccagaaggacttcgacgacttcatggatgccgagtcccgtctgttctggcaggtcggcatgcgtccaaacgaccgctacctgcacggcatgaacttcgcgctgtacgtcggcggcccctgcgtcatcggcgcccagaacctcggcgcgctgggcatctgggtcggcgccgtgccgtcctcgcgcttgctgtgggccatgaagcactaccagcctacccacatgtggtcttcgccctcgtacgcctggctgctcagccaaaaggcaatcgagcagggctatgaccccaagaaggatttccccaacctgcgcacgatcatcatctccggtgagcccggcggctccatcgagtccacgcgccatgccatcgaggaggtctggggcgcagaggtctacgacttcttcggcctgtccgacatatacggcgcctgcgcaggcatgtgcgaggagaaagacggcctgcacctgatcgaggaccagattctcgtcgagaccgttgaccccgtgaccggcgaggtgctgcccgacggcgagaagggcgaaatcgtctacaccacgctgctcaagcacgcgcgtcccatgatccgcttccgctccggcgacatcggctgggtcgacaagacgccgtgccgctgcggtcgcactacgagccgtatccacatcctcggccgcaaggacgagatgttcatcgtcagcgccgtcaacgtcttcccgtccgacatcgaggccgtcgtccgcaaggacaagggcctgaccggcgaatacaagattcgcgtgtacgacgagaactacacgaccaagtacgaggtctccgtcgagcgcgccgcgcactccgaagagcccttcgacgagatttccaagcgcgtcgagggcgccctcaaggcgcattgcggcgtccgtccggcgaaggtcctggtcttcgataccgacaagctcggcgcctcttccgagcacaaggcaaagcgcttcatcgacgagcgcacctccacccaggctgccgtcgcggtggaaaagcagttcgaagagaaggacaataagtaggtcgtcagaactaggtagcaaggaagaaggattcacatcatggcaaagaagacgtttgctgtttctggtcagcactacctgttcagcgtgcaggcattcgcgaagaccatcctgtccgccggcggagacgagtacgactacgcgctgcgcgaccgcacgctcaaaggcgtcatcgccgacgttcaaagcggcgaaagcgagatcggcgtcatctgcgagggcaccccgaccgcgcccaagatcgaagccgcgctcgcggaggctggcctcgagttccacgccctcacggagtccgctcccaaggtggcacttcccgcggcgagccatccgctggtaaacgcgaagagccttgccatcgaagacctcgcggactacccgtacgtgtacttcgagcaggaagacgacgccccgctcgcgttctacgaggaggcgctctccaacgtcgaacgcgcccgcaagatcgcgacgaccgaccgcgcgtcgctttccgagctcatctgcgcgctcaacggctacaccgtcacgagcggcatcctcgtcggcatcagcgacggcacgctgctcaccacggtcccgctcgagaccgacttcgtcatcaagctcggctacgtttccaggaagggcgaggagctcgacggtctggccaagaagttcgtcgacacgctctcgcgcagcctcgagaggtacgcgcgcctgtaagccgcttcatgcaatccaaccgcgggggccttcgttacgagcaggtagcgaaggcccttgttctgcatgccaatagcgtacaatctctagccaactgaaggctttcggacaggaacagtgtgccatgaccgtacaacaagagaatcgccaggcgatcgtcgactacctcgagggcggttgcaagggcggagagatgggcagccttggcgtggagctcgagcagttcctcgtggacgaggacggggacccgatcggctacgacgagaagcaccgcccgggggtgcgcgatatcctggagaagctctccgagttctaccccaacgccatgcgcaccgaggcgggcgacatcatggggtgctcgcgcgcatcagcctccatcaccatcgagccggccgcacagatcgagatcagcatcgccccgatggcgagcatcgccgacatcgaagacgagtatgagcacttcacgtttcgcctgcgccagatcacgaagccctacggctaccagctcgtgccgctcggctaccagcccaagctcaaggccgctgagctcccgctcatccccaagccgcgctacaggtacatgaacgactacttcgcgtcgattcccggcatgcacggcgagcgcatgatgcgcggctcggcatcgctgcaggtctcggtcgactacgctgacgaggcagatgccgtgcgcaaagtccgcatcgccacgctgctcggccccatcctctcgtttctgaccgacaacgtccccgtcttcgagggggcgcccaacacccagccgctgcggcgcctgcagatatggcgcgaggtcgaccccgaccgctgcggggtcatcccggggctgttcgacgagggcttcggcttcggcgcctacgcggactacctgctgtccaagccgcccatcttcatcacgcgccccgacgagcacgccacgggcacgatgacggcggcacaggcctacggcgatgcgcccatgggcaaagacgatatcgagcacctgctgggcatgttctggaacgacgtgcgcctgaagcgctacgtggagattcgccagggcgattccatcccgctcgcgcccgcgcttggctacgtcgccctcatcaagggcatcttctacagcgacaccaacctcgacctgctcgaggccatcttcggcgtcggcgctgacggcgtgtggcatcagaccgaggcagacgtggaagacgcgattgccgccatcgtcaaagacgggtgggatgcggtcgtgtacggcaggagcgtgagcgcttgggccgacctgctgatgcagcttgcaccggacggactgggcaccgaggtcgactacctcgaggccctcaaggatttcaagggactatagagacatgccgtttacagaccaggtacacatccagatcaaatcgggcgacggcggcgcgggctgcacgtcgttcaggcgcgaggcgcatgttcccaagggcggccccgacggcggcgacggcggcaagggcggcgatatcgtcctcgaggcggacagctccatctcttcgctcatcgactatcgctacaagcaccatttcaaggccgagaagggcacgcacggccgcggcaagcgcatgcacggcgccgacggcgccgacatgatcctcaaggttccctgcggcacggtggtccgcctgctcgacgagcagatgcagccggtcgagcagatcgccgacctcacgcgcaacggcgagcgcgtcgtcgtggcaaagggcggccgaggcggcaggggcaacacgcacttcgtcaccccgacgcgccgcgccccggcgttttccgagctgggcgagcccaccgaaccgctgtggatcgagctcgagatgaagctcatggccgatgcggcgctcgtcggaatgccgtctgtgggcaagagctcgctgatcgcctgcatgtccgccgcgcgtcccaagattgccgactacccgttcacgacgctgcagcccaacttgggcatggtgcgcgcgggcgacgacctgagcttcgtcgtcgccgacgtccccggcctcatcgagggcgccgccgagggcaagggcctcgggcacgagttcttgcgccacgtcgagcgcacggcgctcattctgcacgtcgtcgacctcacgggcgggctcgagggccgcgacccggtgcacgactacgaggtcatcaaccgcgagctcgagctctatgccgaagacctcgccaagcgcccgcgcatcgtcgtcgccaacaaggtggacatgcccggcgtcgaggacaacctcgcacgtctcaaagagcgcgtcagaaaggacagcgacgagctcagcgagaagctgctcgacgagggcatcgacgagcgcgacccgattccgttcttcgccgtctcggccgccacgcgcgaaggcgtcgagcagctcatcaaggcaacggcgcaacgcgtccacgatctgcgccttgccgcggcagacgagccggttcccgagtacgaccaggtctgggagctcaagcgcaagcagcgcgacgcgcgcatcaccgtcgtgcaggaagaagcacacgcttggcgcgtgagcggcaagaacatcgagcgcatggtcatccagaccgaatggaacaacgaagaggccgtcgccttcctgcagcgcaggttggagcgtgcgggcgtcgagcgcgcgctggcgcgcgcaggtgcgcagtcgggagacgaggtgcgtgttatggacatcgcgttcgagtacgagcctgcgggctggggcgacgaggagttcgacaacgtcatcgaccacgacgagttctagccggcaaggagaaggcaatctcaagatgaaacgcgtagtgatcaagatcgggtcctcgacgcttgtcgacagcggcaaggtggacgcggcgtttatcggctctctggcggcagactgcgccgcgctcatcaaagacgacgaggtccagcccatcatcgtctcgtcgggctccatcgccctcggactcgacatccttggctttggcggcggcgagcgccccaacgacatgcccacgctgcaggcggcggcgtccgtcggccaggtcgggctcatcaggcagtaccgcgacaccttcgcgctgttcggcgtcaacgtggggcaggtgctcatcacgcgcgccacgacgggcgagcgtgagtcctacctccatgcgcgcgacacgatcgagcggctgctcgagctcggcgtcgtgcccatcatcaacgaaaacgacaccgtcgccgtcgaggagatccgcttcggcgacaacgacacgctcgcggcgatggtcgccacctccatcaacgccgatctggtcgtgctgctcagcgacatcgacgggctgtacacggccgacccgcgcagggacgcagatgcggagctgctcgagacggtgagcaagatgagcgccgagatcgaggcgggtgccggcggcgtcggctcgcgcagcgtgctcaccaagatcgccgccgcacgcgtgctcatggcggcgggcatcccgatggtcatctgcgaggggcaccgcacgcacgcgatcgtcgacgcggtccacggcgagcacgtcggcacgacgttcttcgacgaggacaacacgggcatgcacgcgcgcaagtcgtggatcgcgctcggcggaaaggtccgcgggcgggtcgtctgcgacgatggcgcctgcgccgcgctgcgcgagcgcggaagctcgcttctgccggtgggcatcgtgtcgttcgagggcacgtttgcctgcggcgaccccattgacctcgtcgattcggatgggcgcctggtcggcaggggacttgcgggctacgggagcgatgtgctcgggggcgtaatcggcacgcgcggcgccgaggagttcatcaaccgggacgagctcgtcatcttctagatctcgccgtgggcggtgccgtgctcgccctgtatcgtctgcccacggtcgtgcgcgctgcagctcacctgtggactttgcgctgtgaacccatgcgtccttgcagctgaaaagagccgctcggtatacttgtcggtgaagttacttcaacgtctggctacctggagggggagcatttcatgactatcagagtcggtatcaacggttttgggcgcatcggccgtctggcgttccgcattgcagaacaggaccccgatatcgaggtcgtcgccatcaacaacccgagcgatctcgagtgcgccgcctatctcgctaagtacgactcctgccagggccgcgtcttcgacgagtgccgtgcagaagagggcgcgctcatcgtcgacgggcaccgcatcaaggcattccaaacccgcgacccgcaagagctcgagtggggagaggtcggcgccgacgtcgtcatcgagtccacgggcaagctgaaagacggcaccgtcgcgaaggcgcacctcgagaagggcgccaagaaggtcgtcatcaccgcgccgggcaagaacgtcgacgcgaccatcgtcatgggcgtcaaccaggacgtctacgacaaggacacgatgaacatcgtctccaacgcatcgtgcaccaccaactgccttgccccgtttgccaaggtcctgaacgacacgttcggcatcaagcgcggcttcatgaacaccatccactcctacacgaacgaccagaaggtcctcgacgtgcaccacaaggacttccgccgttcgcgtgccgctgccctgagccagatccccacgacgacgggcgctgccaaggccgtcgccctcgtcatccccgagctggccggcaagctcgacggcatggccacgcgcgtgcccacgccaacgggttccatggtcgatttgacggcagagctcgagacgcccgccacggcagaggagatcaacgcggccatgaaggcagctgccgaaggtccgatgaaggggatcctcgagtactgcaccgacccgatcgtctcgaccgacgtcatcggcaaccgcgcctcctcgatctacgacagcctgctcacgaaggtcctcggcggcgacaagggcgacttcgtgaagtgcatctcctggtacgacaacgagatgggctactcgcagcgcgtcatcgacctcgccaagttcctcgtggcctaaagccgtggcacccgcaacttcatacgacgcttcgcaggcagccggtcaaagcaccggctgcctctttgtcgtcgccacgcccatcggcaacctggcagacatcacgaagcgcgcgctcgacgccctttcatcggcagacgtcgtgctcgccgaggacacgcgtgtgacgggcaagcttctggcggcgttcgacatccacgcgacgctcgagcgctgcgacgagaacgtgatcgcgcagcgcagcgcccggctggtgcagcgcatgctcgccggcgagacgatggcgttttgctcggatgccggcatgcccggcgtgagcgaccccgggttggtgctcgtggatgccgcgcgcgaggcaggcgttgccgtagaggtgcttcccggtgcttcagccgtgcccacggcgctcgtcgccgcgggctttgcggggacggcgttttacttcgggggctttctcccacgcaagaagcgcgcctgcaaggagctgctgacatcgctcaagaagctcgacgcggcgctcgtgttctacgagtccccgcaccgggtcgctgcatctgccgcaatcatcgccgaggtgttcggaacgcgccgcatggcattgtgccgcgagctcaccaaggtgcacgaggaggtcttgcgcctgccggcagacgagatggcgctcgagcttgcgcagcgagacgcggtcaaaggagaaattgccctcgtcatcgccccgcctgcgcgcgatgagaaagacgctgtcgacgaggatgcgctcgacgccgccatcagagggggtcttgccgacggcacgaagaagtccgcactcgccaaacagctctcccacgagtttggcgtttccaagaacgacctgtacgcgcgcatgctcgagatggagtagggaaacggggcaagaataacattatcctcaacaaactatagacatatctaagaataatatgtactatgaccttgttactcctctcgagtcgatagactcacgtaacaccgggatcaggtcccccaacctgttctcagcctttctccccaaaggcatctctctctgcatcgaggcgcccggacagttcttctgcccgggcgcctcgcatttacctgaaaatggatggaaaaagataggtgccccgacgctgggatgggacgtcggggcactggggtgacgttcgaagggggttgggatgtgtatggggagaggagttgaacccgacctccgaacatgcgaacaagatacaggcggtacctgaaaataaccttaaaagattgttaaggatttatgtttcagtcagtccgataggggaagcgcagttcgatctcgatacgctc

SEQ ID NO: 1606 - DNA, 32759 bp, Unknown
  16S sequences of unknown bacteria
aaactgccctcttcctattgcggcgccgatagggggggggtatcttaatatttgttttttgtaatttgcattgtaagttattgtaatggaaccggaaaggagaaattgtatgtcagaaatctataaaggcaagatgagcgtaactcaagaacagattgatacggctcacagaaagtttcaagtaaatattaaaggcattacacccgagttgaagcaagaacttgaagctcggattgaagaattcgaagaagaacatgaatgggatgcattgcacggtggtaatggatgggttaaaagaattgctacctgggatgttttggtcatggcaggattggatattatattcgtgatatggtggcttatagccgtaggttagtaaacaggaggaatgtaaaatgggtaaaaaaggtaaagacaaagctcgtacggaagccaactttacattattgcctgcaaagcaaaatgaaagatcttacggatttattgatcaggttgcagtgcaggtgtgctttggtattgctgcgtggtattttttggctggagcacaaacaggctattatgtgccgctatcggaagcaattccgtcaattttagtaggtaattgtgttcctttatttttaattgcttttgcaggattctattcggcaagatttggagtggattcacttacagcttctcaaggcgcttttggagcaaagggacctgtagtaattattgttatgttcgttacacagttggcagtaagtgcttcaatgccgatgcttttattcggacagttagcgattaaattcagtgcaaggctggggttccctgagttcctgtgtacagagactccgggggttgcgatttggtctctgatggcactggcaattggaatctatattgcatatagtggccctgatacaatgatgtggttttcaaggatatcagcagtgcttatggtaggtatcattgtttggttatgctattatattataggggagtacgggtttgattatattgcaaatgcagaacctagaggaagaattattatagaaggaaatgaaggcttaactaagagatggaataatgccgctgcacttgaaaccaattttggattgggtttctcatgggcatttatgtttggaatgttcacaagaatgggtaagtcggaaggacaggcttaccatggctgcatttggggctggggaataatatcatgctgcgctattatgtttggtgcggtggttgcccttgcaacaggtgcatatgacccgtcagactggatattggaggcaagtgaaaagagcgggatgtttgcacttgctattatggggctgatatttatggctgttgccaatatttcatctattgcaattaatacatatcctggagcaatagctattacttcaagatggcctaaggtaaaatgggggcttgctattgccctggttggaatacctacaataatcctgttaaatcctgaagtttattatagaatcagcaatatctacgcaatagtaggcttacttacttcggtatttgcaggtattatgacaacggaaaccttatttgttagtaaaggtcgcgtgagtattcgtgagttttatgatcgcaaaaacggctttaaatattataaaggtataaacccagcaggatttatagctatggcgtgcggattggtggtatatcttctcatattaaatccacttacttatacaagtctgactgggttgtttccgtatacttgcgcagcgttgcctacttattttataacaggtattgtttatttaattcttatgaaatgctggattttgaaaaagtatccggtgactttcctgaataacattgaggaaaaggccgaataactcaggatggatttatagagtaaaataattgagcggcacatctcggaaatttgaggtgtgccgttttaaaatgcgtgttctttgaaagcagaaacccgcttaagctgaacaaagtcagcctaaacggattatctgtgtgtctttacaacatgtattaagtaatatgctccattattctctttcgggtttcatttttttatatatagcagttctgtggatgccaagcttttcagccgccttgcttattgagcctccgcagctgtctatgcagttttttatatattcgttttccacacgcagcatataatctttcagtgattcaaaggatgcggaatcagcattaaaagaaggctctgcatttgccggaagtttattttcagcactgctgcatactgttgaatcggtgtttcgattatatgaaatttcttcacttaaaagtgattttataaaaggggcctcaagataatcatcttccatggaaagaataaaagccttctgaataaaattttctaactggcgaatgttgcccggccagctgtactccaagagcagctgaacagcgtcattgctgaaagttttgctgcaggagtatgttttgttggctttggctgatatgtggctgattatatcaattatttcctctcctcgctctctgagaggaggaattttaacagaaaccacattaagacgataaaaaagatcttctctaaaaagtccttccctcatcatttcatgcagattcctatgggtcgctgaaataatccggacattaatcttgcggtataccgtgccgcctacacgcagcaagtatcctgagtccagtacttttagtaattttgcctgcagctgaagaggcatttctccgatttcgtcaagaaatacggttccgttgtgggcgatttcaagcagtcctttttttccttcgttgctggcgccggtaaaggctcctttttcgtagccaaaaagctccgattctaagagattttccggtagggccgcgcaattcagttcgataaatttttcttttgctcttttgctgttttcatgaatatatttggacatgacgcctttgccggtgccggtttctccaagcagcatgatggcgcaatcggtttgagccgcataatagcatcgcttaaggacttctttcatggcagggcttgagtaaatgtgctttgtaggcatattttcaaaatcatagtgaatatccgaaaaaccctcttcgtgcttcatgaatttgtcgaagaattttttaataacggaaagtggccgacagtttgtaataacatatcggatattaccgttttcatcgtatattggtttactggttgacattatttctacgccggtacgtgttttaaccagtcctgtatatgtttttttgcttttgacagcttcgatgctgggtgaaccagtatatgccccgctggctacaagatctgaaatcatattacctacaagactgttaaatggaactcctatcatttttgcaactgcagggtttgctacgagcagcttcccattgccgtcaacaatgaatacaccatcatgtgaattatacatatactctgacagaatattagcatcaaaaacattctgcttatacagcatttcttcaaaatcgtttctgtacattatagttcctccgattgacggtcgttatttaatattatacttaatacctgatgcctgccctttatattcagttttttgtaaaggttgatcaggtgtttttttgcagttgtggcactgataaaaagtttgtcagctatttcagcagtgtccaacccttctgttatgcataaaaacacatcatattccctaggagaaagattgtatttattttttacttctgccaggagattcgtgatagtaagcgaaaaatcatatataacgacatagtatccatcactgctttttttgatgtcagccataaacttatgatttccgatgcaaagatcctgtgtaatattaggataatcctccaatctgtttgctgcaagagaaagagctttggttattatgtcaataattttttctttttcatagccgcatatttcttcaaggtgagtgatgctggaacgtatgagtttcatatctttgtcaaatatgcaaaaaccgccattgttactcatgtggtcaaaaggaatagggtttgtatttataatattgctgtttttcttgaggttgttatatattttggaaatatttataaggtgaggcctgatgtacttgattacctccaaagcttttggggtaaaatcgctgttgcgttcagatctgtgaatactgatagcgctgagctgaccttcttcataagaaatgtttccctctattgagtagtccattcccaggggtcttacaacgtcattatagtattttgttttttcgcgttcgctttgaataaaaacatcggaggaacggaagatgataggactgctgtttgagaccataggcagaacttcgtccattttatatacatcttcattgtgataacgctcaagttcttcttttgtccatccgcaaaagataaaatcttcataagaaacactgtcgttgtgaaagttgcagaaatatatttcgcctttttcaaaagggaccagtttttttagagattccaggaaatttttaagtgctgtttcaccattgtctgagtgtatgacttcagagtaaagtacagcggttatatcatttaagtatctgcaatcttcaacagttaaaatttcgttattcattaccatttttactgcctttcctgttttgtcgaaaattaaaaaagtctgttttatctgaatataattataccacaaaacagtgattaagagaagttgttttgagccttgatacagacaattttgttgttaaaacaactgcagaacttatagaagacaaatagcaaaaataaaggtaaaatacaagtagttaataacttggtgtcctatcctgcagcgatgtgattttaattatttttttagttggcatgaatcttgcgtttattatttagcaaccaaggttttgggggggggaggtgtattgttttttctacaaactgaagagtttgttctacaaatgcggtcaaaaacagacaaatattaattgctaaggaggagaactttatgaccaaaaaaatgcaaagtatcactatgactgtccttataataatactgacatcttcgctgggagattcaattaacggaatgaatcctgtactggagaacatttctaatgagttcccgaatttgagttacagtcttattacactggttggaacaatacctaatgttacttatattattgcagctcttattgcaggattttttgttggaaaacaattaaaatataaaacaacaattgtactcggatgcatatgtatcctcatcggcggaatgctgccgggaatatggtatgagagttttgcacttatacttacagcaagacttatctttggaattggcctcggacttcttgccgttttaaatgcttatgtaaccgaaatttttgatggaacagcacgccagaaatatctgggatggcatacatctgcaatgaactgcggttcaataattctgctgcttctggcagggtaccttggagggcatcactggtcatttgcggcttacagctatgttctcgctgtaataccgcttatttttgctttctttgttaaagagcctgatcagttgagattttcatacgtttcaaggtctgtttctgaagctgaagcaaagggcaaaaaaaccatgagccctgcggcaattggatattttatagttatggttgttgtagccactgcccttaactgcttttttattgtaatgtcacctttcgtaatagatgttcagggagggacagtatttcttacaagtgtgattttatgctgctacattttcggaggagctgttgcagggtttgtttttgaaaaaatgcgcaaggttttcaagaaagcgtttctgtgcattgtatgcctgtgcatagcgcttggggcggcgcttgtatacttcacaggagtatatgctctgatgggaatcggcggatttctttgcggcttttcattctggtcgataatgactatatgtattgaacttacagcacttaaaagtaacgaggcgtctgttgctttttcaacgactatgatatgcgttggaacttatctcggctgtttccttgcatcaccatggacatctgtcgttactgctgttttcggagagctttataaaggcgtatttgtttctataattgttatacatataataattgcaataatattctttattaaaaacccgctaaaagaaaatacactgagtaatagtgaggaggcgatttaatgtcatttatacctgtacctggctctgccgaatgggcggacaactataaatttattgagcttaataccggaatccgtatggcctacatggaatttggggacactgaaaaaccaccgcttattatggtgcatggattctcagatactgcaagactgggaagactcgcagctattgaattagccgaggactatcatatatacgctgttgacttgagaggccatgggctttctgataagccgaaaagatttgcttatactattttgcagcacgccgaggacattactgattttattgatcaaatgggcatagacaggttttatctggtgggtcagtcgatgggtgggatgatttcccagacaattgcctttacgatacctgatagagtaattaaacttgctttagtatcgacaggagcaagattccatcattctcctaaaaaattaagagagcttgatgagatgtttacagaatacagccagaacactcccgctcttgaggattggtactctgaggcaaagtatattgcggataaagatttctataagccgcattacgctgaactgaagaaatggcctgactattgctggaaagcagcatggtggggcatggagcttttggacaatactcctttcctgcagtatatatctgctccgaccatagcattttggggaacggcagatcctatttttacagcaaagtaccaaaaagaagtgcagaaacttttgcctaaagcaaaatttgttttctttgaaaatcaggaacatgatctgatgtcgctggttccggatgaactgggtaaatatattaagaagttcttcgcataaatgttatgcatgaaaaaaataggctttaacaaatttttatatgtaagatgaaaatggggtgtacaaaagggcgctataacgcttttagtggttggacgttagtggtggtctaactttacagcttgcaaataaaaagtcaagcatattttgatgaacattgaaaattttatacaggttgaaaaacaggcatcacaacaagaccgccaaagtatgccggtctggggaaattgtgtaagtattgtggttttagcaaaaataacagagtatgtacagaattcgttctagttttacatactctgttttttattgcgaaaatatataacctgtacttaaaaatttaagggtttatttaaaactttatggatgaatttttgtttagtgaatacagaactcttcttctgaacctgtcaaagtttctgtatcccgcagcggatgctttcagcaaccctatacgggaattgatagactctataggaccattggatattcgtcttccgtctactctgtcaaaactgtttattatctcgttatgccattttgaaagactgcctgcaacagtcttgaattccggaacactaaaagtctttaaatctttgatatagtggtcaagtctgccctctatgtcatcttctgtagaatccctgttgatatcaagataatcttctttcagcatatatgcaacttcgagttcaggatcaaattccagcatcagattgacaagttcccttgcgagtatatgttttcttccgatatcagaaatatatttagggacatacagtttgtgaaaaaaatgaagcggagcgccgcttttgagatacagcccgatgccctcctttgaaagcatactgttgtcctcgcggagcatataccccttgttggtaacggcgtcaatgctgtagccctcgttttgaagcgcgcgcattgcctttcataccgctgttctcgaaactttcagagagtcggccattttttcgcctgacagaaaactgcctctgttttcttcaagcagctttaatacgttgttttttacagacataagtttaaccttcctttatatttcatatattaactgtttttaaccttgaggtcaaatgaatttgacgcggacgccgtcagactgccggagatgaaaaataatatgtatatatttttgataatattatttccggaatatagtgcattgtgattaaaaaatgatagaatatagaagtatattgtaattcataccaattttacatacagagtgtcacagggcggtaaacaggtggcatatgcgagttgcaatatatcagacatacagttataagcaggtcaaacatattttacatagaggagcaggttctaatggaaaaagaaaaaactacggcagtaactgaagaagccgcagtaaatactgcagagacagtataggggattaaagacgaattcggagtaatcgcaaaggaaaccaaggtcacaggcaatataaagactgacggacatattgtaattgaaggcagtgtcagaggcaatattacagccaagggcaatgtggttgtattaggcagtgtttcgggcaatatcagctgcaacaatctcatgcttcagcagggaaatcttgtaaacacagagataacggcgacaggacacgttgctgtcgaaaacggtattaaagttgagggcaaaatcaaatgcaggagtatatctatatacggtgaggtaaacggagaggttgaggctgaggaagctgctgagacaggaccgcaggctgttctttcaggaagcataactgcaggaaccttaggaatacagtttggcgccaaagtatcggcgactatgaaaatagcagaataaggcaggctcataacctgtttttttagtgccttaaatgtaaattgaatgaaaagtatgtgataattgaaaattagtttgaaataactgtactttttatatataatattaagggtaactgtaaatcataaattatgaagaacaatattagaataaatgaccgtttacagggctttaaataaatcgaaaaaattttgtagaaggagagattaatatggcatttacagaagaagttggcatagaccttgggaccgcgaacgtcctggtgtatataaagggtaaggggattgttttaaacgagccctcagtagttgcaatcaacagagatacagatgagatacttgcggtaggcgaagaagccagactgatgctgggaagaactcctgccaacatcattgcggtaagacctctcagagacggcgttatctcagactatgacgttactgagagaatgctcaaatacttcatcagaaagagctgcggcacaggcagatttttcagacctaaaatcatggtatgcgtgcctagcggtgttaccgaggttgagaagagagcagtaagagaagcagccacacaggcaggcggcaagacagtatatctgatggaagagccggttgctgctgctataggcgcaggtattgatatttccaagcctgacggaactatggttatagatataggcggcggtactacagacattgccgttatctcacttggcggtatcgttgccagcgagtcaatcaagatggccggagataaattcgacgatcatattgtaagatatatggccaaggagcacaatctatatataggtgagcgtacagctgaggaactcaaaaggaacatcggtacggcttatccgagagaagaaagcattactatggagtgcagaggcagagacagagtaacaggtcttcctaagaccgtagagataacctccgaggaaatgatgaacgcactcaaagagcctcttgacgctatagtagaggctgttcacatcgtgcttgagcagactcctcctgagcttgctgccgatatcagcacaagcggtattacaattacaggcggcggagcgcttctttacggtatagataagagaatacaggagtcaataggcattgaagttaaaattgccgaggaccctaaagaatgtgttgcaaagggaacaggcgaatccttagaagaaatcgaaaagcttgaaaacaatgcaatgaacaagagaaaagcatatatctagaaaaaagctctcgttaagagagcttttttaaaaaacaggagtaaaaatgaaattagaacttatagctacggcaactttcggacttgaggctgtagtaaagcgtgaaatagaggcgcttggctacaagataatcaggtcggaggacgccaagataacatatatgggagatgagcgcgcaatagccaggtcaaacctgtggcttcgcagcgccgacagagttcttctcaaaatgggagaattcaaggctctggaatttgaggacctgtttcagcagaccaaggctattgcatgggaggatataattcctgcagacggcaaattcacagtcacaggaacctctgtcaaatccaagcttcacagcgtgcctgcgtgccagagcatagtcaaaaaggccatagtcgaaaggctgggctcattttactgcattgaccggtttgaagaaacgggagcggagtacacagttaaagtcacaatactaaaggacagagtgactcttacaatagacacttcagggacaggacttcacaagagaggctacagagtctgtgatgttgcggctccgattaaagaaactcttgccgcggctatggtgcagctgtcgttttggaaagcgggcaggctgctggtggatccgtgctgcggttcgggcaccatacctattgaggctgcaatgataggcaggaacatagcgccgggactcaaccgtaaatttgcatcacaggaatgggacattatcccgcccgaaatctggaaagaagaacgaaaggcggcttttgaggccatagattatgatgcggacatcagaatagaggcttcggatataagcgggagggctgttgaggctgccattgaaaacgccgcagaggcgggagtggacgactgcgtagaatttaaaaagatggatatggcaaggcttacggcagaggaagagggcggcatagtcataaccaatccgccgtatggagagcgtataggtgagaaaaaacagatagaagccatttacagtgcatacaatgaattttacagaaaaaatcccacatggtcgctgtttatggttacaacagataaagaggtcgaaaacaaaattttcggcaggcctgcggacagaagacgcaagctgtataacggcagactggaagtgtgctactatcagttccacggtcagaagccgggcaggaaacaagagaaataaaagcaaaggagaaaagctatggcagtaaatttaaagggaagaaactttttaacactaatggattttacaccggaggaaatcagatatatgctggatcttgctcacgaccttaaatcaaaaaagagagcaggaataagaaacgaagtattaaagggcaagaatatagttctgctgtttgaaaaaacctccacaagaacaagatgctcatttgaggttgcctgccttgacgagggcgctcatgtgacatttcttgactcaaaatcctcgcagatgggcaaaaaagagtctattgctgatacagcaaaggtactgggcagattttatgacggtatcgaatacagaggcttcagccaggaggttgtagaggagcttgccgcaaatgcgggagtgcctgtatggaacggccttacagatgttgaccaccctacacagatacttgcggatatgcttacaatagaggagcacattgcaaagcctctttccaaggtcaaggttgtatttgtaggcgatgtcagaaacaatatggcttatgcgtggatgtacggctgcgccaaaatgggtatgcactttgtggcatatggtcctaaggagctggctgatcaggttgacagtgatgtgcttgcaagagcgcgcgccgttgccgaaaccacaggcgcggttatcgaggtgagcacagatgaagcctgcctcaaaggagcagacgtaatttatacggatatatgggcttcaatgggtgaagaggatcagatacctgagagagtaaagcttcttacgccttacaaggttacaggagaaatgatggacaggaccgaaaaccctgacgccatattcctgcactgcctgccatctttccataactttgagacaaccatggcaaaagagcagatggagctgggatatgatatcagagaggtgactgacgaggtatttatgtcaagacagtccaaggtgtttgacgaggccgaaaacagaatgcatacaatcaaggcggttatagttgcgacaatagcgtagctgacaagggagaggagaacataatgaagccgggaattcacaatttttcggagataggaaagcttaacaaggtgctgctgcacagactgggagatgaggttgagggacttgttcccgacaattttgagagattgctgtttgacgatataccctatctcaaggtggcgcagcaggagcacgacagatttgcgcagcttctgagagacaacggcgttgaggtggtgtactaccttgacgaaaccgccaaggccctcgaaaagccgggtgtcaagagcaaattcatcaaagagtttctcgatgcaagtcatatatattcgcagggggtatacgaggagctgtcggagtatcttgaaaatatgtctgcctatgatgtggtaagcaaggccatagcagggattaaaaagggagaaatagctgacattaagcataaatctctggcagactatatatcagtatcttatccgtactatacagatcctatgcctaatctgtattttacaagagatcccggtgcctgcatcggaagcggcattaatattcatcatatgagcacgcaggctagaagacgtgagccgctgctgctcaaatatatgtatatgtacaatgatgattttacaaccgacagagagcatatatggtatgactataatgatgagttttcaatcgagggcggcgatgtgctggtgctttcaaaggataccgtggctatcggactttcccagcgcaccactgtttcgggcattgagagattttcaaaaaatcttctttcaggctccgattttaaaaagataatcgtatttgacattccaaaatgcagggcgtttatgcatcttgatactgtgttcactatggtggactacgacaaattcaccatacatcacgaaatagaggaccctctgcatctgtttgaaatatcccttgacaggcagggcgaggtaaaggtaaggtcagtaacggacagccttacaaaccttttgaagctggagctttcactgcctgccgtagagcttatcagatgtggcggcgaagaccttatggctgcgcagcgtgagcagtggaatgacggttcaaacactctctgcatagcgccgggcaaggtcgttacctatgagagaaattatgtgacaaatgatattcttgacaaaaaagggctgacagtgcttacagttccgtcggcagagctgtcaagaggcaggggcggtccgagatgtatgtcgtgccctgtaaacagagatgatctgtaatgtattaataaaattaaggagtttgagatatggcgtctaaaatagtaattgcactgggaggaaatgctctgcagtcgggaaacggtcccgcaacggcagaggcgcagcttgaggttgtaaggaagacctgtgagcatatagcgcagataagcgatatgggctatgagcttgccattgttcacggcaacggccctcaggtgggaagaatacttctcgcttctgaaacggccagagaggtgacacctgccatgccgtttgatgtatgcggagcaatgtcgcaggggtacataggctaccatctgcagcagggattaaagcatgcgcttaaccttagaaacagggatatacctgttgttacggttgcaacacaggttatagttgaggaaaacgatcctgcatttgatgacccgaccaagcctatcggtcctttttataccgaaagcgaagccagagccattgtaaaagaaaagggctatattatgaaagaggactcaggcagaggctggagaagagttgtggcatcacctgtaccaaggagaatagttgagatagatgctgtcagacatctgtgggactcaagtattgtaattacctgcggaggaggaggtatacctgtagtcgaaaaacctgacggtacaatcgagggcacagaggctgtaatagacaaggattttgcagcggagcttttagccgagcaggtggatgcggatgtccttatgatacttacagaggttgagagagtttcacttaatttcaatacgccggaacagagggatctttcagcgcttaatcttgcagatgccgcaaggtactgcgaagagggacattttgcagcggggagtatgctgcccaaggttcaggccgcaatgaaatttgtaagagcaaatccgtcaaagcatgccgttataacgtcgcttgacaaggcgatagaagcattaaacggcgagtcgggaaccgttataacctatgcgtaaattaataaatgattaattgagactgctccttattcatcggggagcagttcttgtgtatacaggcgaaaaatcaagaaaaaattaataaatattgaatgaaacctgtgaatacagcttctgatgtgaataattataaataaaatacaaaaaatattcatcagccttgttgcataaatataatttgcggtgtataattatatagaactacacaagggaggaaaaagatgaaaggactgatttatttagaggacggaactgtattcaggggatatggcttcggatatccgtgcaccaatgtgggagagctggtgttcaacacctcaatgaccggatatcaggagatacttaccgatccgtcatacaaaggacagattataaatatgacttatccgcttataggaaactacgggattaacagccttgacaacgagtctgacaaaatccacgcgtcaggcttcatagtaaaggacatttcgttaaatccgtcaaatgcagcaagtgaaaaaaacatagatgaatggctcagggaaatgaaagttccgggggtttacggtgtagacacaagacgaattgcaaaaaaaatcagaaacggcggcacagtaaagtgtgttataaccaacgaagaaaaaaccgtttcagaacttaaagaaatatgcgatgcggcagagcttagaaacgatcagatgaaaaccgcaggagtatcggaatatgaacacattccgggaatgggctgcaaagtggcagtactggacttcggcgtcaaggccggaataatcgaaaacctcatagcaagggactgtgatgttcacatattcccgtatggtacttcggcagaggaaataatgagcatttcacctgacggacttttccttacaaacgggccgggagatccgcaggaggctgcagagggcatcgaaaccgtaaaagctcttgtcggcgagcttccgattttcggtgtttgtatgggacatcaggtgcttgcgcttgcaatgggcggcaaaacctacaagctcaaattcggacacaggggcggcaaccatggagtatttgacagggaatccggcagatctttcattgtggcgcagaaccacggctatgcggtagacggcgactcccttatattcaagggtatggagatggtatatataaatcttaacgatatgagcgttgagggcatgaagcacaggagcctgccgctgttttcggtgcagtttcatccggaagcctgcgcgggacctgaggataccaatatgctttttgacaaatttatagagatgatgggggaaaacaatgccaaaggacagtaaacttaaaaagataatgataatcggttccggtcctatagtcgtaggacaggcagccgagtttgactatgcgggcacacaggcctgcaaggcaatcaaagaagaaggaattaaaaccatacttgtcaacagcaaccctgccacgataatgactgacaccgatattgcagacaaggtatacatagagccgctgacagcagaggctgtaagcagcataatcgaaaaagagcagcctgacggatttcttgcaggcttcggaggacagacgggacttaatcttgcgatggagcttgaagctgccggagtatttgcaaaatacggcgtgaagcttctcggagtaaacagggacagcatcaaaaaggcagaggacagagaagctttcaaagagctgatgcttgagataggagagcctgttccgccaagcaccatagcgactcatatggaggaatgctatgaattcgtaaaacaggtgggctatcccgtaattataaggccggcatacacactgggcggtaccggcggcggcattgccgccaatgaagaggagctcgacctgctggcaaagcgcggaatggaaaacagcgcgataggtcagatactccttgagaagtcagttgcaggctggaaagaaatcgaatatgaggtaatgcgtgatgccaaagacaactgcataatcgtgtgcagtatggaaaatatagaccctgtaggcatacatacaggcgacagcatagtagttgcgccggtgcagaccctgagagacagagagcatcagatgctgagaagctccgcgctgaagataatcaagagccttggcatagagggcggctgcaatgtgcagtttgcgcttaacggagatacaggagaatacattgtaatagaggtaaaccctcgtgtaagcaggtcatcagcccttgcctcaaaggccgcaggctaccctatagcaaagctggctgccaaaatagcgctgggctattcacttgacgagctttcaaactatgtaaccggaacaaccagcgcatgctttgagcctgctttagactactgcgttgtgaaattcccgaagtttccgtttgataaattcagaacttcgcttcggactttaggcacgcagatgcaggctacaggcgaggttatggcaatatgcaggacctttgagagcgcgcttctcaaggcggttacatctcttgaggtcaagtgtgacggactcagaaatccatatatagacggacttaatgatgaagaactggttgcaaagctcaaacgagctgatgacgaaagactctttgccattgcggagatttacagaagaaatatatttacagtagagcagctgtttgagataacgggaattgacccgtggttcctgaataagataaagaacataacagatatggaggaaaccctcaagtcgcagcgtctgacagcgcagcttctcagagaagccgaaaccatgggatttaccgaaaacgaaattatggagctttcgggagtcgaaagctccatatctgacatgagaatatatcacgatatattccctgtctacaaaatggtagatacctgcggcggtgaatttgaagcgctgactccgtactattactcaacctatgacgatgaggacgaggttatatatgacggcaatgacaaaatccttgtagtcggatcgggtcctatccgtataggtcagggcatagaatttgactacagctgtgttcatggcgcgtgggcaataaacaggctgggttatgagtccataatgataaacaacaaccctgaaaccgtaagtaccgactttgacacatccgacagactgtattttgaggcattgcatgtagacgatgtgatgaacgttatcaaaaaagagcgccctatgggagtaattctccagttcggcggccagacctcgcttaacataacagaggacttatacaacagaagcataaatatactgggaacggaatttcagtatatcgatatggcagaggacagagagaaattctcagagcttcttaatgagcttgacattcctacgcctgacggctatgctgtaaccacagaggaggaagcttttacggctgtggcgaagctaaaatatcctgtaatggtaaggccgtcatatgtaataggaggcagagcaatgcaggttgtatacagcgacgaggagctgctaaaatatctcaaggaagctgtatcgctttcagaggagcaccctgtgctggtggacaaatacatacagggcaaggaaatggagatagatgccataggtgacggtgaggacatccttataccgggtataatggagcatgttgaaagaaccggagtacattccggcgacagcatttcggtatatccgccttattcactgcccgaaaagataaaagaaaaaatcatagattatacgatgaaaatctcaaaggctctgcatatagtgggtcttgtgaatattcagtatgcgacagacggtgaagaggtttatgtaatagaggttaatccgagagcctcaagaacagttcctattctgagcaaggttacgggagttcctatgatagaactggctgtaaaggcgatgcttgggacaaagcttaaggatacagagtacggcacgggagtatacaaagaggcttccaaatatgcagttaaggttccggtattttcgggagcaaagctcataaacaccgatattgcgctgggacctgaaatgaaatccacaggagaggcgcttggtatagacagcgatcttcacagggcatttctcaaaggctttgagggagcaaacatacctgtacctcaggcaggaggcgtatacgtttcggttaaagatgccgacaagaatgaatttaccgcagaagtaatcaaaaaatacagcgcggcaggctttaagattatggcatccgagggtacaggcgaatttcttgcaggctgcggcatagatgttaaaatacttgcgcctgaggaagctgagaagctggcaggaaaggatataaatatactgattaatgtggctaatgtaggcaacagaaaaggcacagagggactgtcgctcagaagaaaggcaatagaaaaaggcattgcagttctcacctgtatggatacggcagctgtgttccttgacgtaatcaaactgaaacgcgagggcatgcagcttgaatatgaagcaatctaaagaatatgcaaagacttgtattttaccgctgtcatatgacagcggtttttgcaggagcgcagagaatcttcgctgcattaagtatcataaaatttttcaaaaatttaaattgcctattgaaaaaagaaaccgtatatggtagactttctttgcttggctaacaacaggtgccgtatataatagtatgtgcggcatatatttcaaagaacaagttagcaactgctaactcaaagcttccgctttattccattgaaatagaaagatgagtaagaaacaggcgggagataaaagcaggaataacgggaacctttaatgtcgtatcatggttatttagtgcggcattaaattctaatcaagggttagcttatgctaactaaaattacagacttatttatttgtagtaaatgcgggtttaaataagcgcggtgagaggaaaataactggataaacgtaggatgctgtagaagatttatatagtgcagcattaatttttaagaatgagttagcatatgctaactaacaggtttgttctttctatactgctttggggtgttgtcaggcggaggctataaacacaggaaggaggctaataatttaaaaggtaaattactgattaagaaaggattttttgaatatgaagaagaaaatattgtctatacttctgatgatggcaatgatagtttcgatgtttcccgcatcggcatttgcagtcacagtagacaaatcatatatgccgggaacatataccggtgaagctataggatacgataacgggaaagttacagtcacagtcaagcttgaagctgacagtgagggaaacactgtaatttcagatattgaagctgacggcagcacacagactcagagtgtctgggaaaaggcaaaagctgttttaagtcagattaaagaaaaaaacggcactgatgatatcgatacggtaagcggtgcgactaaaagtgtaaatgccattaaagaagcaactgaaaaagcgcttgcaaaggcagcatcaacattgagcggaagcggtacagaaaaagacccgtatgttattgcaaatgcagggcagcttgcagcctttgcagcagctgttgacggcggtgaaagctatgatggtaaatatgttgcgcttggtgatgatatagatttatcagatgtttcaagctggaaccctataggcgatgaaagcggcattgttaatattttcaacggcacatttgacggcaaaggtcatacaataagtaaacttaagatagatgcaaatgttactgagggagaaagcaattatggtcttttttccacactgggaaacaaagctgttgttaaaagcctgaatataacagatgcagctattgctgttgaaaatacaggaacttatggaacctccacagaaaaagtgcgcgcgggaattattgcaggcgaaacggttaaagcagcaacttcggcgcataacagtataggtacgcgtattgactcgtgctcagcaacaggcagtgtgtcagctgtttcaactaaggataaaatgacttttgcaggcggtattgtcggtatgggggatataggaactgcgataacaaactgctggactgatgcaagtgtaagggctgttgcaaatcctgtaagcaataaaaacagcatggcaggaggaataataggaagcagcggcaattatgtagttatagccaactgcgctacattcggcgatgtatatgctgcttcaccttcatctactaattttggaggtatggcaggcggtattgtcggtatgatggcaggcaagcagtacaatgtatatgccgcaggagatatgactataggaaacggtggtataacgaagcattcatgggttggcgttcttgacggacaggttacttcaagcggaatgactaaagattcatcgggagattttacaatttatcctgagcagggagtattccgccttggcggatactatgcaggcgatgcagtgcttaaggttgaaatgtataaaaacagcggagctgaccttgacacagaaacaactctggagacagtggcagacagaggatcttcatcaactctcggttcgcttgacaaggcaatgatttcaacagcaaagacaaaagccgaaatggcagaagcggcatttgctgaaactctcaacggcaatattaaagacataaataagatacttgcagcatatgagatagcgggaatatcactgagagaatggaaactttcaggaaacagagtacttccgacaggcaatgtatgggtaagcggtgaaatagatgcttccatattcgaatcaggtgaaggtacagaaagttcaccgtacattataaagacagaggatcagcttcgtgcgtttgcaggctcgctgaatgacaaaatcgactatacagataagtttgttgcactcggagatgatattaagctttcagatgaagaatggaaacctgtaggcagaagcgactatctgtttaacggtacatttgacggacagggacatacagtttcaggaatgactctgggaagtgcggaaaagccatttgcgcttgataaagagaacctgtatataggtttcttcggagtgctgggacctcagtctgttgtaaagaacctgaaccttacagatgttgctttctatactacctttggtgctacagcatatgtaggcggtatagcaggagtaatgcagggctcaacaggcaggaatgactttaccggcgctgttattgacggctgctccgtttcgggcaacctttcacttaaaggcgataagggcaaccagttcgtaggcggtcttgtaggtatgcagtacaaaggcgccattataaattccgtagctaaggtaaatgcttcgggcgttgtactggcaggagacctggctgaagtaggcggccttgtaggtcttaacaacagaggccttgttgcaaactgccggtcagacagtacaatctacggcagcggcagccgtgaaaacggaaatgaaggtatggcggttgcaagtaatctggttgcgtgcaatgcaggtatgcttgttaactgctacggctcaggaaatgttacaactaaagaacattcagtttatgccggaatggtatcaggctgggtaacaggcataggcaagagctacaactgctggtataatcttgacagcacaatgattgtaggtgcggagacagataacccgcttacagtaaatcctgtagagtcaataggaacaaaggttgcctcaggcgtcaacgacgagggtgatgcatacacaggcggtcttgtagacaggatgacaggatacaattcagaaagctatagtgcgcttgcaggtgaactgaataatacatttgcagcgttccctgctgatatcacagtttatggattaaaagctaatgctttaaagaactgggcatatactgacggcactgttacttttggagataccaacgctgcagtaaactatgtacagcctgattgtgaaaaggtagaaaaaccggagctcaagcttaacgacggtacatggtacggccgcgacaatgacaaaaaatcagttgtaaaaatcacagtcaaggacggtgaggttgcaacagaggctatatcaggtgcagagagtggtgaaagctttgatgctgcagtagaaaaagcgaaatacaaagctacatacggagatttctcacattatgaaaaagctgatccaggcaaatttgcaggcggaagcggtacggctgaagacccgtacagaatttcaaatgaagcgcagcttcgctatctatcatactccatcaatgcagatgttaactggagcgacacatatttcgtacagactgcggatattactctgacaggtggcgactggcagccgataggctgggcgcttaacggcgaagtaaacggcaaaaaaactcaagtttgcgcttatccgttcaaaggaaacttcgacgggggaaactatactatcagaggccttgcaatcggcacagaaacaaatccggcagaccagatgacctcaggactgttcggactgactgcaggcacactgaatactaatgagaaaattaccgaaagcgacaaggttgttcgcctttcaaacattcatcttgaaaatatatacattaatgcggcgacaagatacgaaacctatacaggcggtcttgtgggaagcggacagacaggtatctttattgacaactgctctgtaacaggaaaaattaatgcaactacatcagaaagctttgcgcgtgccggcggacttggagcaagcgtgctgcgcggcgcggttacaaacagctgggcagatgttgatattaacgcggtgacagatacaaaccatgtatatgccggcggactgtacggcatggataaccgtgtgactacaatcaactgctatgccctcggaaacgttaaaggaaactcaaccaataacaacaaggtgcatatcggcggacttgcaggtcaggcaggcggtattcatatcaactgctatgcgacaggtgacgttgtatcacttaaaacaactacagatgtaggcatattaaacggccgttcaggcggtatcacaatcgactataactgctactataacagtgaagcggttctcaagcagggagatactgttgtatcacctgtaaaggggattggagtaataacaacaaacgctacagcagtcaatgttgagggcaaagccaaggcagaaatgtccggaagtgaatttgccgcgcttcttaacagcagcattacagacagcagtatgaagaaaatctttgcggctgtagatgaggctcttacagcgcaggcaggtcgtgattttgttcagcagaactattacgaaggaaacaagctgtcaggatggactgtgaaaaacggaacagtaacctttggtgaaaaccagtcacagccatcacagccgtcagtaccggctgtaccacctgcttcagaagtgcagaaacctgaaatagcgccggtaacgggcggagatgttaaactttcagaagacggtacatcaatagaaataactcctgcggcaggcatggtattagaaaaagtaaccgtaaacggtaaagaagttgcggtaaaagacaacaaggttacaggccttaagacaggagacaaggttgttgtaacatttgtcaagaagtcacagacaggagaagaagaattcaataacatcaaggatggtataaagaatcttaaactggctgtcagcactgcaaagaattcaaagaagaacgttaaggtcaatgtgaagattaagaacggcaagagcctgattaaggatctcgaatctaagggatatactgttaagtacaagttctataagtcaactaagaaagattcaaagtacaaggctgttaaaacaaagaatgcaggctcatatatcaacacttcaggcaaaaagggcactaagtactactacaaggctaaggtgcttgtatatgacggcaaaacccttgcagcacagacagagctcaagcagtgcagctatggtgtgaggacatggagtaaatagcgttgaggaatacaagaggattgagcctgcgttatagcatggtgaaattatcagagaatacttgacatagaatttgtatataatatataatgtctataggcaaaaggatattagtaaccatacggatactaaaagcaaaacccgacagatgctacctgtcgggttttattttatgctgattgttgccacagtatcatcttctatccagccatttgcagatataatggctggatagaagaaaataaggatattagccaatccatacagacacctccctcctgttgacagtatagggggtgacaacaactatattgtagcataaaacacagagtaaataaacataagtttgcgaaaataagtttgaaaaataaaatctagattatcagcacagtggcgaaagatggaacttgcaccgattgtagatacatagcaaaagagccggcataatgccggactctttgcaaataagaaagtctaatgaaatgtgagagtgactaatttatatcatcaagctgcttcttcacgctttcaaatgaagtagagcctgctgacagcttagctttgatacatgcggcaggatctatgttttcatagatatccgcttcaaatttatccgagaatgttttcagagtttcaagtgacaggtcctctattgcggtgttttcgtttatgcagtagagtaccagtctgcctattatctcgtggcagtctctgaaaggtattccctttgaaaccagatagtcagccgcatctgtagcattcataaatccgttcttcacagcggctttcattctgtccttattaaatgtgacagtcgaaatcatttctgtaaatatggataacgatgcttttaatgtatccgatgcatcaaataccggaggcttgtcctcctgcatatccttgttatatgcaagcggcaggctcttcataagggtgaaaagcgtaatcatatcgccgtatactcttccggttttacccctgataagctccgccatatcaggatttttcttctgcggcataatgctgctgcctgtagcaaaggcatcgtccatttcaacaaaaccgaattccgttgaattccacagaataagctcctcgcagaaccttgaaagatgcatcattgaaattgagcatgccgaaagaaattccagagcaaaatccctgtcgctgacagcatcaaggctgttggggcagatacccgcaaaacccagctcctgcgcaagaaaatccctgtctgtattgtaggttgttcctgccagcgcgccgcagccgagaggaagcatgtcggttctgcctaggcagtcctcaaaacgctgctcgtctctgttaaacatattgtagtatgccagcatatagtgcgccagagttacaggctgcgccctctgcagatgagtgtagccgggcattattgtttcctggtttttatctgcaatctcatacagcgccgatttcagatttttaaggagtgattgtatttcattgatttcttctttgagatacattctgaaatcgacagccacctggtcgttcctgcttcttgcggtatgcagttttttaccgacatcgcctattctttcagtgaggatactctcgatattcatatgaatatcctcctgctcgatagtaaactctattttaccggcctctatatccgccttgatattcttgagagcgctgattatctgatcagcctcatccttttcgattatgccctgctttgcaagcatagctgcgtgagcgcagctgcctgcaatatcctgagcgtacattctctgatcaaaagggatagaagcgttgaattcattagcagatgaagtcgctgtttttgtaaaccttcctttccagagcttcattaggcttgttacctccttctttaatctgtttctgtattgcacgaatcttcagaggcagtgagaacaggttgatgaaaccttctgcatcgctctggttgtatacttcgtccttgctgaatgtagcaaactcttcactgtataatgagttaggtgactgagttgcggcagggattgcggagcctttgtagagcttcatctttacaataccgtcaacatcagcttcgattgaatcaacgaaagctgagattgcagctcttaatggtgtgaaccataaaccgtcatatacaagctgtgcaaatttctgtgaaacaatattcttgtactggattgaatctctgtcaagtatcagcttttcaagtgcggcgtgagccttgtagaggattgttccgcccggagtttcatatacaccacgggatttcatacctacaagtctgttctcgattatatctatagttcctacgccgtttacggaaccgagttcgtttaattttgtaagaagttcaacaggtcccatttccactccgtcaagagctacaggaacacctgctttgaaagtgatgtcaacataggttgccttgtcgggagccttttcgataggaactgacttaacgtggatgtcgtcaaggtgctcgttccaaggattttcaaggtttccgccctcgtggctgatgtgccatatgttttcatctctgctgtatatctttttaactgtctgctcgataggaatattgtgagccttagcatattctatacattcttcccttgagcttaaatcccactctctccaaggagcgatgattttgattgacgggtctaatgctttgatagttgtttcaaatcttacctggtcgttacccttgcctgtgcagccgtgtacgatgtagtatgcgccttcctggtttgcgatttcaaccagcttctttgccataagcggtctagccattgatgttcccagcaggtaatcgttttcgtagattgcgccggctttcagtgtaggccatatgtagtctgttatgaactcttcctgaatgtcaagaacgtatgatttggaagcgcctgttgccagagctttctgattgattttgtcgaagtcatcgctctgtcctgcattacagcatacgcagattacgtcgaaatcgtaattctcttttaaccatgtaactataattgatgtgtcaagtccgcctgaataagcgagtacaactttttcctttgccatttttctctctacctttcttatttatatcgtaaatttatttaactttgttaacttgattatgattatacactattataaataattatgcaagagaaaatgaataaatatttataaaaaagttaaaaaacttggtttttatgcataaaacctgtgtttatacagcaaattgcgaataaaagctattgtgaaagctgccctgcggggcgaagatacggcaaagcgatcgcagacagtatcagtatgcagccgattatccctgtcaggcttacaggttcgctcaggaatattacgcccaggcttcccgccaccagaggattcagggcgcacatcaggcctgccgtttctgcggtggtgcctctctgggcaacaggctggagcgtgaagccgaagcctgtgcatactactgcaagaataactatcataatccattcactgctgccctgaggcatatgaggtgtttcaaatatgaaagaggcggcaaggcagagaaaacccattgttcccacctgaactattcctatgagcagagcatctcctttttttgaaagcctgtcggttgcaattatcgctatggcataaagcactgcggcaagtaggcacagaagctctccaaaggtcagagcaaatgagccggatttaagtgtcagaagtccgactccgacaagggctgctgttgcggaaatcatagcaggcggctttggcagcttcctgcacaagaccgcctcaaacagcggcacgaatactatcgctgtgttttcgagaaacgaggttgtggacgagtctgtgaatttcagaccgaacagctcagcgcacataacagcaaagaatatgctgccgagtatgactccgtttaaaagtgatgttttatctatattgataacccttttgaaaagcagtagaaacaggaaaacaaaggcgagaagaaatctgaccgtcataagattgagagggcctaaatcctccattactatttttgaaaaaagataggatgtacttcttgcgattattaccgccgcaagcagcagctccgctgcttttctgttcatatatatcagctcctttgttttgttgacaaaattatactgccgtcatataatttgagtaaagcgagaataaatcaaatgaatgttgaggaaatgtcaaaatggatacagaaaaatgcaaggccctcataactacaattgaagagggaagtctgtctgcggcggcggacagactgggctatacaccctccgggataagcagaatgatggcggctcttgaggatgaaacaggcttcagacttcttgcaagaagcagaaacggcgttgtacctacggccgaatgtgaaaaaatgatgccggtatttcgtgagctgatatactggggagagcagtattatcagtatgcggcggagcttcgcgggcttgagagaggtactgttactgtaggaacttcatacagctcctactacaaatggctctcggagatggtggcgaaattctgcagcagatatccgggaatagaggtaaagactctgcaggcaaacagcaccaatctttatcttgcgatggaggagcaccgcgcggatctttgcatagtaagcaggagagagcgggaatttgaatggattccgattaaagaggaccctatggtggtatgggtgccggagggacaccctgcggcagaggcaggcttttacagagataaggaccttgaaagcgaagactatatagaatcttttccagaggaggaaaccgacaatgcaagatttcttgcggacaggaatataaagcctgttgtcaaattcagcaccaccgacaattacgctacatactgtatggttgaaagcggactcggcgttgctcttatgaacgatatgtctatgggaagctggcagggcagggtaaaggcagttccggtggagcctcccgagcttgtgagcataggctttatctaccagagcgatgagcatctttcgcctgcggcaaggcgctttatagattttgctctggaatattcatcagaaatgaaataacggtattgaattatatgccgattaacaagtataatatatattaagcagaggcaggaggtagcaaaaatgaaaaaacaggtagttacaataagcagagaatacggaagcggcggcagagaaataggcagactgctggctgagagtatgggagttccgttttacgacagagagaaaatagatgagctgacttcgggcaagggttattctaaagaagtgcttgacaaggcggagatgaaagccaaaaacagcttcctgtataaccttacgactgcgcttggcggaagcggtatagagggcagcggcatagacggcctttcattaaacgaaaaggtttttcttgcccagtttgaaacaatcaaaaaactggcgtcagagggtccctgcgtaatcgtgggcagatgcgcggactatgtgttaagagatattccggaggctaccaatatattcatatatgcagagcctgaggaccgtatagaaagagcgattaaagaatacggtattgcgcctgacgaggctaagggctgggttgcaatctgcgacaaggccagagccaactactataatcatcatacaggcagaagatggggcgaggccgtaaactatcatatgtcaattgattcaggctacatctcaaaggaaaatatagtaagattaattgaagaatatatggaattaagaaagtaattgtgataacatataaattagtccggccgccatcaggccggcaatatatttgccgcttctcattcgaggcggagatgaaaggaaagataaaactatgacagacaaaaaaggtacctattatataacgacacctatttattatccaagctcaaacctgcacataggacatacctactgcacggtaatggcagatgcaatggccagatttaagagaatgacaggctatgatgtaatgttcctgacaggtacggacgagcacggtcagaagataatgaatatagcacaggaaaagggagtaaccccgcaggaatatgttgacggagttgttgccggcatcaaggacctgtggaagaccatggagatttccaacgatgatttcataagaacaactgagccaagacatatcaagagagttcaggatatgtttatgagattatatgaaaagggagatatatacaagagcgaatacgaaggtctgtactgtacaccttgcgagtcattctggacagagagccagcttgttgacggcaaatgtccagactgcggcagacctgtacagcctgccaaggaagaagcgtacttcttcaagctttcaaaatatgcggacaggcttcttgcgctttacgaggaacaccctgagttcctgcagcctgagtccagaaaaaacgaaatggtagcctttataaatcaggggcttgaggacctgtgcatctccagatcgacttttgactggggcattccggtacctattgatacaaagcatgtaatatatgtatggcttgacgctcttacaaactacatcacagctttaggctggcctgatgaacctgagaaatacgacaaatactggcctgcggacgtacatcttgtaggtaaggaaatcgtaagatttcactcgattatatggcctgcaatgctgatgagcgcagacctgccgcttccaaagcaggtaagaggccacggctggctgcttctgggcggagaaaaagtaagcaaatccaaggcttccaagggcgccgatgtggttgaccctgtagtccttatagacagatacggtattgacgctctcaaatacttcctgcttcgtgaatatactttcggacaggacggcatatttacaaatgaagtaatgctcaagagaatgaactacgaccttgcaaacgatttaggcaatctggtttcaagaacggtttcaatgattgaaaaatacaacggtggttttgttcctgaggctaaaggcgaggaagctgttgatgcagaccttaaggctattgcgacaggcgctgctgcaaaggttgaggagcagatggacaaattcgcgttcaatatggctcttgaggaaatttgggttgtagtaagaagagccaacaaatatatagatgaaaccacaccttggatactggccaaggatgaggcattaaaggacagactggatacagttatgcacaatcttgcagaaaccatcagaattatatcgattctcatctatccgtttatgcacactacagcagacaagatcagaaagcagatgggtctttggtatgcagagcctgtatgggatgacgctcttgtattcgatatgatgaacggagagcaggttaagaagggcgatgctatattccctagacttgacatcgaaaaagaacttgaggagctggcggcactcagcgcgccaaaggaagaaaacatacctttagagctgaaagatgaaatcgtatacgatgattttgacaagcttgatttaagagtaggtacaattcttgaggctgagaagcaccctaaggcagacaagctgctggtattccaggtacagctgggaacagaaaaaagacagattatatccggcgttgcaaactacttcaaacctgaggaatgtgtcggcaggaaagttgtagttgttgcaaatcttgcgcctcgtaagttaagaggacttgagtcaaagggtatgattttattcgcagacgatatagcagatggcaaggaaaccctgcagtttgttacaaccattgcaaatgacggtaacccggtaacatagaaattacagacatttaaaggtgcggcttttccgcaccttgatttttacggaggaataaatgctatttgatgcacacacacatataaatgaaagaagtctcagcgacaaggagagagcggacttcataaaatcagttgaagatgcaggtatggacggggctgttgatgtgggctacgacctcgaaagctcagctcttgcggcaaagcacgcagagatgtatgactggtgctatgcggccgtaggctgccaccctcacgatgcggacagcttcgatgagatacagcttgagatgataagggggcttgccctcaaaaaaaaggtggtggccataggagaaatcggactggacttttacagaaacctttcggacccggaagtgcaggagtactggttcagaagacagatacagcttgccaatgagctcaaaatgcctatagttatccacgaaagagatgcggtgcaggcggttatggatgttctcaaggaggagggagctttcagagatgagagaaaaagct

SEQ ID NO: 1607 - DNA, 4917 bp, Unknown
  16S sequences of unknown bacteria
agctccaaaaagcttttataaaaatcattttcgtttttatacctgtcaaggtcgacaatatcttctctgagccctctgatttcctcccgaagatcgttgttttcctgttcaagctgttcggcacggtcgatggaagtgaagaaattgtttactcccctgccgattgcgctgaaagcatgctgaaccggggtcacgactgcgccgaaaaaagacgattgcggagaaatactttttccaagcccataagacgccccgcaaaggacggcaagacacacgaaaattataacaaatattttgaagcccttgctttttaaaaagactttcatttttaacctcaattatactttcttctgcggtcgaaaaagctttcgtcaattcccatttcaattcgcttgagggttccttcaacaacgcagtcgagaggattttcggcaatttcgaccgatattcccgtcacgtccgaaatgactctatcgaggccgcgaagcagcgccccgccgcccgtgagcacgattccgcggttgacaacgtcgcccgcaagctcgggcggggttttttcaagagtcgttctgacagcgtcaagaatattcgaaacggtgtcggcaagcgcatctctcacttcgccgggagtgataatcacatttttgggaaggccgtcgacaagattgcgtcccctgacctccataggctcctcgccctcgaaaatggttgccgagccgatgttaatcttaatttgttctgccgttctttcgccgatgagcacattgtgccttttgcgaatgtaggttattatggcctcgtccatatcgtcgcccgccacacgaaccgaacgggatgtcacaatatctccgagggaaataaccgcgacctcggaggttcctccgccgatgtcaacgaccatacttccaactggctcataaacgggaagccccgcgccgagagctgcggccatgggctcttctataaggtcgacgtcacgggcgcctgcctgaacggcggcgtcatgaacggctctgacctcaacctcggtaactcccgagggaatacatactattacctttgcacgggaaatgaccgttcctttaacggcgtcgcgtataaatcttttaagcatcgcggcggtcacgtcaaaatcggcgattactccgtccttaagaggccgcacggccgcaatgctgccgggggttcggcctatcatttcctttgcttctcttcccacagcgcgaaccgcgtcgtttctgacatcgaccgcgacgaccgacggctcacgcatcacgataccttttcctttgatacagacaagcgtgtttgccgtacccagatcaattccgatttcccttgtaaacatggtttgctccccaatacaatttttttatatcaaaacagacttttcattcatagatacattgacattataacgcaaataccctgcttatacaatgctttttttgagttttttaagattttttatgtaaaccttttttgcacacaaaaagccctccgcaaaaacggaaggcttaaaaatcaataaagctctttttccaaaatatccgcagcaattttcacaagctcggcgcagggacgttttttataatatcccgcagtacgctcgtcgggaatgtttccgacgcattttccgctgcaccctgctccctcaagaagttctctgcaaattatgctgccgttttgctccttaaaatcggccgcaagcttttgaatgagtgcataatgagcgctttttgcggctctgtcgcaagggtcggaataaccgcatttaatccccgcaaccatgaatgaaccggtaacagctccgcagacctctctcatgcggcccattccccctccgaaggatgaggaaagccttatgagactgtcgaagtcgacgtcaagatcatcggcaaaagcgcctaccacggcttgtgagcaattataacctttgagaaaaagttcttttgccttttcccctcttgtcatagcgttttttccaccttgtcggccattttgtcaagccaattaccctcgaaaagctcaatggctcccttgtcgcaggcggcggcaagcttttgattcatgggaatttcgcaaactgtatcaatggaaaattcttttgcggtttcgtcggccttgttttcaccgaaaatatagtgctttgaaccgcagtcgggacactcgaaatacgccatgttctgaacaagtccgagaacgggaacatccataagctttgccatcttaacggccttttccacaatcatggagacaaggtcctgaggagatgtaacaacgataattccgtcaacgggaagtgactggaatacggtcagcggaacgtcgcccgttccgggaggcatatcgacaaacataaagtcgacatcgttccaaataacctcgttccagaattgcttgacaacaccgccgataacggggcctctccaaactacggggtcggaggggttttcaagcaaaagatttatggacattacttcaattccggtcttggtattcacgggataaagaccgttgtcgtcaccggttgcatgttcgttaagcccgaaaacggcgggaattgatgggccggttatgtcggcgtcaagcacggcggatttatatcctctgcgctgcattgatacggccataagcgaggtgacaagagattttcccacgccgcccttgccgctcaccactccgataaccttttttatgtggctgagctcatgaggcttttctttttcgattacgtttgcacggctgtcacaatcggcatggcagcttgaacaatcatgtgtacattcgctcataatattatctcccttcgggtttaaaaccccgattttttatattccttgccctcttcaacatatttaagggcattttgacgattgctttcggtgccttcggcgtcgacctcttttatgaccttggcggggcaaccgacaagcaaagaatttgcggggattttcttgttttgcgtaaccgtcgcgcctgcgccaattatacaattgtcgccaatctcggctccgttcaaaatcacggctcccatgcccacaagcacattgtttccgattgtgcagccgtggacaattgctccgtgccccacggtgacatttttgcctattttaacgggaaagcccgtgtcgacgtgcacaacggcattgtcctggatattacttccctttccgacatatatgctgtcggtgtccccgcggacaacagcgccaaaccaaatgtttgcgtcgtcctcaaccgttacatcgccgataatgacggcgcttttcgccgcaaaggctttttccgatatttttggctgtttcacgatcaattttctccctctgcaagctgacgtcccataagcacgcccataaccgacgccatcataagacctctcgtccaaccgcttgagtcgccgaggcaatggagtcccttgacgttagtattgaacttttcatccattttgatacggttggaataaaatttaagctcgggtgaataaaggagcgtttcggtggaagcaaatccgggcacgacgtgatccatggcctgtataaaattgataatgttgaccatggcgcggtaaggcattgcggcggttatgtcgcctgcaaccgcatcgggcagcgaaggacggagattggagtgtgaaagttccttttcccatgttctttttccgtcgagaatatctccgaaacgctgaacaaggatgtgccccgcaccgagcatattggtcagctcgcccaccttttgtgcatattcaatgggctgattgaagggataattgaaattatgggagcaaagaatagcaacatttgtgttgccggattttttgtccttgtatgagtgtccgttgacaacggcaaggtcgttatcataattttcctggctgacaaaaccgccgggattttggcagaaggttctgaccttgtttttaaagggcttggggtaaccgataagcttggactcgtaaagaacgtcgttgaccttttcgataacctcgtttcgaacctcaactctgacgccgatgtcaaccgttccgggctgatgggcgatgttatgctcggcgcagattttttcaagccattcggcacctctgcgtccggtggcaataaccgtctgctttgcgaaaattttgtgagaatcgttcttgccggttatgtaaacgcccttgcaggtgtctccgtcgagaataatgttggaacattcatatccgaaaagaatttccacgccgttgttctgaagccaatgctcaagggcaagataaagctcctgcgccttttcggttccgagatggcgtatgggacagtcgacaagcttaagtcccgcctgaatggctctttttctgatttccttgacttcttcggtgttttcgataccctcaatgtgctcgtcggcaccgaattcaagatatatcttatcggtataatcaatggtttcctgggcaaaatcctcgccgataagcgtgggaaggtcgccgcccacctcatagctcagtgacagctttccgtcggaaaaggctcctgcgcccgaaaagcccgtcgtaatgtgacagtagggcttgcagttcatacatttttttgtcttggctttgggacagctgcgtttttcaatcgactgacccttttccacgatgataattttctttttcgacccttttctcagcatttcaatggcggtaaaaattcccgcagggcctgcaccgacgataacaacgtctgtattcataaaaaatgatgtcctttcggcgggtcatagttttttgtaaccacagccaaattatattataccctttttacgcataattgtcaaccgtttaacaatcttgacgaataacagcaaaaatccccgccgcaaagactcataaatcaaacagcctttacggcgggctttcggtgtttatttcgtagtcggcgtgctctcgatgttgct

SEQ ID NO: 1608 - DNA, 6881 bp, Unknown
  16S sequences of unknown bacteria
atctcaagctcaaacagacgcttgacaagccccggcgcggttctcgaaagcgagaccagcggtccgcggagcgactccttcatgacctcggtgacaaacacctttatatggtcgccgacgttgaagtgttcgcccgggatctgctccgccttcttgaggtagaccttgctcgtgccggtatcgacaaggacatcctcgttctccgggtcgatcttatcgacgatcgcggtgatgatctcttccttcttgctctcgtactccttgatcatcatcgagcgctccgcctcgcggatgccctggatgatcacctgcttcgcggtctgagcggacaggcggcggaagttcttcggcttgagctcgatctcacaggtgtcgccgagcgtgtacttgcggttgatcttgagcgcgtcggcaagcccgatctcgagctcggggtccccgacttcctcgactatcgtcttctgctcgaacatctttatgtcctgcttatccttgttgatttcaacgcggacgttcgcaagaccgttacgatcgcgcttgtaggcgctgatcagcgccgcctcgacacgctcgagcatataatccttcgatatgcctttctccttctcaagcatatcgagcgcttcaaataattcggaattcatgatctgatacgccgatccgtctcctgacggatctttcctttcctgaaatgaaataaatgactaaaaatcgaataccgtcttcgccttcgagacggcgtctctcgggatactgtaaacattctcgccgtcgcggagagttatgacaccgtccgcgaagctctcgagtgtccccgtgaaagccttcctgcccggataggcctcgagcggcgcgaagagccgcacctcgagcttctcgccgatcagcgccgcgtagtgccggtcgtacttcacgtccctctcaagccccggcgacgaaacctgaaggttatacgtgccctcgatcggatcaagctcgtcgagcagaggatctatcgtgcggtgcaccttctcgcagtcgtcgatggttatcccgtccggactgtcgatcgtgaagcgcaggaaatactccgcgccctccttgacatactcgatgtcccagacctcgtagccgagcccctctatgaccggcgtcagcgcctccgagacgacggagacgacctttcccgccggccgcttgttctttatcgtttcatccttcacgcctgtttaccacctttgtataaaacatcatcacaacaaacgagagtgggctttgtcaacccactctcctttataataatatagcctacactataattataccacacgtttcctcaaaatgcaataggtatcgcaaatttttttcgtcaacgcaaatattttttgagctcgtgactccacagctacaattctccgaaaagaatcagacaaagtcttgacatccaccatccggaatgatatactataacgatatggcacaaagctgtataggcggcttgaggaatcaaggagagtaagaaatgtatactatcgtcaatacgtccgaaagcaagccagtatagaggtactgctccgaaatacttgaggaaacactgaattaaggtcgttttcgcataaaacccataaatccgggggctttttcctgcgaaaaaccgatttattcagtgtatccctgagcgtccatgataccaaccatccgtcgtatgtcgtgttcattaaagccgtatacgaagtccacaacatgatacaggcgttactcagggccctcacgccacgcctgaaccgcaagttgagccctgtgatcacacgaaagcggaaatcccggcgaggtcaaccctcgccgggatttccaaaagaaagaaaaagaaaggaaaagaaaagaaagttaaaattctaaaaaagcaccggtgtccggctgacatttccgtcaccgatatatattatagcacatgttttacggtatgtcaataccttttcaaaaaaagttttggcattttgcgattttactctcgctttacagttttacaattcctttactcaaccgtcggttcatgtccgatgccgtttcactcgtcgtcagtcgtgtcatcatcgtcatccgcgtcatcattcacagacgcggtcggcgctatgcgcgcatgggcaagcgggttcgcgtcaacggcgcggcgcattccctcatcgctcacgtgggtgtatatctgggtcgtgttcagctgttcatgaccgaggatatccttcagaaccctcacgtcgacgttccccgtacggtacatcagcgtcgccgccgtgtgacgcagcttgtgcgccgaatatcccttgttcccgagccctgcctcgtcaaggtacttgtagaccacccactgcaccgtcttgttgctgatccttgtgtgcctcgaggacagaagcagcgcgtccttgtcgcgtatctccgggtccgcggcgcgcaccgggaggtatttttttatcgcctcgcggcaggcgtcgttcaggtatatcatacgctccttattgccctttccgacgaccctcatcgacgttattccgctgtcgatgtccgagagattgatcccgcagagctccgagagacgcatcccgcagttcaggaacagcgtcagtatgcagtagtccctctcacgcgtcttcgactccgcgtcgccgagaaccgcgccgagaagcgcctcgctctcgtcgagggacagaaacttcggcagggttttctttttctgcggtccctcgatgttcttcgtcgggtcgttctcaactctgtgtgttccgaccgtgagatatttgtagaagctcttgagcgccgagagctttctcgcccgcgccgcccactggttctcacggtcgctcagggcgtagtaaagaaaaccgtatatctcgtccggcgtgaccgaaccgtagaagccggtttcgagcccggatatgtcgagcccggtcatcgtgtcctcatcgatcttctccatgtccgcgccggagcggctcagcatcagccagcgggaaaaagtccgtatgtcgagcgcgtactcgtcggtcgtcttcttcgagcgaccctgcactgtctgtttgtatttaataaaatcctgaagatccttcgggagctcactgtaatctatcagcgtctgcataccgttatcgtcctttcaccgtgcgcggcggagcgtattttgtataattataaaccattcgcggcaatttgtcaagtccgtcagagaccgccggagccgatgaggttaaagttcagcgactattctgtaaatttttcctgtcaagggttgaaaaacggaccgtgaatttgtaaaatatatatatggaagcactgatttaagattgttttcgcgaaaatcctatttattcagtttatccataagtataattatcacgcgcgtcggcgcgtatatcacacaacaggaaccattttccggaaggtcacggtgttatgaaattcataaaagaaaactcatataatatgttcaagatgtttctcgaccagatagcgatgaccgtgttcggcacgatgctctccttcgctaccctgaaaaacgaagggctgctgcttgcgtcgagcatattctcgatattgttctatctcatgctgctctacacggtcggctgggacatcggcgcgagggacaagatacgtattgacggcgggcgcatgaagccgttcccgatgaagggatttttaatagccctcggggcgaacacgctgaacattctcctcgcgcttctcatcggcatcggcgtcatgatcgacacggaatggtcgaacggcatggcgctcatctgcaacgccgtcgcgagactcgccgagggaatgtatctcggagtcataagcatcctcgagcacaagctctttgagaatcccggaatacgcgacgtgtggtggtggttcctcatcatagtcattccgtcgctctttaccggatggctgtcctacttcatgggcacgcgcgacctcagcgtatcgaggatactcggcatcaagcgccgcgacgacgcgggaaacctcacgggcaaaaacagaatgaaataaaaacacaatatgatgaaaggtcggtatacggacatggacaagaacctgagacaggtcagaaagaatataaaacggataggagacaggctgaactccgagcgcggactgatggtccgcagcagcgtcgacgtgacaacatcggtctactctcacggcaaggagaacaagccgtggttcacgatgagccggaagggcgactacaagatctccgttctgaagctcgctctcatcggaacgggcgtggtgctcgccgccgccgggctgatctcgatcctccgccgcgctgccgaacgcctgaaaagacgcgcggctcacgcgtacttcgacgaggacgatctgatctgacaaaaaagcacgtcatcatgtttatcggaaaattcataaccattcccgagttcgcctttctcgagccgatcgacgtctttcaccgcgaatggacgcacggcagcggaagaccgcacccggaggaactcagaaatctgcacatcacgttccgggggacgttcgcaggacagaccgccggacgtgtcgttgtccgctggaccgcggatgattactgcaaactttatgtgaacggaagattcgcttcccagggtccggctcagggatattattttgactataactactgtgagaccgacatcacggatatgctcgccgacggagagaacataatagacgccgacgtctattatcagggactcataaaccgcgcgtatgacagcggcgatctgcgctgcgggttcatctgtgacgtcatcgccgacgggacgaccgtgttctcgactgacgagaactggagatgccgatttgaccgcagctatacaggacgccgaacgaccggttatgagactcagtatctcgaagaccgggatctgcgcctgaagccgacggaatggggacgcgtgcgcgtcagggagcacgactacaccttcgccgaaaagccgttcccggcgctcgatgtctataccctcgagccggtcggctcagtgtcgcgcgtgatatccggcgaaggaaatgtaaatgatgtgccttcacaggaatcggcggagatcacgacggcggaagaatccgcggctgagaccgccgacggaagcgacacattgaccgatccctccggctctgacgatatcgccgaaaccgcgccggaaaaacgcccgggcacaaggcgctcggtcatctatgatttcggaaaagagctcgtcggctcaccggatatcgtgatccgcgggcatgacggcgacaaagttgtcatccgcgccgccgaagagctcgcgaacggcaccgagggtgtccttgagccggacaccgaaataaggtacaagacccgcgcgaactgcgtatacgacgaggaagtcatcctcgccgagggtgaaaatcatataacccaatacgactacaaggcgttcagatacacagagcttatcttcccggaggacgacgagctcatgaccgtgacggcaaccgcgcgcaaccacccgttcgacgaaaacgcctgtgtgctcgacacgtcggacaaggttctgagcgatgtgttcggaatctgcaagcacggcgtgaagctcggctcgcaggaggtctatgtcgactgcccggggcgcgaaaaagggcagtacgcgggagatctgacgataacaagcgcgtcgcagatgtggctcaccggctcgaccgacctttttgtgaaggcggtgcggaaccagtgcgagtccgcattcatcgacgacggtctcatggcggtgacgccggggtcatatatgcaggaaatcgcggattactcgctccagttcccgatactcgcgctgagatactatgatttcaccggagacagggcgggactcgtaaagctcatcggggtatgcgacaagctcctcacgtccttcgagcgctttcagcgtgacgacggacttctcgaaggagtcgacaaatggaatctcgtcgactggccgtcgaatctcagggacgactacgactttgaactgacgaacccgatagggaagggcgtccacaacgtgataaacgccttctatatcggcgcggtcatctgcaccgaaaagctcatcagtcttgccgggatagaccttgataacagcgtcgacggcggcgcgagacgctctgacgctctgattgaggcgtatgagcgcgcgttctggcggccggagcagatgctctacgcggacagcgagacttcaggtcacgcgtctctccactcgaatgttctgccgctctatttcggtttcgcccggacagaggctcatccgcacatcgccgacctcatccgtcggcgcggtttctcgagcggagtctatatgtcgtatttcacgatgaaggctctcgcgagggtcggactctactctgacatctggaacatgataacatctgtcggcgaaaactcctggtacaacatggtaagagaaggcaataccgcctgcatcgaggcgtggggcaaggacaagaaatggaacacgagcctctgccatccgtgggcaagcgctccggtatccgtactgattgaggatcttgtgggaatatcgccgcgtgagccgggattcaaggatatcagcgtccaccctcatctgccgaagagcctcgcaaagctcgatatgcgcattcctctcccggacggacggcacgtcgagttcgagtgggacaaaggattctacaactggcgccttctgaaataaggcggcatgaccccgcgcaatctctgcttttgtgctgaatagctttaatctgttgggctttcagcgcaaaaacgcccctgagtcagcgtttcattaatgctttgcaaaggagcctgatgatatgaaaaaaacagcagctctgctttccctgctgaccttaatcctgtttctgtcaggatg

SEQ ID NO: 1609 - DNA, 26910 bp, Unknown
  16S sequences of unknown bacteria
gggatctggatcagcttgtgaaaaagcaaaacgctttgttggaacgctatcagcaaaacggcgggcttacctatcgggcccgtacccgcagcatgctgcttggcatggggttttcacaaagcgatctgtctttgccaatgaaagcgctttctggcggccagcaaagcaaagtgcaaatgtgcaaactgttgctctctggcgcggatctcctgcttttggacgaaccaaccaaccacttggacatccaaagcgtagaatggctggaaagctttttgcaaacatatccgggtgcgcttttggtcgtttcccatgaccgttattttttggataagatctgtacgtcgatcctgtcgctggagcacggcagcgtgaaacgctatgcgggcaactactctcagttttaccaaaaacgcgaacagcaacgcatagaagaagagcgtcattataaaaatgcacaaagagaaatacagcgcatggagaacatgatcacccagctgcgtcgctggaatcgtgaaaaatccatccgaacggcggaaagcaaagaaaagcagctggcaaaattgaaggatagcgttaaagcacccacacctattgccccaacgcttggtttttcgttgtccgttgcgcaggctagcggacaggatgtgctcatagccgagcacctgtccaaagcctacaacaaaccgctgttcaccgatgtatctctgcatatccggaaaggagagcgagtatttttgctggggccaaatggctgcggcaaaaccacgctgttccgcattttgatgaaaaaaattaagccggacgttggtttggtgcagtatggcgccaatgtacggcccggctattatgaccagacgcaaagcgggctatccccccaggcaacagccctggaggagatccaaaatgcatatccgcatatgaacgatacccaagcgcgcagcgcactggcgatgtttttatttcggggtgatgacgttttcaaaccgattgccgcgctctccggcggagaaaaggctcggatcgagctattaaaactcatgctctcggaatcaaatttcttgcttttggatgagccgacaaaccacctggacgccgattcgcgggaagcgttggaaaatgccctggagggctatgaaggcacgctgtttgccataacgcatgaccggtatttggccaaccgattggcaacgagaatcctcgccttcacgccggatggattgcgcgaaagcctgggcaattatgatgattatctgcgaaatgcagagcaatgggcccagctggcacagccgagcacggagaaagcgccaaaagctgccgtcgttacgcaaagcaagcagcaacgtgaatcctccattcagcttcgcaggctaaaggcacagcttcgtaaatgtgaagatgaaatctctaagctggaagaggccattgcccaaagtgagcagcagctttccgatccgtctcttgcatcagattatcagaaaatgatggaggttaccgatacgatagatgcgcaaaagcagcagctggatcaagcgatggagcgttgggaatgcttgagtcttgaaattggagaataagctccatttgataaaaataccagaagggggtatgtgaaaaatgccaaagtttttaaatgaagaatttacctggatgaacccaggaacgctaacgccagaagaaaacgggttttccattgctgctcctccgcattctgattttttcagagatcctacggaggataagctcatctgtgaaaatgcgccgttcttttatacggaagtcacgggcgattttgtcctgcgcgctacggtgtggcatgatttcattgcggcaggggatgcttgtacattgatggtcatggatacgccgaccttgtgggccaaggcatgctttgagcaaacatatttcggttcgcataccgccgtaagcgtggtcaccaacggcttatccgatgacgccaatgggcaaaacatcatagaacaagaagccattaccctgcaatatgcgcgcaagggaaatacctttgccatccactattcgctggatggagagcacttctatatgatgcgccttttcaatctaccgatgcgtgaaacggtcaaggtcggttttgtggcgcaatcccctgcaggcgaaggcggtattatgcattttaaggatgtatccttagaacaccgcagcatccaggatatgcgcgtgggccgctgagttgtatgccggcaatgccaatatgccaaacccaatcgtgttttttgaatgaaaaaagccgtggcaatgccacggctttttgattgcatcaaaagataccgtctatctgtccctgttcattgatacaaatgttttccgccgctggttttttcggcaaccccggcattgtcatcatctgccccgtcaaggcgacgataaagcctgccccagcggatactttcatgctgcgcacggtcaatacaaagtcctgtggccgtccctttttctttgcatcatcggaaagagacatttgtgtcttagccatgcacacaggcgttttgccaaagccattttccgtaaggctacgcatttgctctttcgcttggtcggtaaaggaaacatcctttgctccatagatcttggtagcgatcgtccgtattttttcctctatgctctgtatttggtcatagaggaaatgcgggccgttgttgggcgtttccatcgcctgcaatacagcatccgccagcgccagcgcgccctggccgcctttggcccatacctctgtcagtaccgctttgacgcccagttcgttttcacagaaggacagcacggtttccagttcctcatcgctatccgatacaaagcggttgagcgccaccaccgtaggcagctggaatttctgcgccatgttttctacatgcgcctgcaggttgcaaaggccctggcgcagcgcctgtacattcgggatattgagatcgtccttggccacaccgccgtggaatttcaaagcgcgtaccgtagcaacaacgacgcaagcatccggccaaatacccgctttgcggcatttgatatccaaaaacttttccgcccctaggtccgcgccaaagcccgcctccgtcacagtgacgtccgccagcctgcgcgccaggtttgtcgccgctactgtattgcagccatgcgcgatgttggcaaacggtccgccatgcaccagggccggcgtaccgcccaggctctgcaccagattgggctgcattgcctctttcaaaagcgcagccatcgccccctctgcatgcaaatccttggccgtaacaggatgatcctcctcgtcatatcccacaatcaaattgcctagccgccgcgtcagatcctccaaatcgctggccaggcaaagcgtcgccatgacctcgctggccgctgttatatcaaagccatcttctctgggcacgccgtccttgctaccgccgaggccactttggatcacacgaagctgcctatcgttcatatccatgcagcgtttccaggtcacacgcttgatatgcttttcattcccttggaaaatatgattgtccaccatggctgccaatagattattggccaccccgatggcgtgcagatcgccggtaaaatgcagattgatctcatccatcggcacaatctgcgccatgccgccgcccgtggccccgcctttgacgccaaatacagggccgagggacggctcgcgcagcgctaacattgttttaacgccttttagattcagcccgtcagccaaaccgatggaaaccgttgttttaccttcccccgcaggggtcggcgtgatcgctgttaccagcaccagcttccccggctcattctgttgtacccgctctatggcctcctgatctatctttgctttgttttttccgtagtagcaaagctcttttggcaaaaggcctgctctattcgcaatttcctctaggggcagagccacatgctcccttgcgatttctacatccgatttcatagcgaaaactccctttctctttatttacattccttcgttgagaaatttcactttatccagcgcctttgccaacggatatcccaggccaacgcaggcaattgcctggccgacgcctacataaatcaccccaagccaataggcctgctcggcaaagatcgatagcacgatgggcactagaagcgcattggtgatgaccggcatacacagcgccagcaccctgtttttctttgcaaagatagcgacccccaatgcccctaaaaacgttgccaacgtgccaagggtgatatcgaggattccgaacgggctccagaacaggttgctcaacaaacagcccaccgtcagccccggcaccatccaagggctgaatagtgccaaagcgcaaagcgcctcggaaacgcgtacctgtatgcctccaaagcttatgggggcaaataaccccgtagctgcaatatacaatgctgcgaccatggccgccagcgcaagggccttgatgctttttccctttttcattccttcacactcctatgattttattataacatatacgccctgggaactcagaggattttcatcatggctagtcctttaataaggttcgcacctgccaatgtctggcaatttattgcaaaaaagtttaataaatgttaatattttattacttttggaggtgcctatgagaaaactgatccatggacagtctatttttcgtgtattgactgctttccttttatgttttacaacaatgctggccctatcttctcctgtaagagccaatgctaagggtgcttcacccctggccgagctacccgtacaaatggaagcgctcatagagcagtatcaggatatcatggagaaaaatccaatcagctttttgtcctgggagcaagccgatacgatttttccccacaacacaaccgttgaggttatcgatgtagagacaggacagcgtttttttgtacagcgcatttacggctccttgcatgcggacgtcgtaccaaaacagcaacaggatacccagatcctgtcagcactctatggcggtacatatagttgggatcgccgcgccatcgtggtagggttagaggggaggtattacgctgcctccatgaacggtatgccgcacggaaacgggatagagggcaacggatatcccggacatttttgtattcattttgtagacagcaaaacacacggcgggcgcaatgtatgtccacaacatcaagcaaagattcaccaagcctatgaacagggcggccaatggttctcttttgaagagagatggcacagctttgtttagggcatggccaatttccctcttgacataatctttcttttcattataatagacatgcatggggcattggcacagttggtagtccttcttgcgtgctttacaccatgaggaaaacttaactggatagcactcaatataacaatatggggcattggcacagttggtagtccttccggcgtgctttacaccatgaggaaaacttaactggatagcacttaacataacaatatggggcattggcacagttggtagtgcgcctcgttcgcatcgaggaggtcagcggttcgactccgctatgctccaccaaaaggaaggcagtctgatacgcagactgcctttttcttttccaattccagaggagtttgatggtatgaaatgtttagaacgatatgcgtgggtaaagctcccgcgtacccaaatacccgctggccgcagcttgttaagcaacttcatgcggctgtacgccagcgctgcttaccgccccggacaagctcgctactgtcaatatatcaacgaagtacactttggccaatgggttggcggcatcgtcggactcaaaagcatcttgggcctttcctcccgtgaacaggcatttttggtgctggaagaactatcaaattggggcctgctcgaatacgagtacgacccaaaatccaaacggctttcctaccatatatcgcaaacacagcgcatcgctgttcccacacaagggatccccatttacgcaagagaacaaggattcctgtgcgtaccccgtacccttacgcagcctttgattcaggccggctatgtttttgaagagatcgacgcctggcttgatctttggatccataccatctatcgggattccgattcccctctctcaaatatcgtaccacttgtccagttcgataccggcccagctctcaccttagcatctcttggcaaccggtggggatgggaacgtacaaaggtgtggcgctttttcaaaaagtatgccgacaccttttttcttttcaagctgcccggttcctatggggctgtcgtctgcaacatgatgtattgccaaacagaaaatgcgcattctgtccggaaaaccatctcgcgatttgtatgcaaaatactcattctcggacggaatacgctttccggccaaaaaacgtatttacgtctcaaccgccttctccggcttttcggcgctgtggtaggcaaaatgtttttttggctcaaaagtcgtgttgcaccacgcagtctatatacgcgcgcgtatatttcttcctggatagatctatctggattattagactgcaagcgtgtatttggtggtacaagctcggtacgagatcccattatgatacgaggcgaataagatgtctgaaacaaaaaactatgaacaacaggaacatatgattttatgcgagtccaataagttcgttcaatatttggtggaccgtggcttgctaaaagatcccgaaatcaccgatgaaaccgctcaaaaacacaatcaaaaacgaaaatataacctataccacaacaccctgctgctcctcaagaactaccgcaatatatgctggcagttaaaggcgttccctgcaaatattacagcagagctggaccagcctctggcggaagtggacaacattctttccttggttgacgaccagctggatatgggcaatcgcaggttggaaagccggctgcgttctttgcaaaaatccaggatactgatcgaccggctcaatgaggccgttgcgatcctgaaaacaaaaccgggcgacgggccattgctgtacgatgtgatctataccgcttaccttcagcctgaagaactgggctatgcggaaatcatcgaacggctgaatatgtcgatccgccaatactatcgccttcgcaaacgcgcggtcaatctcatctccatacggctttggtcagccccctctcgtgagcttgaaatcctattggataccgttgcgcttttagaggccatgaatgaagcgtaaaaaatctggcacaaatctgctaacgacatgcatgggaaaacaggttacactgataccgtgccaagatgggcataggcaagacgccgtatcctctcgtgatgagatatacggcgtcttttgtgtaggaggagatgaaatgcaagctacaagggataagcgttggtattggatgatcgtcagtgcggtttccgcgctgattttatccgtacagcttgtaatggccgatgatatttggagccggttttcttccatcatgcgggatgtatacggccaaatcgtcggtatatccaccatcgtaggcgtgaccgcagccgcgattgcgctcatcgtccgtatggtttcccgcaaccagcgcgctgtggatgaagccacacaatggctaaaacgcattgtcattacctggatcatcctgaacacgcttggctttgcggtagcctatctgcaaccgttgattgcaggcggcaattatacggggtaatacagcatgctggattggatttttgaaggcattgccgaatggatcggcggcatcgtttcttccatgatggacgccgtcagcggcatttttctcggcgccctgggcgctgatatgaccaccatggaagaatacttcccctttgtcaaaagcgccttttcggtgttgcagtacaccgcttgggcgcttttgttcctcattaccgtatggcagctattccgcagtttcggcggcccgatttccgaatcggaaaacccttggcagcttgttgcccgcagcgctctgtttgcagtcttggttgcctacgccaaacccatctttgagatctgtctatccattgcccgagcgccttatctcgcactcatggattcaggggcagacgcttcctttacctttgccgggattgaaagcacgctaacaaacggacttaccaccgtagctgccgccagtacaatcgttggattgttgttgatgatcatcctgcttgtctccttgggatggaattattttaagctgctgctggaagtcgtagaacggtacgtcgttgttggggtcatgtgctatacctcaccgcttgcctttgccgcaggcggcagcaaagccacccagtccgtattccgaagctggtgcaagatggttggttcacaactactcctgctcgtattaaatgtctggtttcttcgcggctttgcatcttccgtcggccaattcctggcaaacggcggtgcgctcacttccggaaacggcaacatcttcttatggctgttctgtgcgctggcctacctaaagaccgcccagcgctttgacagctatctttcttccctgggcctgaacgtcgcccaaaccggcagcgccatggggatggagatattgatggcttcacgcgctatttcagggctgggcggaggagggcgtaacgccggcagcgtatttggaggaggcaccggtccttctcctgctccatccggcggcttttccaccaagtttgcccccaattcctttgtacgggacgccgttgtggacggtggttccaatatcgccgccggcggcggattgggatttgtcggccgctcatttggcgctgttgccgccaaccacggtgctgtgctgtccggatcttcgattgcctctgtggctgcccggccgcccgccacttccggctccattgctggcgatatagcggacaggagccttggcaactatatgccgcatttgcaaggacattctttgagcgacacatccatcacaggagggcggatccaaacaaccgcctctttagcggatggaaaaacagccgctctttccttgttcgataccaaccagtttgaaactcctatatcgccgtattctttggtcactgccgaagacggcagccaatggtatcaaatggcgtccggtgaagggatgggtgcgttttattcaacaccttcttttgacggctctgaatccatggtcgccgatacctttcccgggattatggatacgtctctgcgcaccgttgacgacggcgtactggaagcgagttctaacaatgggacaagcctttggtacaacagcgcgttgtatgacgaaccggcagccccccacgataccgtgcgaaccgccgacggcgtgggctggtacgcgctgcatccaagcggagccatgccagaattgagtggagatggaacatttgacgctacacagtttcgttcctttatgccaggcttctccccaagttctgctatctcaggtttttcacctgcccagcaatccgatggcttttttgaagtattgcatcaggacggcagcggcaccaggttctacgattgttctcaatacggctcgccgcgcggcgattatacggtgtatgaggacagtacggggcatcaatggtttgccattgaaggaacgccttccgtagagcgtgttcctatcaccgattccaaaggacagcccctttatgaaaatggggaacttaaaaccacaagcaaacccacgattcggtatcggtctgttctcaatcggtttgcttcccccgaaaagaggaacccgctgcaacccatccatccacccaaacgaaaatagagcgcaaacgcgctctgtttctttttcaggagcgtgcatcatgcccgaagaaaaaaacacaaccatcgtgggagacggacacgacaactatgcgcaggccgcgcaaaacgccatacgcaccaaagcctcgtttcaagccagcgccgcagcaggcgcggctgttattccctggggcgctgttgccacaacggcctggagcgcacggcacacgctgatgaaggtattggtctgtatctgtttggccttgatgttccctgtcgttcttgtcatatccttgcccgctatcatcttcaacggaaacagttccggcgatatttatgaagaaactgacgccatgagcgaggtggtagctgcctgtgtgcaggacggttacgacgccgcgcttgccgaggtggagagcatcattgatacgggcgggtacgattacaatatgtccatggacgcattgatcaattacgccaatgcaagcaacagttacgacgtctgtaccatcctggccgcttattcagccagtatggagcaacgcaatgtttccgctatggacatgcaaacgaaattgaaatccgtaagcggcagcatgtttcatgtcacttacgaagagaagatcgggaccaggcagccctcctccgaatctacccccgaaaacccatctcttgtacggtacgtcgaatgcaccattcatcccttggatgaaacagtcgtctatcaagcgtttggcattgtgccggacgctctgtacagcgataccaacaccacctacgctgaggccatcgctaccatgtccgattccttgaaaaagacgttgtacggcggcgcggatatagggaacattcccgccatcaccgatgcgcagctgctgcaaatcttaaacgggttacagtgcagcgctacgcgcaaggccctggtacaaaacgccctgtcgttggtaggaaaagtaccctacttttggggcggtaaatccggccctggctggaatgaagaatgggggacgcccaagctcgtcacttcagccggatccgccagttccggtcagctgcggccgtatgggatggattgcagcgggtttaccgattgggtgtacaagacaaccggcttgccttccatcggcgctgggagcgccaatcaatggagcaattccgtagagatttctgcaagtgagttaaaacccggtgacctggggttcaaggcaaggcctagtgaaccaggcgtcaatcatgttctgatgtatgtaggcctagatccctccagcggcaaacagatgtgggtacactgttccagttccgcgggcggcgtcgttttgaatacacccagttatgtccgatattaccgccgtccggtgggcgtcgacttggaatcggacaatgtaccgacgatgcaagcgcccggcgaagtcgattatacgatgcgtgtagaagtgacgcattactgcgcatgcaccaaatgctgcggcaaaaacgccaacggcatgaccgcaagcggaaaacaggccgcgcccggcatggttgccatgtccagtcactacccatttgggacaaagctgagtatcaatggcgtcgtatataccgttgaagacagaggcggcagcgggatcgaatcggatatagcccgtgtggacgtctttgaaacggaccatcaaaccgctttgcgcaagggccggtactacgccatcgcaactttttataagtaggtgtttttcatgtcagagtttgaccacagcggcttttatcccgttcctgcaaattacacggacagcggacggcttttcggcgggctgtgcgaagtgcgcaacactgtggaagcggctgttcttgtcctattgattggctatccagaactagcatggctgcatcttgccttgccgttaaaggtcgtcgttataaccatcaccctgctgccgttgggtgtgtttgcgttgatggggataggcggcgaatccctgctgcaatatgcgctgcacatggcagcgtatgcaaaggccaaacgcgtcttacatttcgagaggattcaagccattgaagttgaagaagaaaaaggggaacagcgttcctcaaaacccaaaaaagcaaaaacccagagaaagcgtgcaaagctggctgggcgtcaaagcggtcagaaacggtgtgattgaactgtccggcggtcggtacgtccgtatcttggaagtcaagcccgtccactttgcgctgcgttctgcagaggagcaaaccaatatcattcaatcgtttgccggcttattgaaaatcgcgccggtgcgcatacaaatcaaatcggtatcgcgcagagccaatggcagcgaatatatcaggtctgtggacgcagatttgaaaagccaaaccgacgctgaaagcatcgccctgggccgagaatatgttcggctcatacaaagcttggaatcacgcgacgccgtatcccggcgttttttcttcatttttgagtatgaaccgattggcaggcaggatacgtcttatgccgctgcatacgccgcactggaaacagcaactcataccgtcaaatcctgccttgcacagtgcggcaatgccgtaatcatcccagaggatgcggacaaacagctggctgaaattttgtatgaatatctcaatccaaaaagcagccggacggaaacgctggaacagcgcgtagaacgtgttgtcatggatacgatgatcgcacaggggaaaaccatcggcaaagatcctgtccccgacatcccttttgcgcattttgttgccccgcgcggcttggacttggcgcatcgtcagtacgtgattgtggacggcacctatatgtgctttctctacatacgaaaagacggataccccaaccgcgtgcggggcggatggctttccacgctgatcaacgcaggagaaggcgtcgacgttgacctgttcttgcagcgtgaactgcgaagccgagttttggataaagtcgcccagcgtatccgactaaaccgtacaaaaatgaaaagtatgcaggatacgagcacggactacgaagaactggccagcgccatccaagccggatactatatcaagtccgggatagccaaccacaacgaggatttgttctacgcttccgtctttattaccatctcggcgtcaacctaccacgaacttgaccgaaaacgcagccagctcgttgaccagttaaaagccatggacgtgttggtgggcgactgccattatcgtcaggaggaagcatacaaaaccgttttgccgctgctcaactttttaccgctccagaaaaaagcgcagcgcaatgtcttaacctccagcgccgctgccttttatccgctgacctcgtttgagctgtacgaaaaggaggggatcttccttgggatcaatcggttcaacaattccatgtgcatccctgatttgttcaatacaacggccaataaaaacgccaatgccattgtaagcggcactaccggcgcaggcaaaacctactttttgcagcttcttgcacttaggatgcggctgcgcaacatccgttgctttatcattgtgccggtcaaaggccacgaataccgaagggcctgcaaaaatatcaatggttcgtttatcaaactgagcagtcagatcggcatcaacatcatggcgattcgcaaaaccgccaagcccgatatggaactgctcgatgaggattacgccgctgaagattgtttgctctcgaaaaaaatccaggtattgctcgcctggttttccctgcttgtccctgacatgaaaaacgaagaagaacagcttttagacgaggcgctgatggaggtctatcgccagttcggtatcacgtacgacaacgaatcaatatatgctgatgtgtcgaaatgtgttctaaaacggatgcctgtgttgggggatctatatcaaattctcaaagacaatcccaggacagagcgcatcgccatcattctcaaccgctttatccacggcagcgctcagtatttcaaccaacaggacaatgtggatctaggaaacccctacaccgtgtttgacctatcggatttgcgcaacagcaagctgcagcccttggccatgctcatcgtgttggattttgtctgggattgcatcaaagaagattgtacgcagcgcaaagccgttatcatcgacgagctgtggcagttgattggctccacggccaccaagcaatccagtgattttgtcgtggatatttaccgattgattcgtgcttacagcggcgccgctatctccgccagccaaaacttgacggattacgatagcgacgcaggccgcgttattctgaataccagcaagaccaaaatccttttgaaccttgaaaccgatgaagcgcgcaaagcccagcgtcttttgaatctgagcagtatggaagcgcacagcatcacacagtttggacggggcgaagcgttgctgattacagccggaagcaaggtgccgttgtccattattgcctgcaaaaaagaacatgaactgattacaacggaccggacggagttaaaggcgcttttagagaaaaagaaacgggaacgggagggaaacggatgaaaaccatccatcttttatcggacgaacagcttgtagtgcaatggttatcacagtacgggcctatgcccattgaactggtgcgcgcctggttatcttacaaaccgcaaaacatacaggacaaaatcctgaaaaacctgcttatacacggatttgtctatcaggttgcgggcaatattcttacgattgatccgaccgctgttacgcccaacaaggacattgttctggcgggatgggtgctatcgcagctagatggcattgatccgcacgcgcattatccggcccgataccccgcgcagatccattttctttcccagcggttcggcgtggacattatggtgatacatccggacagcgatcaccttatgtatctgctggagtccaatgaacatcttaaatacatttttgtcatagaggatcttgcacagctgccgctggccgtaccggacggtatcccttatatgattgcctgcgctccgtccccgtcccaaatcactttttataccaggagggattctgccgatgtcgttttcccgtcaactgcgtcaaacggaatctgcgctgcaacggatctgccggttgtatcgggagattgacgcgaaccatacaagcgcctcccgcttgttcgacctgagctgcgcctgtgaacgtcttgctctcatcgcccgcgagctaccctgttatacaggacgcccggcggcaaaggcgcaggttcttgcacaggcagcacaggaacacgggatcattgtttccaatgccccctggttttgcgttacgctgcctgttcttttgccccgtaaagaacacggctcagccgaatttcttcgccagcctctctaccatgcgttaaacacatattttcggcagcatgagcggcctgcgtttacggattgtgtgctttgctttgttcatatctatccgcacgaccgccccgaacgcgcgtaccgtgaccatgacaacattgagcttaacgccgtggcagacgccattgcgatgttcgtcatgcacgatgacgcgcctttgcaatgctcacatttttattgctcccaaagaggggaaaaagaatatacccgtgtgtttgtcgtcccacaaaagtcctttgtcgcatggttgaacgatatgcttttttgaaaaaaccagcgacacgaaaaaggcttcttttcccagccctccaagggccccgatcttcagcgtttttctgtacggaaccggcgttttttgcgccaaagagagcgatcacctggcgcaatgaaaggagctgtctttgatttaccttcgtcctgatacccatctctatcgtcttttgactctgctcacggtggtaggcgaatatccttatcgttcgctttctttgcttggaaacaggcgcgtgctgactacgctggtacgttcgatgcagcagcctcaacttgtccaggttccgaacgcttctcccgtttcctgccgtatcctatccgtaagtggacgcggggcatacaaaaccatacggattcatcgcagcgcgttttccttgctgtgccatttgtatccgggggcgctgcaaacctatctgaccgtaacgcggcaacaccgatttgccggcggaccagaacacgtcggccgcagccaccgcatcgcggaatccgctgccatgtgcatgatggcgggcattgaaatacgtccgcctttcttatcgcctttgtgcgcatcgtccgagcggccctctatttccatcccctcgttttatttggcgcgctttctcaaacaggattttacgggattgaacaagaccatctttacacgtatcacggggatgctgttaggtcctacgcaatcttacgcgctgtacaatgcgcgccagtccaagatgaaatggaatgggatgggggagttcaaggcccttcagcttttgcgtgacgtctcctttgccaataccggccgggcgtccgattctgcagttctgttcggtgcgtcgccggacagcctcatgctatccgatgcgcagcgctttgacagcatttatcccaacattcattttgtgcctttggaccgcaacggcgcagcgctgctgcgtttgctttgtcttccgcatatacaggcacgtttgcagtctttgctttttccgccgaacatacgctatcacggctcacaactcgaatgcgacgctcaaattgggaatcaatatatcttctcttacctcgacggcaacatggcaagattgctgcgctttaaggaagcagcgcttttttatggagcaaaccggcgctatgaagtgctctgttatccctggcagcagccgtttgtacaatcgtatatggaaaacgttgctgccgtacatgtgatgcctatggaacaaatccaagagagcatatccgatttttgatattattttggacttttattgatatatggaggtgcgtaatgctatactatacacaaagattggggaaaggaggatggcacatggacaaagcgccgcgtatacaaccgtcgtctgccatccgcaaggactacaaacaattttccgattactgccatgaatccatggagcccgtgatcgttacaaacaacggcgtcagcgatttaatcgtcatgtcgccagaagcatactatcgtcgggaagcatggaaccgcctgcaaatcgaacttgccaaagcggacaaacagatcgcggagaacaagctccacgaccatgacgaagtatttgggcggttacgggagcgtctcgggcatgaataaatacaggatacggtacacgccgctggccgtggacgatttggatttggcgttttcctacatcgcccaagaaaacttgcaagcggccaaagaattgttggacaagctggaaaacgccgttttgcagctaaaggattttccttatttgggcgttgttttcccgaacaaggaaacgtatgaggtgaccgggtatcggtatttggcggtagacgcctacgttattttttatcgcattgacgacgtccaaaaagaaatccagattgcccgcgtgtttcactcacgccaaaactggctgtatctggccttatcggctgaagggtaaagttcttttggaaaggagtgctttttgaccaaacacacacgcttgattgcaggagccatcgcgctcctttttttattcccgtatttaggcggccttttggctcaatgcgcgcatgtggcttttgcttctccatccgatccagcccccgccattctgctttccccgtttgtatgctatcgatacgcctgcacgctttccggccttcaatataccttatttaccgctgccattgtatgcggcgttggtttttggtttggcaagcggtttgccggcgatgtggatacgcgcaactttacgcgcagcgaaaaagggacctatggaacggcgggatggatggacgcgtccgaacgtcaagcctttcttgaaagcgtcccgctcgaacagcccaagggcaccatccttggcgtagaaagccgttccctggtggttctgccggacgatacgcctttcaacaagcatatcgggatattcggcgcatccggcacacgcaagagccggggatttgtccgcccttatttacttcagtgtatacagcgcggcgaatccgttgtatgcaccgatccaaaaggagagcattaccgcgacctggcccattcctttcgccaaaacgggtatacggtcaaggttttgaaccttgttgatcccacccatagcgatgcttggaattgtatggagcatctggatggcgataccctgcgcgcccagattttaacggacattatcatcgcaaataccgggaacgggcatggggacccgttttgggacaacggcgaacaaaacctcttgcgcgcgttgattctttatgtggatcaatcgccccattatacacgcaaaacattgtctgccgcctaccatcttctgacgcacacgcctttgccgcagctcactgctttgtttgaacggctacccatcacccacccagccaaagcgccttacaacctatttgcgcaagcaagcgattctgtcaagtccggcattgtcattggattgggtacacggctgcaaaccctgcaaagcaaagaggtggagcgcctgatttccaccagcgatataaacttgacgagcccagccactgaaaaatgcgcgtatttcatcattctgagcgaccaagggcctcatctccagtttctgtcgtcgttgtttttttcgcttttgtttcaggatctcgtgacgtttgcggacaagcaatcctccggacgttgtcctgtccccgtccatattgtgctggaggaattgaacaacatcggtgacaaccccatcccccggttgcccagtcggttaagcgtcctgcgcgcacgcgccatccgtgtttgctgcatcgtacaaagccttggccagctccaaagccgttttcccgatcatcaatgggctgagatcctcggcaatcttgacatacagatgctgttcggatgcacagatttgcttaccgctgaatatttcagtcaacggtccggcgaaatgaccgtggatgtgcaatcgcaaatgaccatgcggcagtccatagcgataacgcaagtcgttccgcaataccggctcagcgagtccgtggggcaccgcacgcttttgacgccggatgaaattctgcggctgccaaacgacgaactgcttttggcattgcgcgggtgtaatctgctccgtcttaaaaaatatgactatacccagcaccctgacggccaatctctcgtacccagcgacattcaaacgtatccttcccctccggagatcgagcaggatgttgccgctgcacctcctcctactccgcgcaagcctgtcactcatctatatcagccggcacaacaaaatgattttctaaggaggtaatcccatgccagaacaaaacattccagacgtcctcgaatataccggcgcctctgtctctgccaacgaagcgcagcgccgccagcggatcattcccatcgaccaaacgcgcagcgtacaaacaagccgtgaccaaaaacgcagcgaattgattgatcttgtggaatcccaaaagagcgggcgcgtgctgtcggggatcgtacagggacgtgaactgaacagcgatgccagctctgtgtatgcagtcgtgtatcatggctcgtataaagtcatcattccggccgaagaaatgatcccgttgacgccggaaaaccaacatatgcaaatcgctcttgttaccaagcgtttgggcgcggaaatcgattatgtggtagcaggcatcgacgtggaaacaggcgtcgcggccggcagtcggttagaagccatggccattcgccagcgcgaattgctgcgcacaaaccatgacggcgcatacgagattcaagaaaacgatttggcggaagcacgcgttgtttcggtcatccgttccggtatttttgtcgaactgtttggtttggaaattttcgttcctttatccgaactgagctatcagcgctggctcaacgccgaagaccattttgttgtagggcagcgaatactcgtccaaatcctcaccattacccgtgacgatgctgaagcacttgctatgactgtatccgtcaaacgcgcggccgaggaatcgtttctatcttctgtcgcgcgctacaaagtaaacgatctatatattggtaccgtcagcatgattaccacatccggcgtctttgtttccctggacggcgtcgattgcctctgtcggtttccgcgccgcggacgtccgcccatcggtacgaatgtgaccgttaaaatattgggcatcgatagcgaaagcaaacgcatttggggggtgatcgtccattgaccacggacgcctacttagccgaacgaaggaaccggcgagttttagctgaacacgcttaccagctggtttcaaaagcgctgcatgttgaagatttcgatgattctacgctcgtaacttatcaagacgggtttcatatccaattcggtttttcggccatgcatcccctgatcgtcatgtgccttgtacggcctatgacgccgcccacaggggaacagctggatatgatcaacgatttgaatctcaacaccgtacttggcagccattccatcaaccgtaccaccagctgctattcttttcgcgtcacccaatggctggatacggaaatcaccgaacagcgattgtttgaaatcttacagcgcgcgctggacgaagccaaaaaaggatattccgtcctctcttcttgcgcttgacaaagctgagctgtgtaattatatatcaaagagagggaggggttccatgaaacgaattacacagctctttgcggttggtatgttgctttgtctcctggcaggttgcagcaaccaagcttcggcgccttcaagcagcccgttatcaagcgcaagcccgtcatctgaaatgtccccaacgccggctttatctcccagtgcagcggtcgtcgtttctccgaatgtgggacaagccacgagcaacccaacacaaaagcctggacaggcgaagtcaactcaaaaacctggcagcgtcactgcgaaggcaacctccaaacctgctgctacccagacgactcaagccacggccaaacccaccgcaacgccgacgccagaatcccctgcctatcgtgacgccacctcatgccgcagcgcgatgatgcagggaatcaacgctgcgcgttcggaagaaggatacaacaacgcttctaccaatagcagcttaaacagcgttgcgcaggaccgtgcgcgccaaatggcggccaaccagtctgtctctcatatcggcagcagctatccggaagcggtcggccgtatgactagtaccggcggtgcatacaacaacggatacgtgtgtgttaccatgcataacaggcagctgcttgaatgtgcacagtatgggatcggcatagccatcggacgagacggcaaatattattattcaatcattggtcaataaaagagcgctaaaagcgctctttttgattcaaaggagcgtgtttgctttgcgtaaatccattgcgtcccgtgcgggcgcttttttcttttctctgatattgtttgctactgcgctgcctttcagcgcatccgctttggcgtccacttcccgcatcacttcaaaagatgaacccgcgtccgttcgtttgtttgaaaacgtatcaggaagcgggacttgggaagcaacaaaaaccccgcaacacttcaatgtggatgaaaacaaagtcgtgtattgtctcgaacacaaaaaaggcaatccacgcaacaacgacacctattctatgtttgatccgacagaaacttatccaacggaaacttacgcggggctctattccattttgacctttggatatcccgcaggcggaaacggcggtttaaccgacgatcaagcgcggtacgctaccgccaacgcgattcgttattggttggccgaacagcaggccaagcacgggatggacttccagcagtataacttttcgcagctggcacgcaaccgtgcgcgagccaagcaaggcgacgccactgcacagaaaatgtgggagtattgtatggacctggtaaacaaagcgcgtaacaaggccaccgttgcgcataaggtcaacgtatccaatccaaatatggaaatggaacgccagggggatcggtttgtgggacaaacgaccataacgctggtaaattgtaacggcgggtacacctatacagcccctgccaatgtaaccgtttcagggtacacgggaaacagcggcgataccttgaccatctcggcgcctctgtctatggcgaaccaaaccatcagcattacgtttacaggaaaagacaaccgcaatactgctaattatggttggtacgcgcctaccaacgacgaccaaaaagtggtactggtagataacagcctgatgatgcccgctgtcaccagcacgctaaagatgaccacccccgccaccggcaagatccgtgtccataaggtagatgcggataccggaaccgatacgccccaaggcgatgcagcgttgaccggcacaaaatttgaaatattcgacagcgacggcaatatcgtggacactctctccttggagaatgctacgacggctacctcaaaggacttgctttttggcgattacatcgtaaaggaagttgaggcaggggatggcggttacctgctcaatggtcaagagtacccggtttccatcgatttgaaagacccgactacggatgtttatcctatcaccatcggcaataccgtcatcaaaggacaaattgcgttgaccaagtttatccaaggagagaatcccaacgacaatatcaaggttcccttagaaggcaggacatttacgtttaccttaaaatccaccggcgaagtgttggatacacagataaccgacgcaaatggatactgtatcagcaaacctttgccatattccaccgttatcgttaccgaaacggatacgggcgatccttccattgcaccggttgaaccgtttgaagtagtgattgatactgaccaaaaggtttactcttatatcttggaagattttgtgtatcagagtgaaatcaaggttgtcaaggtagatgataccaccggcaaaaccattcctgctgtgggcaacaaattcaaaatccgtgatgaaagcaccggcgaatgggtcgttatgcaccagaggtatcctgtcccccaagacattgaggtatttgaaacggcctgtgatggcacgtttgtcttgccggagccactcccatatggccggtattctatacatgaacaggcagcgagtgacggttaccttttgaatcaaacgcctgtgttttttgaagtttccgacaatcatcctgtggttgaagtcaggtttccgaatcatcctgctatgggacaaatctctttgagcaaaaaagggcccgtattcgctgggatccagacggaggaaaccgagttcggcaccataacacgtccgattttccaggaccaaagaattgccggatgtgtgtacgagattcgcgccaaaacagatattgtcacacctgacggtaccgtgcgcctgcatgccggtgagctggcggatacgcttgtaacagagactgaaaaagatgctgtatccatccctttgtatttgggtgaatatcaagtcaaagaaatctccgtcggcaataacgaattgatattaaatcctgccgtgtatgatgtcacgttatcgtatcaggaccagttaacaccgattatcaccgaacacttggacgcgtacaacgaccgcccttctactgagttgctgttggaaaaacaagcggaagtgtaccagcccgatgattccagtatcaaagcagtgccgggcgcaggatttacctttggcttgtttgcttcggaagatatacatggtgtcggcaacgcgctgctgcgtaaaggcgaccttgttgctgtgggaaccacagacaatgaagggcgcctttccatcacaagcgcgcttccctatggtcattatgagttccgtgaattggatgtttcgctctcatactatccaaacgacgctgtatatcctgtcgatcttagctatccggggtccgatacagcaaaaatcatcgttcaggccaaccaaggcaagcctattctcaacaaattgattgttggggatattcagatcatcaaagaggacgcccgaaaaccagaagattggccggaagacgacctttcttatcgcatccaaggcgcaaagtttatcatccaaaacgaagcgttggggctgtcgttcgagttggtcaccgatgaaacaggggttgcaaaatcgcctttggttccctgtggggaatgggttgtttttgaagctgaaccggcagccggatacctgccttctgaagagcggcaagtggcaacgattgatgccaacacaaccgaaacgcttaccttcaccttccaaaacaaaccaacggaagtgctcatcaccaagacagatcttacaaccggtgcacccgttccaggcgctaccattgaaatctatgatgcggcaggaaacgtcgtattcacagacgtaacttctgaaacggggcaggttcacgccttccagctccctgctgatgcgcattatactttccgggaaaccttatccccaaacggtcacgcgttgaatcccaataccttctcctttgacatattaccggacggcactgtatccggggttacggagtttaccgatgacgtgtccaggatcagggtattgaaaattgatgctgtcaccaaacaacctcttgccggcgtctcgttcggtctctacaatcaggccggcgagcagctgcaaatccaaaaaaccaacagtaagggtgttgcggagttcattatagaacaggggacctggcaaatcatcgaggtttctgctctggatggatacgctccgtccggaaaagtcatcaccgtcgaagtcggtccggattatgtcaatggcgatcctattgttgtcgagaacacccccattgtccagacaggtatggacggcggctcgccctggccttcccttgttctggctgccttatgcacattgtccgctgtcgttgttttcatccgctatcgtaaactcaataggaggtaaacgtcatgaaacgattgcttgctcctatcatgttcgtctgtctgcttttagggtgtatcgtaacagccagtgccaatccagatcctgctttggatgcttccccagggcagctcatcatcgatttaggggaacaatgggcggacacggagttttcattggaaactgaggtcggtccatatcctggcaaaatcgttgtttcttcagagggcgtgcttactatggaactcggccaaaacaaactctatcggctgaccaacctcggtactaccgctacctctacaccgcttccatccctgccgtcagcttccgcctccgtttcagatgccgtgctgcaagaagtagactccaatgtgatccccctgccgcatattctcctctttctttctggattgcttatttgtgtcggtattttgctgtatttctccaaaaaacgcaaataaaggggaattgttgacaaatcctcttgtttttgctatgattctattacaaacagatattcgcattaggcttcctgatagagtttcttatcgggaacgggctgttggtacacagccctacttgcgttctctgttcacaatttctaagccgataggcgtagattcatacatacagaatcaatactggtgagattgaatatccagcaccccttggttcggtatgtatttttttacgtctgtcggcttttttcattctaaaaggaggtgtattgcgttgtccaaacagcgccataagaaagtagcccgacctgaaaaatgtccttgttgcggaagtcctgttgtccttcgcagcgcagacgggatctacaaatccaacccgcagcatgcacagttgtatgtatgcagtaaatatccggtttgtgacgcctatgtgcgcgtgatccccggcacgaccattcctctcggcacaatggcggataaacatctccgctatctgcgtaagaaagcgcaccattactttgaccaactccataccaccggcattatgagcaaacaacaagcgtatgcgtggttggctgatgtgcttcagttacctcgccaacaagtccacatcggatatttcggggattactactgccagcaggtcatccgtcaggcgcagaaagtcttacgggagaatcaataccgcatggtatcgggaggtgtgtaatttgaacgcattgacacctgcgcaacagacgcttgtcacccaaaacctggggcttgtttctcatgtgattgaaacgtgtgtttccttgccatataaccaatccgtgtacgattacgacgacctgtatcaaattggctgtatggggctttgtaaagcggcggctaccactacgggcaaaggcaaattttctacgtacgcttgtaaggtcattcgtaacgaaatctacaatgccttaatctatgccgcgcggcggacacacctcatgtacatagaggccatgcaggaaagggggacggagaacatggacgatactgcatccagtcaagcgattttagaatccctcgaacggagcaaacaaggcgccgatacaatggtttgcaaaggcatagaagccatcgtgcaatcagcgcgcggcgttcctcgcccggatattgcacggtccattggcgtatccgttaacagtttgcgcgcatacatatccgtcgcgcgaaagcatctgaagcaaaatcaacagtttcaaagggagattgcatgagtcgtccgcaaaaaacaatggggctgtgtgtctgttcgttccttatcgtatatatgctttttcaccagttattttacctgggatatgtccccagtgcatccatggaacctacgattcggcagggaagctacatcttcggaacgcggctgatacgctcattggcgcctggcgacatcatcatttttcgccatggacggcaaacgcttacaaagcgcattgcttatggtccgggcgatacgctccccagcggcgccacggtgccagacgatgtctactatgtcctgggggataaccgtacagtgtccgttgattcccggtcatggaacgatccgtttatcccacgcaatgccatcatcgccaaatacatatttgaatatcagtaaattatgacctctcaacagaggttacagtg

SEQ ID NO: 1610 - DNA, 6415 bp, Unknown
  16S sequences of unknown bacteria
ttgtcggcgcgcaagaggagcgtctcgccctcaagcccgtcgacgagcagcgagagcacgtgcggggcaagtcccccctgctccgtgagcggaccgtcgcatgcggcgacatcgcaggaaagcgtcgggcggacctggtgggcaaagtcgccggctgcaatggcatcgaggaccttcgcgcgaaacgccgatgcccgctcccacacggcagcacgttcggcgacggcgttttcgaccgcctgggcaaacacgagcgcgcccatgacgttttgggtgcccgagcgcatccccgcctcctggccgccgccgtagatgagcggcttgatgcggatgtcgcggcgcaggtagagcgcgccgacgcccttgagcgcgccgatcttgtgcgcggagaacgccgccgcatccaccccgctttgctccaggtcgatatcgagcttgccgagcccctgcacggcatccgagaagaacctggcctggtgcgcgtgcgcgacgcgtgcgagcgcgcggacgggctggatcgtgccgagctcgttgttgacggcctggacggcgacgagcgtgaccgcgccgccctcgccctcgatgctcgcgagcagggcttgaagcgcttcggggcgcacgatgccggaggcgtccgggtcgatcttgtcgatgacgaagccctcggacttgagcgccttcgcgctgttcaagacggcgtcgtgctcgatcgacgagacgacgacgtgcgtgctctttgccccggggacgggctttgccagcccgcggatcgccgtgttgtccgactcggagccgcccgaggtaaaggtcagctcggaaggcgcatgggcgccgagcgcggccgcgatgcgcttgcgcgcgtcctcgagctggtttgccgccgcacgcccctccgtgtagagcgcgttggcatttgcccacgaggcggccgccatcgcgtcagcaaggcgcgtgtcgaacggcgcggttgccgcatagtccagatacgcgcgcctactcatgggcgcctcggatctgcgccatggcctcgaccgggtctgccgccttgaacacggcgctgccggcgacgagcaggtctgccccgcgcgcgacgacgagcggcgcagtcttggcgttgatgcccccatcgacctcgatgatcgggttcgcatctgcggccttgcacagctcgacgacctgcgtgatccgctcgggcgtgctctcgatgaacgactggcccccaaatcccggatgcacgctcatcatcaagacgaggtcgcacttgtccacgagccccgcgagcacgctcgtgtcggtctcggggttgatcgagacgcctgccttggcgcctgcggcgcgaatggcgtcgatgagcgccgcagcgtcatcggcggcctcgcagtggatggtgacggaatcggcgcctgcctcgaggtaccacgggacctgaacttcggggttgtcgatcatcaggtggacgtccagcggcacgtccgtgatcttcttgagcgccttcacgtgcgctggcccgatggtcaggttggggacgaaatgcccgtccatgacgtcgacgtggatccagtccgcgccgccttcggatacgagtctcacgtccgcgccgaggttcatgaagtcggcactcagaatcgacggcgcaatgcaggtcttgccaaacatggctctcaagccacctctctactctgtttcggatttcttcgggcggctgaacagcgtctgggccgcgtcgtgggggtctgccccctcccacagcacctgtcggacgagctcggatatgggcatttcgacgtggtgcctgcgcgcgaggtcggtcaccgtcttgcacgccacggcgccctcggcgaccatgtgggtcttggcctcgtattcctcgagcgtgccgccctgcaccagcagctcgcccaacgagcggttgcgcgaatgcggggacgtgcaggtggcgatgaggtcgcccatgccggcgagcccctggcaggtgcggctgtccccccagcgccacgacgagccgcgtgatctctgccaggccgcgcgtgatgagcgccgccgaagcgttgtcgccgaggcccatggacacgcacatgccgtttgcgatggcgatgatgttttttgccgccgcgcacagctccaccccgatcacgtcacgcgaggtgtagacgcgaaacgtcggtgccatgaacaggtcctggaagtactccgcgcaggtctcgttggacgaggcgacgaccgtcgccgcgaacatctggcgcgagacctcctcggcgtggttggggccggccaggcacgcgaggcgctccttgtgccccaagacgtcgcgcagcacgccgagcatcgtgtagcccgtctcggcctcgacgcccttcgacagcacgaccacgggcgtgcgctccgaaacgtgcggggccatatcctgcgccgtttggcgcaggtaggcggaaggcacgaccatgacgatcgcgtcgacaccgctaacggcgtccccgagcgacgaggtcgcgtgcgtgcggggcagttcgatatcgcgtaagtgctttgggttgcggtgctcggcgttgatgcgcgcggccacctcggggctgtgcgcccacaggctcacctcgtgccccttgccgcccagaagcgacgcgacggccgtaccccacgtgccggacccgatgacggcgactctagtcatgtgcctgctcctttgcatctgcgtcgtcgtggtggaacgagaacttgggctcttcgccgtggatcatgcgcttgatgttgccgcggtgcgcgtacacgacggcagctgccacgatggtggacatgacgagcacggggacggaacccggggtgaacacgcacgagaacagcggaaacgcgatggccgcgcagatggagcccgccgagatccgcttggtcgcaaacgccacgacgagaaagaccgcgagcatgcacagcaccgtgaggggaaacgcgaccaagatggagccgaatcccgtcgagatgcccttgccgcccttgaagccgagccacgggcagtagacatgcccgaagatggccgccacgacgcccgcgacgagcagcaggtcgatctgccactgcgcatcgatgcccacgacgaaggggagcatgaggcgcacgatgccgagcgcgagcgctcccttgcccgcatcgccgacgaacgtgatggccgccgccttgacgccgaacaggcgcgccatgttggtcatgccgatggaccccgaccccccgtcgcgcgggtccttcccgtagccgaccttcgcgacgatgacgccgaaggggatgctgcccagcaagaacgactcgacgatggcgaggacgagcgcaaggggaaatgacacggctgttagttctttctcttgaatttgaggcggatgggcgtgcccgtgaagtcgaacgactcgcggatgcggttctcgaggtagcgctcgtagctgtcgtcgatgatctcggggaagttggcgaaaaacgtgaacacgggcggctggatggccgtctgggtgacgtagttgaggcgcaggcgcttgttgcccttggagaccacgtgcccgaaatcgcgcagctcggtgagcagcttgttgagctggttggtggagacgcgccgcgagtagccctcgtagacggtgtcgatggcaccccagatgcggtgcacggagcggccggtcatggcgctgatggagatgacgggcgcgtagcccacgaacttcatgcggtcggcgatgtcgtcgcggatctcgtcgcggcggttggggtcttcgatgaggtcccacttgttgatgaggatgaccatggcgcagccgcgctcggcggcaaggcccgccacgcgctggtcctggtcggtgagccccaaggtggcgtccactatgagcagcacgacctcggcgcggtcgatggcgcgcagcgagcgcacgaagccgtagtactcgacgtcctcgtcgatctgcgacttgcggcggatgcccgcggtgtcgacgatgcggtacttcttgccctcgtgctcgacgacggtgtcgatggcatcgcgcgtcgtgcccgcgacgtcgctcacgatggagcgctcgacgccggtgaggcggttggtgagcgaggacttgcccgcgttggggcggccgatgatggcgacgttaatctcgtcgtcggactcctcttccggctcgggctcggggagccgcgcgacgacctcgtcgagcaagtcgcccgtgccgtgaccgtggacggacgacaccggcatggggtcgcccagaccgagcgtgtagaactcccagatggcatcttctgcctgggggttgtccatcttgttgacgacgaggatgacgggcgtcttcgtgcgcttcaagatgcgcgcgatctcctggtcttcctccgtgacgccggtgcgcccgtcgacgaggaagatgatgcagtcggcctcctcgcacgccatgagcgcctggctcgtgatgtcgtgctggaagcggtcgccctcgccgatggccatgccgccggtgtcgatgagcatgaagtcgacgccgttccaatcggcacggtggtaggagcggtcgcgcgtgacgccgcgcatctcgtgcacgatggcgtcttcggtctgggtgatgcggttgatgagcgtggacttgccgacgttggggcggccgaccacggcgacgataggtaagctcatggttcctcgtttctgactggggaaaattgtactctacccgagtgcggccaaaagctcgtttacagaataggtacaaagttcgatggaacagccgctcagctgctcgaggcgctcgacggtcatgtcgtcgagaaacaccccgtcggcgttgagcgtctgcttggagatgatgacgggaccgcgcggacgggcgcgtctgagcgcacgcgcgatgtcctctcccaccaacaggcaggtcacgtcgacgttgcccccgaaaaacgcgttctcgaccggcaggagcttcacatgcgcggcaagcggcgaggcggcgagaaggcgcccgagcacgcgtgcgaacgccgtgccgacgaccaccgttgccggcggctttcccgcgcgcattgccgcgagctgggcgatctggccagcagaggcctcccagtcgtcgatgaacgagcgcatcatgccgatgccgtcgtggaactgcgggtagccgtcgtaggcggatgccggcgggaactcgaggccggcgtccaggtagaactcgtcgccgatgtggtagcgcgtctggtaggcctcgacctgctcgacgacgcgcgccgcggccttggggtcgtcggaaaacgaccagctgaaatgcgattggaacttggtgtagccgagcggcacgatgccgcacgacagcacgcccgggtgcgcctcgacccactcgaacgtgcgcgcgagctcttctccgtcgttcacgcccgggcacacgacgagctgcgtgtgcacgcacagcccggcgtccaagatgcgctcgagcgcctccatgccgcgcgtggcgttggcgccgatgagctcgcggcgcgcctcggggctcaccgcgtgcagcgagacgtgcaggggctgcaggtcgtattcgatgatgcgctcgatgtcggcgtcggtcaggttggtgagcgtgacgaagttgccctgcaaaaacgacaggcggtagtcgtcgtcgcgtacgtagagcgtgccgcgcatgtgctcgggaagcatggtcagaaagcagaacgagcaggcgtttctgcaggtgaggatgccgtcgaacaagacgtcgtcgaactcgagcccccaatcttggcccaggtcgcgctcgaggtaggcgacctcgccggtgtcgagcgtgacctcgacctcgaatccgtcggcccaccagcgccattcgatgatgtcgcgcagcggcacgccctcgacgtgcgtgagcaccatgccgggctcgaggcccgcctcccatgcgggagagccctcgtccaccgacttgatgacggcacggcacgacccgccgcgcatctgcgcgggcgtggcctcgtactgcgggagctgttggggtgccggcatgcgcgcccctaccctgcgagcttgttgagatagctgcacaccgcgtcgatctgctcttgcggcgtgctcgcgccagccgtgatgccgacgtgctcgacgccctcgagccaggcggggtcgatctcgtcgacgtcctcgatgtggtaggtcgcctcgcacagcggcttgcaaatctcgtacaggcgcgtcgtgttgccggagttgtggccgccgatgacgatcatgagctcgaccttgccggccaggtcggcggctgccttctggcgctcctgcgtcgcgaagcagaccgtctccttgacgagcacctcgcgcgcgagcttgcgcaccgcgcccagcacggcgtccacgtggtcttggctttgcgtggtctggatgacgacgcccaccttgtcgggcagcgtcgcgggaagcttgtcagga

SEQ ID NO: 1611 - DNA, 32759 bp, Unknown
  16S sequences of unknown bacteria
caaaatttcttagaaaaacttcttgctttttccttgacttttttttgcaggtctctcttgtttgactttgcctgcccgcatggtgtataattggatagaggggaacggaaaaatggtttatttgacgacggctggaaagctttgggtaaatatcggactgattgttttatcaatcctgatcggcggcctcgttttttggctgccctatctgaaaaaaagaaaaagcgtatcgctcaggcttttttttgcggaaaatcggcttctcttttataccgcgttggctttggtcttcggctttatttcgcgtacggcctttttggatttattgccgggagggcttaatcaagatgaggcgagtgcagggtacgacgcctatgccatttttaaatacggcattgaccgcaacgggattcgttatcccgtccatttggttgcctggggtagcggccaaaacgctctctattcctacctctatatgccgtttctgctggcgctgggcgtcaacgagatctctttgcggctgcctatggcccttgctggctgcatatctatctttctcctgtatcgcctcttgcttcgcaggtttggcgcgcgcacggctcttttgggcatgctctttctcgtcgttaatccctggcatttgatgaagtcccgctgggcgctggaatccaatctctttcccgagcttctctttttcggcttttatctgctgattgcggggctggacggaaaacgtcgcggggggggggtgcttttttcggcgcttatcttcggattgtccgcttacagttacggcacctcctatttctttttgttctttttcgttatcggcacgctcgtttatctgctcgtcaaaagaaaaattaaatggtgggaagccctcgcccatgtggccgtcgtcggcgtcgtatgtctgccgattatggcgtttatctacatcaatatgttcgataaagcctccctgcattttttatgcttcaccattcccaaactaactcaaaaccgctttcaggcagtgacaaatattttttcgcaggactttttccgctcgggattgaaaaattttgcggacgggctgtcgctgttgtttgttcaatacgacggtctgccctggaacgggattcctgcgttcgggacgctctatctgctctcggcgccgtttatgctgatcggggtgtttctgtccgataaaaataaggagacgggacccatgtatgcgataatgcgaatttggctgggcgtggcgctggcgatgagctttatcgtctcgcccaatattaatcgtctcaacgccgtgtggtttccgttgattttctttacgattatgggcttgaaaaccgtggcagagttatcggcggccgtcagaaagtgcctctatgccctgtacgccgccgctttcatggcctttacggccttttacggaaccgtatggaatcagacgctgaagctgcgattttacgattccttcggcgaagcggtggaatgcgcggcggaggtcgaaaacgcggcgctttgttatgtaactccgtcggtggggcccgcctacgtgtatgtgctgttttatacccgatacgacgcgcgcgaatttgtcgccacgcgggaatactccaacgagggggcggcgtttcaggccgtgaaaagcttcggagaatatcgtttcttcctgcccgagcggatcgagcgcggaaacgtgtatctcgtgggaaaggaagataaaatctatgcgggggaggacttatccgcctattcggtgacttatttcgaaaattattacgtaatcgacgccacgtgaacggggcgccgcgggagaacggatatgttaaaggaaaagattgcggaggcgcagacggaggacggctcgattgtaggcgccgagtttgaaaaggaagaacttttggaagaggacgtctcctctttggattttgaagaaatacatttcaggcgctgccgttttgaaaactgcgatttttcaaaaaccgccttttataaagtttcatttacgggatgcagttttctcggctgcatcttttcggagggctatttcaagaattgtgccttttcggggtgtaagtgcgacgggagcacgtttgaagaagcgcgtttcaaagttaaccgcttctccgacgggtcattttgctatgcaaatttttccaaaaccgtctgggacgggtgtatcgtcaaggattgtctgatcagggaagctgcgttttccgaggcgagcttgaaaaagctttcccttgaaaaagtggatttcagcggcaccgacttttttctcacccccttaaagggaatcgacctgtccgactgcacgatcgagcggattattttatccgattcctttcgggagcttaaaggggcgacgatcaattcggttcaggccgccgacctcatacgccttttgggtgtgaaggtggtatagcccgcgggcggaaaccgacgcaaaacgtcaaggaactgcaaaaacacctttgttttttcttttcggttgtgttatcctaaagacacggaatttgatccgaggaggaaaatcggttatgaaaatgaaaggttacgctatgcttggcataggcaagacaggctggatagagaaggacgtccccgcatgcggaccgctggacgcgattgtcaagcctttggcagtgtccccttgtacgtccgacgtccacaccgtctgggaaggagcgatcggtgaacggcacgatatgattttgggccacgaggccgtcggcgaagtcgtcgaaacgggcgagcttgtcaaggagctgaaggtgggcgacaaggtaatcgtgcccgccattacccccgattggggcagtttagaggcgcagggcgggtattccatgcactcgggcgggatgctggcgggctggaaattttccaatttcaaagacggcgtatttgccgagtatttccatgtcaacgaggcggacgccaaccttgcgcgtcttcccgagggcgtcgatacggctgcggcggtcatgttgagcgatatggtgcccacgggatttcacggcgcggagctcgcaaaggtggaatacggcgacagcgtatgcgtgatcgggatcgggcccgtggggctgatggccgtggccgcatgcgccctcaagggcgcggggcggctgtttgccgtcggttcccgccccaactgcgtggaagccgcgaaatattacggagcgacggacattatcaattacagatcgggcgacatcgtggaacagattctcgacgcgacgaaggggaagggagtagataaggtggtggtcgccggcggcgataacgacacctttattcaggcggtcacgatgctgaagccgggcggccgaatcggtaacgtcaattatctcggttcgggtgaatttatccgtattccgcgcgtggaatggggctgcggcatgggccacaagacgatagcgggcgggctgatgcccggcggcaggcggcgaatggaaaagcttgtctcccttctcgaatacggccggctggacacttcccgtttgcttacgcaccgctttaagggcttcgagcatatggaagaggcgttgatgctgatgaaagacaaaccgaaagacctcatcaagcccgtcgtagtgctgtaatataaaacagacggaaaaaggcgaaagcgcaatgctttcgccttttatttttatcgaaacgcttgacaaaagaaaaagaaatgcgtataataagttatacaaatcatacttatcatactaaagggaggccatatatgggaaattttcccgaaggcaaatatgcctggacggtaaaggtgggggaaaaagggcaaatcgtcattcctaaagaagcgcgggatgtgttcgggatcgaggcgggagatacattgattctgctcggggacgtaaaacagggtttggcaattccgcccaaagagagtttttcattctggacggaaagggtgttttcgaaaagaattcccgacgaaaagaacggaaaagaggaatgagcaaaaaagaacggtatcggcagaaagtgaaaaggctgaaaggctttcgcggagaagaggagagaaatggaagaaattttatcggtaaagcatctcgaaaagcattacgcgggctttgatctcgacgcaagctttgccctgcggcggggcagaattacgggatttatcggccgcaacggcgcgggaaagaccaccgccttgaaatgcatgctttcccttgtgcatcccgacgggggaagcattgaatttttcgggctggatttcaaaaagcatgaacgggagattaaaaagaaaataggcttcgtctcgggcggattttcctattatccgcacaagaaattaaagacaattaccgcggcgacgcgggcgttttatcccgattggagagaggacgcctataacggatatataaaaaagttcggacttgacgaagccaagacgcccgcgcagctctcggacggcatgaaggtgaaatacgcgctcgcgctggcgctttcgcacggcgcgcagctgctgatcctcgacgaacctaccagcggtatcgaccccgtatcccgcgaggaactggtgaatatcttcctctccctctccgatgagggaaagacggtgtttttctccacgcatattacctctgatctcgaaaaatgcgccgacgacgtggtatatatccgccgcgggaaaatccttgcgacgggggctttggacggttttatttccgaatatgcggcggccgaattttcccacgcggcgtttgaggcggttccccccgagcttcgggcggccctgatcggcgtaaagcgcagtaaaatcggacattcggctttggtttctgcggaacatgcggaaagggcgcgggcggcgggcggagtggttcgccacgccgatctggagacgattatggtacatctcgaccgtgaggggcgggaaggggaggacgaataaatgaaagaattgcttaaaaaggaaatctccctcgttctgcatccgaccaattggctgtttttggcgctttcggcgctggtgttggttcccaattatccctactacgtcacctttttctatacggggctggggatattttttctctgcctttcgggacgggaaaacaaggacctcgaatatacggtcgccctgcccgtggaaaaacgggacgtcgtgcgcgcgagaattctcgtcgcgctattgttggaagccgcgcaggtgttgctggtcggcctgttcgtcgccgtgtcgcagagagcgctcaagcaaaaaaatctcgtgggcatggacgccaatctttcgcttttggggctgtctctgcctatgctggggctgtttaacgccgtatttttcgggctgtatttcaaaaatcccgtcaaggtgggaaaagcgttcgggatcgcaagcatcgcgatagccgcatacatggtggccgcagaaacctgtgcgcacgcccttccttttgtacgggacgtcctggatacgcctgacccgcagcaccttacggcaaagctcgtcacgctgtttttggggctggcggcgtttgttgcgctgaccgttatcacgttaaagaagtcggaaaagaattttgaaaagcaggacctttaaccgaaaggccgtcaacaaaaatcccctccccgcatatttttgcggggaggggttcgtcgtttttacgaaattaaaggtttacgccgaaatcgctcaccatgatttgtcccgtgagggctttggactcgtcggaggcgaggaagagcagaatattggcgacgtcctcggcctgacaggacttcaaagacaggtcgccgtgcttattcatggcgcccatcatgttcaagtccagctgggcgggattgaggcccatcgtcatgggcgtaacgatgtttccggggcagaccgcgttgcagcggatatatttattggccagaagcatggcggtgtgcttggtgatgccgatgatggccgctttggacgcgacgtaaaccgcgccgccgcccccgttgtagcctgcgaccgaggcgacgttgacgatggaagcgccgctttccatgtgcccgagcgccgccctgatgcattgcatggttcccacttcgttgatcgcgatcaccttttcggcgtcgtcgtccagatacttgtcgatcgctttcagacccgtgtccaaaacgcccgcgttgttgatgaggatatcgatttttccgaacttgtccgccgcggctttcatcagcgccttgcagtctccgtccttggaaatgtcggtgggcacggtgagtacgtttccgcccgcggccttgattttttccgccacctcgtcgagcgcgttctgccgtctcgcgctgatgaccacgtttgcgccttcgcttgcgaacaaaattgccgccgccgcgcctacgcccgaattgccgcccgtgatgacggccgtcttgccttgtaaacgattcatgattgtaattctccttgagtgtttattttgtatccgtcgggcagtgtatcacatttttcccaaattgtcaaccccgatacgaaaaatttcacctatttttaagattagggttgcggaaggcggaaaaaggtgctataatagaagcgaaactatgcaggcgcggagcgttcgcagacattttcgcgccctgttcatgggataaaggggcggcgggcaaaggagcgaaaaagatgggcgtgacgaaaacggattttgtgcgcgggcttcagtgcccgaaaatgctgtggctggacagtcataagccgctggaaaagataattcccgaagcggtgcaaaagcggctcgacgaggggaacgaattcggggacaaggcgatggggctgttcggcgagtacgtcgaaacgacggcctaccgcgcggacgggcgtctggactataaaaaaatgctggaaacgaccgagcggtgtctgctggcgggcgtgcccgtcatttgcgaggcggcgttttcgtggtacggaaattactgcgcggcggatatcctgaaaaagacccccacggggtacgagctgtacgaagtgaaaaacgcgcccgcgccgcggcgggaatttctcgtcgatctgggctttcagagctttctcatccgaaagagcggcgttccgttggaaaaatgcttcctcattttgcgcggcgagggggaagaagcgtataaaatcgaggaggtaacgtcggccgcgcggacgtttgagaaaacggcggacagaaaaatctgggacttttcaaggctgaaaaaacagggagaggaaccgtgcgtcgcggtggggccgcagtgcgacgaaccgtatcggtgctggtattacgagtattgccacggccaaaaacaaatatgagaggtgaggagatgaaaaaagcagtgttgaaattgagaaaaaattcgggcgcgcacatcgcggcagccgttttgggcggcgttgcggtgtttttgcttttgttgaatattgtcagcgttgatggaacgacgcaaagtatatttttagtcggtttcagacgatttctatattttatggaaaacgggtgggtatttgcggcgtttgcagagatcgcttcgtgggtgttgcggctgctctttttaatttcgctgattgcggccccaattttggcgaagaaatccttcctcgtctccgttgtaccctgcggaattttagccgtctgttgcatttggagaatattgttcggttccctttggtcggaggaagcgggcgcttttctcctgttgttttttatcgccgtcgcgctgggcctgccccttttgctgatggggctgggcgccgtgaaaacaaaaaccgcggcgatcgtcgtatcctcggttttgctcggatttttcactctgctgactttgggagaaggtctgccctttgtcctctatctggacaacgggagatatgaaatcgtaaacctgtcgggattttttgcttttcagttggagtgtatcgcaattcttgtcctcgccgcgggaacggaatctcccgccgaatatgcggcgcggcttcaggcggagaccgtcggaaacggtttcgcgccgatgggaaaccgcagacagttttttgcggctaccaacataaagggcaatccctatgcggagtatggacgaaatccttattcggccgcttatgcgccgcccgcgcggccgacggttccgtcttcagcgcctgctcctgcgagcgtccgccctacatacgcttcgcccaaggcgtcaaacgtttctgctcccgtacggccgatgcccgcgcctataagtccaaacgcttccatgcccgccaagcctatggggggagtctccgcgggggcgcctgctgccgtcgaagataaaaccgaagccatcgtaaaaagaatgaaactgttggagcggctgaagtcggaaggactgatcggcgacgaagaatacagggcaaagcgggaagaaatactgaaaaatatctgatgggggaggattgaaaaacgatgaaaaaagaatgcgcatatattgccgaaaaatctaaggcgcccgttattttcgggctgttggcggcgttcagcgccgtgtggctgttcgtctttgtattggtctatgacaaacgggttcagcctgtgatatttttccccgacaatctctcatccataccataccagtcggattttgttaacctatggcgggttgtctcctattatctgcggattgcgggcgcgttgagcctggtcgtttccgcgttctttttgaaaaagagcgtggcgcccgtctgtatcgcgttttttatcgatgcgtggattatgctctgtaacgtccgcgtctatcgtctggaaatgttatacagtaaatattctttcggctattctttcgattttccgatatttctttcccatgcgtcgttggcggtatttctcgtcctcattgcgcttggaaaactgaaaagcggcgcgcctctgcttgccgcgtccgttgtcgccgtgagcgagtggctgctgattttcgtgttgacggccgtgcgtaacaactatttccttttaagcgattttttatttaatattttccgctatgcggcggtagtcgttttggcggcgtcggtgaagtctcccgagcggggcgcttttgtttccgctcaatcgcaaaggcggcgtaatccctatcgacgggaaaatttcgcttcgggttgcgaaacggcaatagccgacggcggggacttaaacgcggaagcgcgttcttcggaagacgtgtataaggcgttggaggccttgtccgaattgaagcggcagggattgttggaagaggaggaatacgccgcaaaaagagacgagatactcaaaagaatttgaggcgtaaaaatataagggccgcgttttcattacgcggcccttatatttttgaagcgctgtacggcctgaaaaaacggtttaatcggttacggtgtcgtaaggtcggccttccagaaaggcggcgagatgttctgccacgcggcggtggagccgaaggcgcgtttcgcggggctgccaggcgacgtggggcgtgatatggcagtttttcgcacgcaaaaggggattttcggggcggacgggttcttcggaaagcacgtcgagataggcgcccgccagcctgccgcggttcagcgcgtccgcgagcgcgttttcgtctatcagcccgccgcgggcggtattgatgagtatggccgtcggcttcatcagcgacagcgtctcgccgttgacgatgtgcagcgtgtcggggccttgcgggcaatgcagggagagaaagtccgcgcgggcaaataattcctccctttcgacgtattcgtaaggcatttcccgtttcgtgcgggtatgcaccaaaatccgcatgcccagagccgcgccgatttccgccgctctttttccgatgttgccgaacccgaaaatacccagcgttttaccgctcacctcaaccatggggtaatcataataggaaaatgcggcgcatttttgccaatccccgcgcgcgacggaggccgtgtagtccaaaaggcttcccgcgcccgccagcaatagggcggcagtatgctgggccaccgcctcggtggaataatcgggcgtgttggagacgacgatcccgcgtgcgcggcaggcggaaagatcgacgttattgaagcccgtggaatataaaccgatatatttcaaacggggcagggcggcgatgacgcgcgcggacaggtctgttttattgacgagcagaatatccgcgtcggcgcagctttcgatcacctcgtcagccgacagacagggaaaaaggcgaagctcgccgaaagctttcaggtcggaaaaatctatatcgtttgcaaaagaaatcgtgttggtgccgatcagataaattttcatgaatatcctcccgtaaaatatttcccctcattatagcacaggcaagaaaaaatttcaaacgttttcgggcgttcggacgcaggatagcggcatacgggaaaggctacggacgtttttcggatagtcgggcgtttgagatagcttcatacggacaataaacattttcgaaagtgccccaagataaatttttacgggcgcgggaatttttcgattgaggagcgttaagcagatggccctatgaataaatcgtaaatatttccgccccgcgcgcagaaaaaatagacaaatgtcttgacagctgtcaagaaaaagcgtatagtattatagaacaaactcatggaagaaaacggtatgttgcagctgaaagaaaaatacgatatcatcatcgcgggcgcgggcgtagcggggctcaacgcggcactgtttctgccgcgggacaaggatatccttctcatctcgaaggaaagcccgaagcacagcgattcgtacctcgcgcagggcggaatctgcgtcctcaaatgggacggcgaccacgatatttttttcgaggacacgctgcgggcggggcattacgaaaataaccgcgacacggtcgagtgcatgctgcgttcctcgcgcgaaacgatctccgaccttctgtgcgcaggggtgcgtttttcgacggataaagaaggcaatttcctctatacccgcgagggcggccaccgcgcgaaacgcatcatgtaccacgaggactgcacgggcagggagattacctcccgtctctatgcgcaggcgaaaaaactgaaaaacgtacatattcggccctataccgcgctgatcgatctgctctgcgacgaacgggaaaacgtctgcgcgggagctgtgctccgcgacgaagaaacgggggagatcaaggcggtgtccgccgattacgtgatccttgcgacgggcggcgtgggcggactgttccgcttttccaccaattatcgcaatctgacgggcgacggcgtggcggtgtgcttaaagcacggcgtcgaagtggaaaacgtcgattatatccaaatccaccccaccacgctctatacaaaaaaacggggcaggcgttttctcatctccgaatccgtgcgcggcgaaggcgcggtgctgctcggcgcggacgggcagcgctttaccgacgaattgcagccccgcgacgtggtggcggcggcgatttacgcccagatggaaaaagacggcgccgaccacgttttgctcgacctgcgcaccattccccccgatatcgtaagggcgcatttccccgcgatcgtccgccgctgtgcggaggaggggtacgacgtgtttaacgcgcccattcccgtcgttcccggccagcattattttatgggcggcgtcaaaagcgatctcgagggaaaaaccagcatgtcccgcctgttcgcggtgggggagacctgctgcaacggcgtgcacggcaaaaatcgtctcgcctccaattctctgctggagagcctggtatttgccaaacgtgccgcgctgcgtatcgccaatacctacgagcctctttcggacgacgtgaaaaaaaggacggtacagggctttgacgagcgcgaatatcaggataaaaaaggcttggccgagagatataagaaatcggttttaagcgagatagaaaaagaaaaggagcaaaggaaacaatgaatcccatcacgcaaaagcttcaggcggataaattgatcagaatggcattggaggaggacatcaccagcgaggacgtttcgaccaacgcggttatgcccgactataaaaaaggcaaggtacagcttctttgcaagcaggacggcgttatctgcggcctcggggtgtttttgaggacgtttgagctgttggacgaaaatacgacggcggaattttttgtccgcgacggcgacgaggtgaaaaaaggtcagcttttagcggaagtgacgggagatatccgcgtgctgctttcgggcgagcgggtcgcgctgaattatctccagcgcatgagcggcgtagccacctacacgcgcgccgtggcgaagcttctcgaggggagcgaaaccaaacttctcgacacgcgcaagaccacgccaaacatgcgcgtatttgaaaagtacgcggtgcgcgtgggcggcggcaacaatcaccgctacaatctgtcggacggcgttttgctcaaggataaccatatcggcgcggcgggcggcgtggcggcggcggtaaaggcggcgaaggcgtacgcgcctttcgtcagaaaaattgagatcgaagtggagacgccggagcagctgaaagaggcgctggacgcgggcgcggatatcgttatgctggacaatatgtcccccgaaaatatggccgaggccgtgaaaatggccaaggggcgcgcggaaacggagtgttcgggaaacgttactcgcgaaaacatttcccgattgataaagctcggggtggactatatctccagcggcgcgctgacccattcggcgcccattttagacatatctttgaaaaatctgcacccgatagaataaaaaagcggggacgggggaggaaaaatgacggacaatgtcggcaacatggcgcgggaaaagcgtcgggaacgtattcttgcggcgatcggttctacggacgagccgcagagcgcgggggcgctgggcgaccgtttcggcgtttcgcggcaggtgatcgtgcaggatatcgcggttctgcgggcggagggcgcgccgatcgtttcgaccaatcgcgggtacattttggcgtccaaacggctggcagcgcgggtatttaaggtgtatcactccgaaaaggagcttgcggaagagctggaaattatcgtaaacggcggcggaacggtaaaaaacgttttcgtcaatcacagagtttacggccgtatcgaggcggagctgaatatatccaaccgcgtacaggcggcggagtttgtgcggagcatcgagggcggcaaaagccgtccgctgatggtggtgacggaggggtatcattatcacaccgtcacggcggcgcgcgaggagcttctcgacgggatcgagtacgccttgaaggcgcggggctttttgttggataaataagggacggcgtatggaaatcacggtttttgcgggcgaatacggcgaggctcccgctttgaaaaaggaacacgctctcgggctgtttatctccaccgcggagcacaactgcatgttcgatttcggggataagacggcggcgggcaacctcgccgcgttggagattgcgcccgaaaccgcggacgcggcaattctttcgcacggccacctcggcgcgggcggggggctgcttgccctcaggccccgattggtcggcgcaaaactctatgcgcgggagtccgcgtttgaggcgcattatttcaaaaaatcgcgctggaattacaagacggtgtcggtgccgaaaaaggtgtcgcgggaaggggttttgtttacgaaaagctttttgaagatcgacgacgaactcgctttgctctccaatttcaagcccgataagcgcgcggcgacggacacacggtattttgcggacggtgacaaatattttgtgcccgacacgttcgctcacgagcaggcgttgctggtgacggaagggggcgcgtcggtgctttttgtgggcggggcgcacgcgggcctgcggcagatggtggagcgcgcggaaaaaaccttttcgcggcccgtttcggccgtggtgggcgcgctggagctgacggacaagaaagggaaacctttgttttctcgcgaatgggtgcgcaatttcgctttcgagctgggaaaatttacaaaagcggacttttatttcgcctgcggcgtaggcgacgcggttttcggcgttttgcagggcgaactcggcgggcgggtgcgtcgtctgaacgtgggagaaacaaagatactttaagcgggaaagaacataacaaaagggaagggggagccatggctctcccttccctttattgatataaagaaaaaccacgcgatagtcgcgtggttcgagaaaggttaaccgatgagtcttgaaaaagaactccgattgtgtacaatgaaagtatgacctgccagtcaaaaatcaagacacaatcggaggatattaaaatgaaggaatcatctaataccacaaatagtttagcacacacgcgatggaattgcaagtatcacataatgtttgcaccaaaatatcgcagaaaagtattttacgaagaccataggctggaagtacgagaaatattaagaaagctgtgcgaatggaagtgcgtagaaattatcgagggggaagtatgtcccgatcatgtgcatattcttgtatcgatcccgcccaaaatgagcgtttcggtgttcatgggatacctgaaaggaaagagcgcaacgatcatctatcaaaaatggggaaatatgaaatttgcgtaccgaaaccgcgaattttggtgcaagggatattatgttgacacggtagggaagaacgcaaaagcgatacaagaatatgttgcgaatcagttaaaaacggacaaagaagcagaccaattaagtatctttgacccgagagacccgtttacgggtagcaagtaagcaatgcatggctggcaggccaaccaaagagcgcatttgcgctacgccagtgaacaagggctatgcccgaaaatgaaaaaccacccgctatgcgggtggatgattattatgctttattggcgcgcgtttctttctagtcggaaagatcattcggcggaccttaaaaatttgaaaaaatgttcaagatcctctttttctatttctccgtaagccttttcgtattctttaatatatctaataataagttgttctatttctttatttgtcgaacgtccgttttcattggctatatatttcattttatctaaataattaggagcaattttaagcgggaattgaggatatttttttgccatacaaataccgtttatgtaattattaacttcaatctttttcttatacaaatatattagcataaaataaatattatatacaaaccgaaatatatttgtataacaacatatgacggaggaaagatgaaaaaaatttaccaagataaaggtataagaatgttaaaaaaacagacaaagccgcgaaagagcaaataaaattttgcctctgtttcaagagtgcaaaaccgacagggaggtctccgaactgctcggttacgtttccccccgattccgtttactgctatatccatcaacataaactgcgggaaaagacgaccgtcacgcccgcgcccaaaaggggacggcttccgttccccccccgaaaccgccaaaaccgcccactcccgcacaaccgcccgtttgccattcccccgaaaaaacagtctcctccgcaaagagaatttcgcttcggcaacgggcgcgacggattattccgctctataaacagggggaaacggtcgaggggatcgccgcccgtctggatttatccgtcaaaacgtcttttactggttgcaatttcacggctttatctacgctgaaagcggaaatccaaccgattatattcttcctctatatgagtttgggttttcccccaaagaaattcaagacctttttggctatatgaaattggaaaccattctttcccgcctgcgtcaagaaaaataaatttttatatttcggcacaaaaaatcggggcaaacgaatataatcggcacgtgagacaacctttttttgcattttcgacaaaagtctttgcgaaaatttctttttcccatgttataaatcgcgttccgccctcatagattaaagcagaacgataccgaaaggaaaaaggagatttttttatgaacgaagaaatcgaatatgccgaaatgttggaaattcccgtttctacggtcaatgtggtgaagaaaaagaatcgccgcgtccgcgggaaaaatcagcccaatctcaaggaacgccttatctcccgcgtcaacaaccgcgtggggaacgcttcttacgcgcccgaagatgccgcgatagagtccgcgcccgcgtccgcgctggagcaaaatcccgtttatgcgtcggcggaaaatgccgcgctcgaggacgcggcacaaaacgcgcccctcgcagaacccgatttcggcgcctacgcttacgccgagggcggcgaacgtctggacaccgttcttttgtccgacgaaggcggcaggcgcgcgaaaaagaagcggcgctggtttgcggccaaggagcagcctgaatacgccgacttccaaaacgacgaagaggacttttcggaaaacgacggcaccatggcattgacgaagccgaaagaaagccgtaaatcgggcattattcttacggtggaattcgcggtggcctgtctgctgtgcggcggaattttcctcaccaacgtctttatgcccaccagcgcgatcaacacgtttttccgcggcttaatgcccgcaaaagcggaaaaagaggatacgagggtgtattccgattttaccctgacgggcgtcgtcagcgagctttccgacgcggaaatcaccgtctctcccacgggcgtgcttacctttacggacgaatgctgcgtctatcccgccgttgacgggaaaatctccgaggtgacgaaaaattccgacggcacttacgacgtgaaaatttcgcatacaaacagcttttacggcgttatcggcggcctcgactacgtatattatgccgtgggcgacaaggtatattccaacgttcccgtgggcttctcgaagggagaaacggccgtgcgcgtcacgatgtattccaacgacgagcttctcaactgctacaccgtggacagcgaaaactgcctgacgtgggtaaactcgtcggagagctgatatagggaacgggcggacgaacgtggaaaattccaaagtcggcggggcgggagaaaacggcgcgaaaagcacaaaacgcgcacgaggcgtgcagcgcgcagacggcgtacaaagcccgcaaggcataaaacgccgcaaaacgcgcgcccgccgtgtccgaaaagcgctgaaggtacatccgctgtttctgcttctgggcgtatattattgttttatcggtgaactgccgctgtttttgctcagcgccctggtggcgcttcagcacgagtgcgcacacgccttcgccgcggcaaagctgggctatcggctggatcgcgtcgtgctgatgccgtacggcgcggtgatcgacggcgatctgtcggggatcagcttcaaagacgaaattttcgtggcggtgtgggggcctttgtgcaaccttgtcaccgcggcggggtttgccgcgctgtggtggatttatccgacggcgtatgcgtttacggacacggcgtgctatgtttccctcgccgtcgccctggttaatctcatacctgcctaccctctcgacggaggcagagtgctgagagccgcgctcgccatgcacttcgatgaaaaaaaggtgaatcggatctgccgcgggatcacgctggttctggcggccggtctgctggccgcgtttgtgacgctttgcgtcagaaagacgccgaatttcacgctgcttgccttttcgctgtttctcgccgtcggagcgttcggaaaccccaaaaacgacgacgcgaaatatcgaaaaatcaatttttcctccaaagcggccttcaggcgcggcgtcgagatccgccgcgtggcggtggaagaaacgtgttctctgaaacgcgccgtcgggtttatcgaacagggcagatatctcattttggacgtctatgaccaaagggaaaattatctcggggaaattcggcaggacgaactcgcggaaatcttttcccaagcgggcatatacgagccgatcggggattttttgtaaaaaatgtaaaaaaacgcatacgaattttcaaaacccccttgcaaaagcgcgcattgtatgctatactatgagtcgaataacgctttagtgtgtgaacaatgtgtaagcgggcgattttatccgccgcttttttggatttgtaagtcatttgaaggttcggatatacgataatgaaaaaagaatggtttttcgaccgctattgcggtcagcagtttgtcgcgctcctcgaggacggtaagcttgcggaatttgccgcggaaaaggaaaaaaacggcgaaatcgtgggcaatatctacaaggggcgcgttatgaacgtgctcgcgggcatgcaggccgcgtttatttcctgcgggctggaaagaaactgctatctctccatagaggaaacctataccgattattccaaatacgacggcaccatgggcgggtcggggcctcagctgcccgagttgaaggagggggacgagattatcgttcaggtgactaagccgccgcgcggaaacaagggcgccaaggtcaccacgcacctgtcctttgtggggaaaaacctcatttttttgcccaataccgattttgtgggtatttcgagaaagattaccgatcccgagctgcgcgaaaatctgctgtttacggccgacaggatgcgcgagcgggagggggaagggtttatcgtgcgcacgcaggcgccgtttgtcacccgcaagcagctgaaaacggaggcggagtatcttaaaaatctctatcgggacatgcgggattttgcaaagggcgcggccgtgggcgcggttttgtataaggatttcgatttgcccgtgcgcgtcatgcgggacagtatgggggacgacgtgacggccatgtacgtgggcgacgacgatctgtacgaacggcttttgaagctggcgcgcctgcgcggggacatttccgaacgaaagctgatccactatacgggcaagcgcgcactgatgcgcgaatacggaatttcgccgctggtgtttgcggcggctcagccgaccgtaccgctggacaacggcggatatctggtgatcgaccgcacggaagcgatgacggtggtggacgtgaacacgggcagcttcgtcggggacacccgtctcgaggacaccgtattttcggtgaatctcgccgcggcgcgggagatcgcgaggcaggtacgcctgcggaatatcggcgggatcgtcgtggtggattttatcgacatgacggaggaggcgcacagggaagcggtgaccgcggaattgaccgagtgcctgtccaaggataaggccaagtgtcacgttttgccgatgagcgagctttgcctgacgcagtttacccgcaagcgggtggggtgcgacgtgctttcgtacctggtcaagccctgtccccactgccgcggaaacggcgacgtccccgaggacattttcgtcatcacccgtatccgttcggatatcctcgattgcttcgcaaacggctaccatgccgccgtggtcgagctgaacgagggaattctgcggcggatactcggcgagggcctgctctcgggcgaagtgaataccatctggcgggacaagcgggtgtatatgattccgcacaaaacctttcaggaggcgcagtattcggtgcggggggacaattcgggcgtgctgcatctgcccgataaggcgcagatattgtattgatccgatagccgacgaagggaagcatcgaaaaaagcggcccgtgcaattttgcacgggccgctttttgacaaaattttgaaaagcgttcgtttctgctgccttgaaaaatcacaaaaaagttttcagcttcttttcaaattcctcttcgagggcgatcaggtcctttaacagcgcggtaatctcctcgtcgtcgtctttgggcagctcgctgagagaggtctttaaggaggtgatccccatgacggtgccctggatcatcatttccgcgatgtgcgcgcgggaattgtccgtgagggtgttcattttgatcgagccccacatcatcgcctttttcatgggattgggttcctttaattccagcgccttatcgcgggcgaggcaggccgccctgccgcagattttttcgtattcctcgtgctggcgcaggatctccgctttgatcccctcgtcctctatttcgggcagaatgtccgagatcgactcgagggcaagctggcagttgcggtaaatttccgctaaaatttcttcgctctttttgacttccataactatcgtctccttttactcgtaagttttcgctttttttacgggaaatatgcgaaagaaagagaaaaatgcttgacttattccgcgcgggtatggtatattatagtccgagccgatagaaacgggcttttttaagcgtcgcttttatggaaaaatttccgtaaaaagcgcccgcctcgggttcttcgagactggaaagaggaggtaaaaactatgtacgctatcatcgaaaacggaaacaaacagtataaggtggcggagggcgacgtcgttcgcgtggaaaaactcgccgccaaagaaggcgaaaccgtatccttcaacacgctgatggtttccgacggaaacggtatcaagacgggcgcggaagctgccgctgcgaaggtcaccgctacggtcgttaagcaggacaaggccaaaaagattatcgtctttaagtataaggccaagaaaaacgagcgtaaaaagcagggccacagacagccctacaccgcggtcaaaatcgaaaagatcgagctttaaccgccaaggctttcggacgggcagggaaccctccgaaggaaaaatctgaaaaaggagaaataaaaatgatattcatcagtttattcgctcataaaaaaggtaccggttcttcccacaacggaagagacagcgaggccaaaagactcgggcccaagcgcggcgacggacaaaacgtgcttgcgggaaatatcctcgttcgccagagaggcacgaagatccatccgggtaccaacgtcggcatcggcagcgacgatacgctgtttgctttgacggacggggtcgttcggtatgaaagaatgggcaaagacaagaagaaggtcagcgtttatcccgtcgaaaagacggccgcggccgagtaactttatcgccttacggggcgcatttggcaacaacgaaaaccgacgccgcaaaactgcggcgccgggatttttttattcttgcgcggcggggcgttccggcgcctgtaacggcggctcgccgcctgttttcgaacggacctcccgatcccgttttttcaggattttatcgatgaggcagaagaaaacgatcgtcgaaataatcccggccgcgaggtcggaaatcggctccgcgtaaaacgcgccctccgcccccaggaagcggggcagggtaagggtgagcgtcagcataagcacaagctttctgaacagggacagcgatatggccacgggcgctattcccagccccgtcagcccgtccaccaaagcgtattggaaggcgagcggaataatcatcagcgtatagatatggataaagcgcacgctttccgctttcagcgccgcgtcggaggtaaagacggctacgacgggggccgcggcaaaccgtgcgacgagaaacagcgcgacggtgtaaaggatgcacaaggtcaaaatccatccctcgcagcttttgacgcggtcggggcggttggcgccgtaattataggacagggcgggctgggtgccgcccgaaattccgccgaggggcagggtgatgatctgcataaacgaaagcataatcgtggcggcggagataagctcgtccccgcgttcgccgccgtaggaacggagcacgccgttgagggcgaggatcattaccgaatcggtggcgatgatgagaaagggggaaagcccgagcagcagaattctgcctacgatttttttgtcatagccgccgaagcttaagcgcacatccacctttttccccagcaggaacagtactgtgaacgacgcggaaagcgcctgcgaaaaaacggtggcgagcgccgcgcccgcgacgcccatgcgaaaggtgtaaatgaacagcgggtcgaggacgatgtttgcaattgcgccgatacatacggtggccatgcccgccttgccgtgtccctgaccgacgatgtaggcgttcagtcccgtggtgaccacggcgaataccgtgcccgcggcataccaggagaggtaatcggaagcatagcccgcaatgtttccgcccgcgccgaacaatcgcaaaagaggctccttaaagacaaatacggcggcggtgaggacgacggacatcaccgcgagcagcatggcgccgttgcttaaaattttcttcgcgccgtcgaggtccttttcgcccattttgatggacatggcgggcgcgccgcccagccccacccacgtcccgaaggaggcgagcagggtgacgacggggccgcagacgcccacgcccgcaagggcaagcttgcccgcttcgggcatgtttccgatataaatacgatcgacgatactatataatacattgacgaactgcgccagcatggaggggattgcaagcttgagtaccactttgagcggcgcgtccgtctcgagaaagtttttcgaagatttcataaaggtcctgtttttgctcatattcaatgctatcattatagcggaaacgcgcgaaaaagcaagcgtttgagggacggttttgcctatttgaaaaaagtttccctaaacggccgcgctccgtcgctaagagacggattttcagccttaaaaattccccgaaagagtagaattccgcgactaagcgcggattgtcagtcctaaaaatccccaaacggccgcgatccgtgattaaacgcggggttttcatccgaaaaagcttcttgcagcagctctgccccgtaatggaggcgtgaggaaaattcatttcccgaagcgaaaatttttttgtaaagactgcaaccgacagattctttttttcgtctttaggagtagaaagcccccgatggggaaatataaggataaggagcaaaaggaggaaaatcgtatgagtaatccaaaaagggcggggcgcgtatgtacggcgttggccgtcgtgttgacggcgggcagccttgccgcgtgcagcgacggctataaacccaagccgctttcggaaaatgccgtcagcctcacggcggcgctgaacgcggacgcaaaggcgaaggaagagggcgtcgccgcgtcgtttacggaaaagaatatcggctttgcgacggaatttttcaaacgttcctttcaggaggcgaacacgctcgtttcgccgctgtctctggccgtcgctttgtcaatgacggcgaacggggcgggcgggaacacgctttcggagatggaaggggtgctgggcgcgccgctcgcggacataaacggcgggctttcgtcctatatgagctatctcgagggggaaagcggcaaggagatcaccctttcgcttgccgattccatctggatcagggacaacgttgcgccgcacgtaaatcgggattttttgcagacgaataaggattactacgacgcgcagattttttccgcgccgttcgatcagaccacgataaaggatatcaacacctggacggaaaacgaaaccgagggcatgatcgacaagctgatcgacgaaataagtcccgatacgtttatgtacctcatcaacgcgctctacttttcgggcgaatgggcggaaaagtacgagaagaagtcgatttccgacggaaggtttacttcccttgacggaagcgtctccacggtggatatgatgaactcgacggaagggctgtacttttccgacgaaaacacgacgggatttcttaaaccctacaagggcggggagtttgcctttgcggcgttccttcccgatgagggcgtgacgatttcgcaatatgtggctgccatgtccgcggcgaaatggaaaaatctgttcgataagagcacgcccgtcgccgtaaaatgcacgctgcccgcgttctcttacgatttcgagctcgaggcctcgccgctgttgaaagagatgggcatgcccgcggcgttcgacggggagaaagcggatttttcgggtctgctccccgatgcctatatcggagaggtgatacacaagacgcggatcgaggtcgatgcggcggggacgaaagcggccgccgtcacggggatcggcatgagatgcgaatccgcggcgcccgaggaatacgtcgtgcggctggatcggccgtttgtttatgcgatcgtcgatacggaaaacaattacccgctgtttctgggcgcggtcacccgtctgcccgcaaaataaatcggctgcggaaaactaaaaagctgaaagaggttcaaaaagaaagggcgccgcatactctgtatagtgccgccctttttccttgcatttttgcggagagtgtggtataataaaaccgctgttgcaaaatatcgcggcctttcggccgccgcttacgtgttggagaaaggatatgaaaaacgagacgtctcccgaaacgaggggggaaaacgagggaaatgaggaaaaagaggcggctgccgctgcggaatgcgcgggagaacagcccgctctcccgtccggaaaacggctgttcggcgtgcgggtcaccagccttttgttggttgcgtacatagcttctttttgcggctggtgcgtggaaaacgtgttccgtatgctcgcaatcggcgtgctcgattcgagacatcagattcttcccttcctcgccgcctacggcttcggcattttcgtattgtttttcgtcttcgggacgcccaccgaaatgcgtatcttcaaaaagcgtattctgcccgaaaataccaaacgaaatcacgctctgcgcgtcgtcgtgtattacgccctcgtctttgtgctcattctcttcggggagatgagcgtggggcttttgttcgacaaatgcttcggcgtacaggcttgggattaccgaaatattcccctgcacatcacccgctacacaagtattcccaccacgttcgggtttacgacgggcatcaccctgttgatgcatttcgtgttccgccccgtggtcgcctttttcgagcgcctgccgcgaaagctctgcttttggcttgccttgatattcggcgtgctgatcgccgcggattactgcatcatgatcggcggtatgctggtgacggggcatttcccaaactattggtcgatccgtttcggaaaataaaaacgagcccccgcgagggggctcgtcggtttattccgtccgttcggaaagttcctccgcgtgcctgtcgggcgtcaccaaaagcgttttataatttgaatacgtcacgaaacccgcctttgctttaggcggttttttcacatatttccgctcgcagtaatcgacgggcacctttccgcccgcccgtccgtccgaataataggcgcatacctccgccgcaaacgcaagcacctcgtcgggcgcctttttcccctccgtggcgattacgacgtgggaggaatgatatttttgcgtatgcagccagatatcggcgggcgagcagctctttaacagtctgtcgttttgcagattgtttctgcctccgaaaatgcggaagcctccgaatgtatattcgcggaaagggacgggagtatcttttttctttccgcccgcccgttccttctgcggcttgacgaggcccagcgaaataagctccgcttcgatttctttcagatcctcccgcgtgtcggcggcggagagggaggcgaacacgctctccgtgtattccagctcgtcctcctccgactttcgccgcggaagcagggcgtccagcgtgcgcttgcgcttggcgtaggccttgaagtatttctgcgcgttctgcgacggggacagcctgacgtcgagcggaatcttcaccctttcgccctccgcgtaccaattttccgcctcgcattccgccattcccttttccagccgccagaggttggcggtgacaagctctcccctgatgcgttcggcttccatgtcctcgcagtccttcagccgctccagcgtgtcctgcagctttttctgctgtttctttttcaaagcgcggacgacggcttccagcttccgcttcttgtcctcgaaagcgcgtttcgtctctttgaacgtataatattcgtcctcggccttattcaaggacggagcgaggacgccgcccgcgacggagaaggcgaaaaaatccgctgggatttcgttttcgtattttacgcaaggctcgcacggcagattttcgcaaaattccccgacgaatttccagacgggcgtttcgcggggacgaaaccgcagcagctcccgcgcggtgggcagggccagccccgcgacgttttcgaagagaaaccgcgcaagctcctcgtcggaagcgccttcggcgcggagggagagaaagctttccgtgcgctccttcaagcctttcccgtcgaagggggaaagcttatcctgcggctcgggataggcgtatttcgcgcccgccagcagcacccgccgcgcgttgtcctcgagagaggaggtttttagcgcgcctaaaatcacccccttttcggtgagtatcagattggaatatttgcccatgatttcgcagtgcagcaccctttcgcactcggaaaaatcggtggtgcagtgcaggcggatttcgacgatgcgttcgaaggcgtattgggagacggagaggatttccgcgccgagcaggtgctttctcaaaagcatgcagaaattgggcgcgacgggagcgggctccttttccgtcagcgacagacagacgcgggcgtttgaggcgtttgtgctcaaaacgagtttaaccgtcgtctttcccgtgtatataataaaggtaacctcgtccttgtcggcctgcgacacgcggttgatttttccgcccttcaaaagcgcgtcgagttccgccgccgaccggcggatatgaaatgcgtcctgaggcatcctgttcctccttgtaaaccgcccccgaaagggagaaaaagcccgaaacgggtcgaaaagatttttacggcggggtgttttctataaattataacgtaaatttcgcaaattgtaaacgaaaatgctttcttttctcgtaagaatatgataaaatgtagcttgcacggcggagagaagctctgccgccgaaagagttcaagagataaagaagcattattttaggagaaagatattatgaagtacacaacaaaagccgcagaaaaaagcacgatgaagatcacgatgaaattcgacgcagacgagtggaaggacgccctcaacaaggcgtacgtcaagacgaagggaagatattcggtcaacggtttccgcaagggaaaggcgccgagaaacgtcatcgagcacgcctacggcaagggcgtatttttcgaagatgcgctcaacgttctcttctccgagaattacggcaccgttctcgataaggaggaaaagaagtttacggcggtgggcgatcccgagctttccgtggacgatctttccgacgacggcgtcaccctcgtggccgtgacccccgtcagacccgaagtgaaaatcggctcctacaaaggtatgaaaatcaaagaattcgcgtataatgtagaggacgccgacgtcgataaggaaatcgaaaggctgctcgacagaaacgcacgcaagatagaagtttccgatcgtccctgccaaaacggcgatacggtcaacatcgatttcgtcggcacgatcgacggcgtaaaattcgacggcggcgaggcggcgggcttcgacctcaccctcggcagcggacagtttatccccgggttcgaggatcaggtcgtcggcatgaacgtcggcgagagcagggacgtaaacgtcagattccccgaaaattatcaggccgaggagctcaagggcaaggacgccgtgtttgccgtcaagctcaactccgtcaagggtaaggagctgcccgagctgaccgacgcctttatcaaggacgcgacgggttcggagacgatcgaggaatacaaggccaagaccaaggaaagattgcagcagcaggcggataaaaattccctcgacgcgacggagaacagcattctcgacgcgatttcggctacggcggaggcggaaatcccccaggccatgatcgagagggaaatcgacggcctcgtgcagaaatttgagtatcaactgatgtatcaggggcttaagcttcaggactatctcgactttatcaagacgacgaaagaggagtttagaaagaattacgaggagcaggcgaaaaagaacgttttgaaccagctcgtcatttcccagatcatcaaagacgaaaagatagaagcgacggacgaggaagtggaagcgaaagtcgccgaacaggccgcgtcggtggataagagcgccgaggagtacaagaagggcatggatccccgtcagtacgactatatcaaaagcgacatcatcatcacgaagctgttcgatttcctcaaggcaaacaacgaaatgtatgtagaggagagcaagtaatgaacgaaaaaaatgttttgatcccttatgtcgtggaacgcacgagtacgggcgaacgttcgtacgatctgtattcccggcttttggaggacagaatcatttttttgagcggtgagatcgacgacgcggtggccaacacggtggtggctcagctcatttatctcgagggcaaggagccgggcaaggacatcaatctgtatatcaattcccccggcgggtcggtgacgtcgggcatggcgatctacgacactatgaattacgtcaagtgcgacgtatcgaccatctgtatcggtatggcggcttcgatgggcgcgtttctgctttccagcggcgcgcggggcaagcgtttcgccctgcccaattcggagatcatgattcatcagcctttgggcggcgcgcagggtcaggcgagcgacatcaaaattcaggcggagcatattctgcggaccaaggcgaagatgaaccgtatcctttcggaaaatacgggaagggatctcgccacgatcgaacgcgataccgacagggacaattatatgtcggcggaggaagcgcgggtttacggacttatcgataaagtttttgtgagacgctgaggcgacgggcgaaaacggaacagacaaaatattctcgcgcaaagctccttgcaaacgggctttgcgcggtatttttcaatcaatcaaacggggtgtgacacatggaaaaaaacgaacaacgctgttcattctgcggaaaatcgaaggaggaagtgcgccgcctcatcgcggggccggacggggtgttcatctgcgacgactgcgtggatatctgcaaggcaatggtggacgagacgatcgagaaggataaggcggaggaagtgcctttgaaaaagcccgccgagataaaagaggagctggacaaatatatcgtcggtcaggacaaggcgaagaaggtgctttccgtcgccgtgtataaccattacaagcgcataaacgcgcttgtgaagacgaaaaaggcggaggacgagatagagatcgaaaagagcaatattcttcttctcgggcccaccgggtgcggtaaaacgctgcttgcgcgcacgctggcaaagatcctcaacgttcccttcgccaccagcgacgccaccacgcttacggaggcggggtacgtcggcgaggacgtcgaaaatatccttttgaagcttattcaaaacgccgattacgacatcgagcgcgcgcagcgcggcatcatctatatcgacgaaatcgacaagattgcgcgcaagagcgaaaacgtctccattacccgcgacgtatcgggcgagggcgtgcagcaggcgcttttgaagatcatcgaaagcacgctcgcttccgttccccctcagggcggcagaaaacacccccagcaggagtgtctcagaatcgacacgacgaatattctgtttatctgcggcggggctttcgtgggcctggataaaatcgtggcctcgagaaaggacgacacgacgctcggcttcggcggcaaggtgaagctgggcgccgacgaggtggactacgccgcgctcgacgacgtgaagccgcaggatctgaccaagttcgggctgattcccgaatttgtgggcaggctgcccatcgtggtcaacctcgacccgctgggcgaggacgccttggtgaaaattttgaccgagccgaaaaatgccatcatcaagcagtatcagaagctggtgggcatcgacggcgtcaagctgactgtggaagaggacgcggtgcgcgaaatcgcccagacggcgatccgcttaaagacgggcgcgcggggactgcgcacgattatcgaaggggtgatgaccgacgtgatgtatcagattccgtccgaaaacgacgtggaggaagtggtcgtcacgaaggaatgtctcaccgacggcgcgcggcccaaggtgatttataagcaaaagtccgcctgaagtgcggtaaaaagaaaggcggtacggaaaattccgtaccgcctttctcttttgcggaaggtataagccttttaaacgtcattctacgataatcgtcaagggataagtggaacagccgaagtttttgcccttggtcttgaacttcgagctggcgattacggtataagtccccgcttcggcgaacgtgtaggaattataacaatctgctacagaccaaagcgtttttcgtcccataaggttcggcagagtgcgagagtgtttttccgaaaaatccggagtgtataaaacggtttctcctttggaaatttccacgtcgataaactgtgtgcctctataaacggttttataccaccttttgtcctgttgccccatcatcattctgaattgaatggtactgccgacagggcaggttaaagaattattttcttctctccgagagtcctcataggaataagtgtttgcgtcgtctataagatatccgttttcatcaagataatgggcgtttagagcaaatcgaaaattagattgcttaggagggataaggaaaaacaacagcagaccgatcaacaaaacggccgcgagggaaaggggaattacgattttcaatgcctttttttcatttaatcctccgttaccgtcttgtataaattatattataaaatagagatgaaaattattttcatatacagtataacatattaaaaaatgaaagtcaatactgaaattaaaaatagaaaggaaaaagttaaataacgccgtccgtttataaagtagaaaaaatagtttgtctcgctgcatttttataaaatccttttttcgacaccaggcgacgcgagtgcgcggaaatgtgaaagaattttcggaaaaacttctttgctttttcgcatacagtgtgctataatagaagcggaaatgcgtaagcacagagtatttacgggcatttccgcgccctattcaaacatagcgcaagcgatgttataatagaagcggaaatacggaagcacgaagtatttatcgatattttcgcgctccattcgaatattgtcgcccgcgttataataaaagcgaaagagcttttcggtcgtttagaaaaagccgatttgtaaagccgtgaggaaaatttgtttgaaaaggctgctaaaggggtaaaaataattatatggaaaattatacggaaaaacaaacgatacgaacgaatatattgtccatcgtgccccttcgcggcaaggtggcttttcccaatacgctcacttctttcgaggtcgggcgggatattaccctgaaagcgatcgaccgcgccactgcgtcggccgaccgtctgttgtttatctgcgctcagcgcgaaacggaaaaagacgaaatcaccgcggccgatatctataccgtcgggacggtggcgagaatcaaacaggtgacgcagcttcccgggggcactctgcgcgtcctcgcggagggcgtttatcgcgcccgcgcccgttcggtgcagttcgaatcggggtactattatgcggtcaccgacgagattgtgtccgtgcacggcgacgaggttctcgaggaagcctatttccgcacggcgcgagagatggtgcgggacgtgcttctggccgacggcaaaatcggaaaggatattctcgcgcagctggaggcctgttccgaccccgacgcctatatcgatatgaccgtggcggccatgcgcgtgcggctcgaagtcaagcaggagctgttggaggaggaatccgtcatcgaacggctgaagcggtttgaacgctgcctcaacgacgagttggagattgccaaaatcgaaaagaagatcgcttccgccgttcggcagaatatcgaccgctcgcagaaggattacttcctgcgcgagcagctgaaagcgatccatacggagctgggggacgacggcaaggaggaggacgagtaccgcgcaaaaatcctcgccaaaaaattgcccggggagatcgaggcgaagtgcctcaaggagcttgaccgcctcgacaaaatgcagtccgcctcgcccgaatatacggtgattacggggtatctcgactggatactcgacctgccctggaacgaggaaacgacggacaccgaaaagctttccgactgcgtgcaggtgctcgacgccgaccattacggcctcgaaaagattaaggaacgcattaccgaatacctcgccgtgctgaaactgacggggaatatgaaagcgcccattttgtgctttgtcggccctccgggcgtcggtaaaacgagtatcgcgcgctct

SEQ ID NO: 1612 - DNA, 32759 bp, Unknown
  16S sequences of unknown bacteria
cgccataggacgtagctctaagctgtatcctatggcgcttttgtcaacagggccgaaacgagcagcccctccccatttggggaggggctgctcgtttctctgcgtcgagggcagacggggtggggcgtggcttcagcggcgaaggacgcgcaggaactccctgccgtatcgccggagcttgtactcgcccacgcccgaaacctcgaggaattcttccggggtcgcggggcgctttgcgcacatatcccgcagcgtggcgtcggaaaagaccacgtacgccgggacgtgcgcctcggcggccaggcggttgcgcagggccttcagctcggccagcagcgcctcgtccacggcctcgccgcccggcgcccgctgggcatcgcgccgccggcgcggcgcctcctcctgctgcgcctcgtcccgcacgcgcaggcgcacgggcgcgccgtcgaggatctcctgcgcgcggggaccgagccggagcacggggtattcgccgccgctgctctccagcgcctcccggtccaggagcgcgtccagcagcgcgcgcaccgccggcagggcgcggccgcgcagcgcgccaaagctcgcgcagtgctgcagccccagggcctgcacgcgcgcagcgccgctcccgcgcagaacctcctgcacgagggttcggccgtagcgctcccccagctcctgcacgcaccggatcgcggcgcgcgcatcctcgccggcgtccacggtcctttggttctcctcgtcgcagttggagcagttcccgcagcgctcccccgccttctccccgaaatagcgcaggatgtagccgcgcaggcagtccccggtggtgcagtagcgggccatgcggcgcagcccttcgcgcatgccctcgcgcacggcgcgggcctgctcctcggtgagcagcgggttctcctcctccttctcgatcaggaaggcgttgagcctgacgtcctgcccgctgtagagcagggtgcagaccgcgttcgacccgtcccggcccgcgcgccccgcctcctggtagtaggactccaggttcttgggcatgttgtagtggatgacgaaggcgacgttggacttgtcgatgcccatgccgaaggcgttcgtggcgaccatcacctccgcccggtcgtacaggaagtcgtcctggttctggcggcgctcggcgtcggacaggcccgcgtggtagcgcgtcgccgcgatgccgcgcgcacgcagcgcctcgcagacctcctccacggtccgccgcgccaggcaatagacgatgccgctccgccccttctgctcccggagcaggcgcagcagggcgttcgtcttttcgcgctggggcacgttctccacggcaaagcgcaggttcggccggtcaaagcccgtggcgacgcagaacgggtcctgcaggcccagcagatcgcggatgtcgtcccggacctcgggcgtggcggtggccgtaaaggcgccgaggaccgggcgcgcgggcaggctctcgacaaagtcgcggatgcgcaggtagctcggccgaaagtcctgcccccactgggagacgcagtgcgcctcgtccacggcgaccagcggcaccgcgatctcccggcacaggtcctggaaggcgggcgtctccaggcgctcgggcgcgacgtagatcacccggtagagaccctggcgcgcattctccagcgccagggcaaactgcctgggcgtcagcgaagaattcaggtacgcggcgcgcacgcccgcctggttgagggcggcgacctggtccttcatcagcgaaatcaggggcgagacgaccagcgtcaccccgctcagcaacagggccggcacctggtagcacagggacttgcccgcgccggtgggcatgacgcagagcgcgtcccgcccttccaggagcgcgcggacgacctccccctgcccgggccggaaggcgtcgtagccgaagtagcgctttaagacctcccgctcatccattgcgctgctcgtcctccatgcgctcgtgcaggtcgtggaggtagacccagcgctccgtcagcgcgtcgagcgcggcctgggcctgctcccgctcctgcgtcaggcgctgcagctcgacgtagtccgcctgggcggcctccatctgtgcctcgatgccgcgcacggcggcctccgcgcgctcgacgtccgcgtcgatggtctcgaactccttctgctcgcggaaggtgaacttggccttcttctcccgcttctcgcgcgggggctcggccttcttcggcgcgggcttctcctgcgcgcgcgcatcctcctcgcgcaggcgagcgtagtcgctgtacccgccggggtactggcggatgcggccctccccctcgtaggcgaagatgcgctgggcgatgcggtccaggaagtagcggtcgtgggagacggcgacgaccgcgccggcaaagccgtccagatagtcctccaggatcgtcagcgtctgcacgtccaggtcgttcgtgggctcgtccagcaggagcacgttcggcgcgcccatgagcacggtcagcagctgcaaccgccgcttttccccgccggagaggcgtgcgacgggcgtgtactgcaagtccgcatggaagaggaagcgctccatcatctgcgtggcggtgagccggccctcgtccgtctcgaccgcaagggccacgtccttgaccacgtcgatggcgcgcgcgtccggcggcagggcggcgttgtcctgggaaaagcagccgagccggaccgtgtccccgcgcacgatcgtgcccgcgtccggcgccaggctgccctcgatcaggtggagcagcgtggactttccgcagccgttcgggccgacgatgccgacgcggtcgtcccgcaggagcacataggagaagtcgcgcaggagcgtgcggccgtcaaagccctttgtgaggccctcgatctcgatgatcttgcggccgaggcgggaagaggcggcgtgcagccggacctcctcgcgttcctttgggccctccacggcggagagctgctcaaagcgctcgatgcggcccttggccttggtgctccgggcccgggcgccgcgctgcatccaggcgagctcctttttcaggatggcctggcgcttgcgctccgaggcgcgggccatgtcctcgcgctcggccttgcgctcgaggtacgcggaatagttcgccgggtgggtgtagagcgcgccgccctcgagctcgacgatctggttggccacgcgttcgaggaagtagcggtcgtgcgtgacgagcaggagcgcgccggagaaggcggcgagctgcttttcgagccactcggcggtctcggtgtccaggtggttggtcggctcgtccagcagcagggcctcgcaggggcggatcagcgccgcggccagggcgagctttttcttctgcccgccggagagggtgtccgcgggcgcgttctcgtccgcaaaccccaggcgcgtcaaaatccgcatggcctcataggcgcgcagctcctgctccttgggcgagacgccggagaacacggcctccacgaccgtcgcgcccttgggaaactccgggttctgcggcaggtacgagatgcgcgcgcccgcgccgcgggtgatcttgcccgcgtccggtttttccagcccggcgagcatcttgagcagcgtgctcttgcccgcgccattttggccgagtatgccgatgcggtcgcccttttccacgaagagcgaggcgtcctgcagcaggaccttgcccagatacgccttggcgatgtgttccgcagagagaatcatgtgcgcctccttgttcgtcgccgggtacaaaaaaaccctgccggaccttgttcggcagggacgtggtggaccgccagggactcgaaccctggacaccctgattaagagtcaggtgctctaccaactgagctagcggtccatgcgggaaaatggagcgggtgatgggaatcgaacccacgcaaccagcttggaaggctgggactctaccgttgagctacacccgcagaaaaaaatggagcggtagacgggattcggacccgcgacatccaccttggcaaggtggcactctaccactgagctactaccgcgtaattcggagaaattctgctccattttgtaaggaaaaagtggagcggtagacgggattcggacccgcgacatccaccttggcaaggtggcactctaccactgagctactaccgcataaatatgggggtgaattggtgcgggcgaagagacttgaactcccacgccattgggcactagatcctaagtctagcgcgtctgccattccgccacgcccgcatcacgaagaatcaagtggtgatccatcggagattcgaactccggacaccttgattaaaagtcaagtgctctgccaactgagctaatggatcatacattggctggggtggcagggctcgaacctacgaatgcgggagtcaaagtcccgtgccttaccgcttggctacaccccaacgtgaacctgcgccgcctacgtgcacctgccgccgctgttgccgccgccgcttgggatctttgaaaaaaatggggtgaatagtgggattcgaacccacgacctccagggccacaacctggcactctaaccaactgagctatatccaccatatgctgccaatgccgcaaggttgtcatgaatggcgcgcctgaagggattcgaacccctgacccacggcttagaaggccgttgctctatccagctgagctacaggcgcataccttccttgggcggcacacccgctgacgaatatagattatagcgatttcttctgcccctgtcaagggttttcccaaaaaagtcgccggaaaattccattcctcacctccggagcgcatagggcaggagcacgccctttgcctcccccttctccaccgtcagcagcgcaaggcccgcccccgcgccaagccgcggctggcagagggagccggggttgagcaggagcaccccctgctcccgggcgaggaagggctcgtgcgtgtgcccgaagagcgcgacggcgcacgcctgctcgagcgcggcgtaggtcaggcgctgcagatcctccttgacgccgtagcggtggccgtgcgtcaggaggatgcgcacgccctcgcactcgaaggcttcctccgtcgggcgcatggatcggaacgcgtcgcagttgccggagacggcgcgcgcggggatgcgcagctctcgcgcgaggaagtccgcgtccgcggcgtaatcccccaggtggagcagcgcgtccgcgcgcagggcctccaggtaatccagcgcgcgcaccatctgcgtccggtcgccgtgcgtgtcggacaggacgaggaagcgcatggctcagccctcctcttccagggaacggcgcagggccgcgagcgcgtgggcgcggtgggacatgccgtttttgacctcggcgggcagctccgcgaaggtcttgtccatgccgagcggggtgaaataggggtcgtagccaaagccgttgttcccgcgcggcgcaaagccgaccgtgccctcgcaggttccgcggcagatgcgcgtgggctgccccgggcgcgccagggccaccgcgctgacaaagcgcgccgtgcgcggcgcggggacgccggcgaggttgcggaggagcagggcgttgttggcgtcgtcgtcgccgtggcggccgcagtagcgggccgagtgcacgccgggcgcgccgcccagggcgtccacctccaggccggagtcgtccgccagggccgcgcagcccgtcagctgcaggatcgcctcggccttgatgcgcgcgttctcctcaaaggtctcgcccgtctcctccgggtcggcggagacgccggcctcgcgcagggacaggatttcgtcgaacaggtcgccgaggatctccttgatctcgcggatcttgtgggcattgttgctggcgatgagcagcttcatcttcgtctctcccccgtgtggcgtttttcccattatagcacagccgcgcgggaaagaaaagcggcccctgcccggtttggcgggggccgcgtgcgcgcgggcgctcagccgatggcgctggccatgagcgcctcctgctcggtgttgacgaccgtcgtcaccgcgagggtctcggtatcgagcacgaagtcctcgccctcgacctggagcttgacctcggtcacgtccgggaactgggagcaggtgagcaccagggccttgaccgcggccgcgccgccgtccgcctgctccacgacctgcttaaactcctccgtcatgttgatggtgaccacgccgtcctgctgttttacggagatgaggcccacgcccttggggatgcagccggcgaggccggagtcctcgcgggggcccttgaggagctcgagcacggcggtatcaatgtcctcattggagaagaccgtgcgcgtcacgggcaccatgcacccgctggcctcgctctcaaagaacacctggaccgtgccggagccggtcagatccgtgtccgcggagacggactcgacgttcaggtcctcccgcgtgagcggggcgctgatgttcgtgccaaagggcagcgcgtcgacctcctcgccctcgaccaggagctgcacctcggagatggagtcgaactccgtcagcgcgctgacgatggcgctgaccatggcgttctcctcctccgcgtccgcgcaggccatgcacgccgaggacagcgagaccttggccagctggccgatgatgtccatgtccacctccagcccctcgggcagggccgtcagcagccccaggcgcgcggcctgcaggtcgttttcttcggaggagaccatctgcttgagcgtcgccttggcgatgccctcctcccaggggatctcacagttgacggggacgaggtagcccatcagatccttgtagtacagggtgacctcccgcgtcgagcccccgtcctccagcgaggcctgcagctccgcggcggtggggacctgttcgacgggctcctccaggtcgatggggtcggggctggagcagcccgcgagcagcgcgagcgccagcagcatcagagcgatgaccttgcattgtttcatgaccgactgcgcctccttgcaacgtttcacttacgcagtccatcctatgcacgtccctcccgcatccatgccttcgcgccgaaaaaagggcgtccgcgcaaaagatgcgcgaacgccctccgggccgtagaaatcctttcctgctgttctcagagatgtaggaaggggcctgaggctccttcctttgcaatccgcagcggcggcgtgtacgccgcgaggaagcgggccgaaggcccgctttccggtatttggcgcgttgtgcgcgcagcgcgcggcgcgccaaatgtttctcgaagaaatgcaagttgcatttcttcgaagcgtgtcgactttgtcggcacgcttcgggctgcgcttacgcgcggccgtgcttgcggttccagtcgagcaggagcttttcggcgggcttggcgtagacgccgtagccgctgttctccatggccttgtcggcggggtagaggttggcgctccagtcccaccagcccacgccctgaatccaggggttctcgtccagggcctcgaggaaggcgcggtaccagcgggtctgcacgccgatgtccaggtcgccgccgtgggtccagtcgttggggatgaactcgctgccctggcggcaggggcatccgcactccatgaagaggaagggcttctggaacttctccgccacgtcgtggatgcgcgcaaactggttgtccaggtcgttgatcgggtagtagccgctggaggagatgacgtccaggcagtcccaccaggtgacgttgtgctcctggtacttgtcgcagttgtaggtcacaaggccggagtagaccttgcgcacctcggcgatgaggccgcgccacaggtccgccttgcggtcggtgccgaccatctcgcacccggcgcagtagagctcggcgcccacgtcctgcgcgatgcgcgccaggtagacgttgaagtccgtataggagcggaaccaatcctcccactgcggctcgcaggggacgtaggtgtcaaagaaattgatgtaggcgcgccaatagccgtcccggcagttgaccatggccttgaggatgaccttcttgcccagctcccgcgcgaccgcgacgcacgcgcggacgtcctcctcgctcatgacgtcgtccgtggtccagtcgatcttggtggaataggcgtggtcctgcagggccgcaaccggcaggagcagcgtatcgctgcccgtgcccgcaaacatcctgcgcagggaatccaggctccccgggttcttcgtgaaccccttgggcgccatgaagccgaacgtcgttgcggaaaagaaatccattgagagtttccccctttggtcgtctctgtctgcgccgcgcagccggcccgcaggggcggcccggacgtcagggttagtatagcccctttttccccttcctgcaaggggcaggttttcacgcccgttcccatttcataaaacgccgttccgccccttgaaacttcttgcacaaaaaaggtccccgccgcttgccgattgcaagttggcggggcagtggggggtggctcaataaagatcgtttcacagaacggtattataatagcaagcccagcaaaaaatgtcaagcccgaaatcccaaaaacgcaattttttaacgaagtggtcttgaatgaaaacccagcgttatggattctgggggtatgtccggacatacgggggcaaacgtgctgtttttccggcgcggcggcatatacatggcgcaaggaaggtgttgccatgaaccggaacaaggcgatccagggcgttttgctgctgacgatgtcctcctttttccttcgggggatcgggatgatctaccgcatcgtgctctcggagcgcatcgggatggagggcatggggctgtaccagctcatcatgacggtgtacggcctgttctccatgctggcctgcgcggggctgacgatcacggtgagccgcctctgcgcggagcggccgcgcgccgcgcgctcggcggtgcggtcggcctgcctgtacgcgggggcgctgggcacggcgctgggcgccgcgctcctgctcgcggcggacggcattgcgtccaggctgctcggcgacgggcgcgcagcgatggcgctgaagtggatcgcgccgtcgctgccgatgatgggcatttcggccgcgctgcgcggctacttcctctcccggggggacgtggcgcggccgacggtcgcgcagatgacggagcaggtggtgcgggtggggctggtgctcttcctgctgttttccctggaaatcacggagctctcccaggcctgcgcggcgatcctcttcggggcgacggcggccgaggccgtgtcgctctcgatgtgcgcgctgttttacgcgcgcagccgggagccggcgggcgagtccctgccgctgcgcgaggtgctgggcggggttttgccaatctggctgggcgcgctcctgcagtgcgggatgcagaccgcggaaaacctgctgatcccggtgctgctcaagctctcgggcgcgagcgcctcgcacgcgctggcgcaatacggcctgctgtccgggatggtgctgccgatcctcctgttccccgcggccttccccgcggcggtggggacgctgctgctgccggagatcgcgcgggagagcgcgcggggccgtgcagagcgcgtccgcgcgctgacgcgcaagacgctcgcggcggcgctgtacatggcggtggggttctgcgcgctgttcctggcctttgggcaggagctgatggagctgctctacgacaacgcggccgcgggcgggctgctgacgctgctgacgccgttgctgccgctgctctacgtcgagagcatctgcgactcgatgctcaaggggctgggccgccagggcgcgacgctcgtcatcgagacggtggactccgcgctgcggattctgggcatcctcctgctgctgccgcggctcgggatgatgggctacgtcgtgatcctctacggctcggcggtgctgtgcgcgctgacgcggctcaagctgctgctgcactttgcgggcatggaccggcgcgagctgctgctgctcctctttgagccggtcaccatggcgcgcgggctgctcgcgcagcgccgggcccgcggggcgaaaaagcccccggcgggaagagcactccccgccaggggccagggctccccggtcggaagcggggagcggatgcgccttacttcatgagctcgtagatcgcgcggcagtccgcctcggtcagcggaacaaacttgccggtggtgccgtccggcccgcgcttgaccttggaggcgagcaggtccagctcgttctcgggcacgccgagctccttgagggtcgtgggcatgccgatggagcggaagaagctgcgcagggccgcgatgcccttaagcgcggtctcctccgggtggaagaagtccatctccacgcccatgacctccacggcgaagcggcagaagcgctggacgtcgtgcttgtagacgtaggtcatccacgcggggaagacaacggccagggccgcgccgtgcgtggagtcgtacaggccgctgagctcgtgggcgagctggtggctggcccaatcccccacgcggaagcaggtgaggaagtcgttgtgcgcgacggtggaggcccacatcatctccgcgcgggcggcgtagttggtcgggtcctgcacgcaaacgggcgcctgcttgaggatggtcttgagcacgctctcgcagaggcggtcggtcatgtccacgtcgggctcgttggtgaagtagcgctccatgatgtgggccatgatgtcggttgcgccggccgcggtctggtaggcggggagcgtgtaggtcagctccgggttgtagatggcaaaggccgcgcgcgtcaggtcgcagccgaggccgcgcttgatccagccgtcctcgttggtgatgacggaggagttgctgccctcggagccggcggcggggatggtgaggatcacgcccaggggcagggcggtcttgggcgtcgccttgccgcagtagaagtcccagacgtcgccctcgtagggcacgccgacggccgtggcctttgtggagtcgatggcggagccgccgccgacggccagaaggtagtccaccttcttctcccgcgccagggcgatggcctcgcgcacgagggagaggtgcgggttgggctgcacgccgccgatctcgtagagctcgatccccgcctcgcgcaccgcctgaaccacgcggtcgtacaggccgctcttcttgatggagccgccgccgtactgcaggaggacgcatgtcgcgcccgcctcctttaggatctttcccacctgcagttccgtgtccttgccaaagatgacgcgcgtgggcgcgcaatagatgaagtcctgcatgggtccttatacctcccgattttcttttttgtccgatgtcttagagccggatctccttgccgtcctgcgcagaggaggcgtagaccgccttgagcaggcgcagcacggggatggcggactcgccgtcgatccagaagggcttgttctcctcggcggccttgtagaagtcgcggatgaggatctcgtggctagtgccccaataggccttttcgcccgaggccgcggaccggcagagcgtgcgcgtctccccgtccacggtctcgtagagggtttcggcgtcggtcttgaggatgcccttctcaaagacgagctcgatctcgaccggccggtcgatgccaaaggtcgtcgtgcagtagaagttggccatgaggccgtttgcaaagtggatgaggccgtgggcggtgtcctcgacctcgatgtagtcgtagagcacgtcggtggagaccttgccccgcaccgaaacgggcctgcccgcgaagtacagcagcaggtccagcgtgtggatggactggttgatgagcacgccgccgccctccgtggcgaagcggccgcgccagccgctctccgtgtaatactcgggggtgcggtgccagttgaccgccgcgcgcagggacagcagcttgccgtacgtcccctgctcgacagccgactttatgatctgcgaggcctcgttgtagcggttctggaagacgacgcccaggcggccgtccgcgtgggcgatcatggtctcggcgtccttgacctcgctggcgatgggcttttccgtgagcacgcgcttgcccgcgtccagcagcgcgatggccatgggcgcgtgcaggtagtgcggcgtgcacaggtggacgacctcgatgctcgggtcgcggacgtactcggaccagtccgtggtccaggcgcagtggaaggcctcggccttggccttggcgcggtcctccttgacgtcggcgacggagacgagctccacgttctccatcttggacagggccgtcaggtgcacctgcgagatgccgccgcagccgatgacggcggtgcgaaacttcttcatacagctccccttctctcttggttctgggttttgcttttttatgccccctggcgcgcgccggcggaaaaggcgtacaggccgatgcccgcggcgacggcgaggttcaggctgtcgatcttatcgctgtgggggatgatgacgccgttgccaaagtcctccaggtccttgggcaggcccgcggcctcgttgccgaagacgagggtaaaaggcgcgcccgccgtccgcccctggtctgcgaggggctttgcgttgcgcaggcggaagaggtagtattcccgctcccccgcaaggctccggtactcgtcaaagctctccagccgcacgaggttcaggtggaaggccgcgcccatggaggcgcgcagcacccgcgggtcaaacgggtccacgcccggccggatgatggccacgtcccggaagccaaagcccagggcgctgcgcaggatcgtgccgacgttgcccacgtccgaggggttgtgcagcacgacgtggctgcgcagggggtccaggcggcaggcgtacttgccaaggaccgtcacgcaccaggcgttctccttgccggagatgcgctcgacggcgcgcggggcctcctcgaccgggatgcgccgcgcgcggcaggcctcgatgagctttgcgaccccggcgttgcggtagcccgcggggtcgaccagcaggcagcgcacgctctcgggccgggacttgagcagctccatggagggaaagacccccagggcgtaggtgtggtcgtcgttcttgtcgtaagggccgtacttgggcatgacttcctcccgaaacagtgaattttagatctgggccaagagccccttgagggcgtttgcggcggcggcgaacttgtccgcgccggtgccggggacgaagtccccgccggacaggtgcggctcgatggaggcaaagccgcggtagtccatcttcttgagctcgccgaggatccagggcagctcgccgtcgcccaggcccgccgggcggtgcgcgtcggtgacggtgtcaaagcccttgtcggccacggccgccttgcccgtgtagacggagtccttgacgtgcagatagcgcacgtagggccgcagcatctcgaacgcctcgcggttcttcacgccgcactgcacgaagttggaggggtcgtacgtcgccaggatctccccgtggaaggccttgaggatctccaggcagcgctcgggcacgtcgccgtagatgtgcttctcgttctcgtgcaggagctggacgccgctgccgcgcgcggcctccaccaggcggcccaggcgctccaggacctcgtcgcggaaggtctccgccggctcgcactccggcaggaagaaggagaagatgcggatgtattgggtctgcatggcgtgcgccacgtccagaaggttccggaacgaatccaggtgcggcaggaagggatcgcggatgctgatcttgccgatgggcgagcccagggcggagacgccaaagccccgcgcctgcatgcgggcaaagacggccttggcctcggcgggcgcatagtccgcgatgttcttgccgtcgatgccgcgggtttcgatgtagtggatgtccagcttctccatgacgtccatctggacgtccagggcggcgtcgatctcgtcgccaaagccggtgaggatgaattccgccatgcctagccctccttcatttccatcatgaagcggaaggtgatgtcgtcaaagtccggcaggccctcgtggccgaagtccggatagaggacgtgctccttctgcccggggatgcggttataggccgcgtactgcgtggacggcgggcagacctcgtccaggagcccggtggccatgagcaccttgccgcggatgcgcggggcgaggttgctcacgtcgatgtagccgagcttgtcaaagatcgcgtcctcccgctcgtgccggggatcgtggcggcggaagaagtcgcgcagctccgcgtaggcgcgctggtccaggtccatgtcccacacgcgcttgtagtccgacaggaaggggtagaccggggccaggcggttgatgcgcggctccagcgcggcgcaggcgagcgtgagcccgccgccctgggacccgcccatggcgcccacgcgctccgcgtcgacgtacggcaggcccatgacgatgcgggccagcgccgccgtgtccaggaacacgccgcggaagtggagctgatccggatcggggtcgtccaggccgcggatgatgaggccgtcctttgtggggccgcggtaggcggtcaggtcctccgaggtgccgccctggccgcggcagtccagcgccgcgacgcagaagcccgcaagcacatacccgagcttgcccgtccagtcccccgcgctgccggagtagccgtggaactgcaggaccgcggggaccttgcccgcaacgcccgcgggctttaggaacttggcgtgcacgcgcgagccgcccacgcccgtgaagtagaggtcaaagcactccgcgcccggcgcctggaaggccgcgggcacaaactcgacctgcaggttctgcgcgtccagcgcggcaagcgcgcgcgcccagtattcgtcaaagtcgcggggtctcgggctggagcccatgtacgcctccagctcccggaccggcatatccacaatgggcatggaaaacaccctcctgtctctcttttttaaaggcgcgcgcccagggcgtccagcgcggcgcggacctctgcatagggcagggcgcgcggcgcgacggacagggcgcaggcccgggccgcggcggcgcccgccgcctggccgatggccatcatgttgcccatgctcttgcccgcggcaaggcccatgtgcgtgtaggacccgcaccggccggcgacgagtagcccctcgagcccctgcgccagcagcgcgcggtagggaaagtcatagcccgactgcatggtcggccgctcgccctcgccgtcggccaggccggcctggtccaccgcgccgtatctgcgggccaccacgtccgggaagcgggcgcagttctttgcgtcctcgagggtcacgacgtagtcgcagagcacgcgccgcgtctcccgcacgccgatggccgcgcccgtctccaggagcgagcagtgggcaaggccggggatgggcagcgcccgcgcgagcttgacaaagtccagcgcgatgcgcaatcctgcgcgctgggcaaaggtgcggtccgcggggtccagggcgttgaggcgcccgtccggcccctcgacgccgccgttgttgacggagacgaccccggggatggtcgtgcggtcaaaggagaaccagccggacatgttcaggcccatctcgcgtcccttccggatggccgcggacaggctctgctccgtgttcttctggtcgtagaaggcaaagagcgcctcctcgtccacgttgcccagggcaaagcccagggtgatgggcatggtgcgcccgtcgcccgggcggccgacctcgacctttgcgccggcgtggtagctgagcgcgccgtcgcccgtgcagtcgatgaagacgcgggcggtgaagcgctgcggctcccccagggtggcgacgatcgcctcgcgcacgcagccgccctcggtccgcgcgccgacgacgggcgagtcgaggcggtaggcgcagccggcctcctccagcagggagaacatggcctccttcaggtagtcggggtggacgtgcaggccgtcgccgtcggtccaggtgacctttccctcgcggcaggcgtccgggccgaaggactccaggcggcgcacgagcttttcatgcacgccgccgcgcgagccgccctccttcttcaggcggttgatgggcatccacagggaggtcgcggcgatcccgccgggaaagccgcgcgcctccacgagcagcgtgcgcgcgcccagggtcgaggcggccagcgccgcgccgaaccccgcggggcccgcgcccgcgacgaatacgtcgtagtccccgcccccgcgcgggagcaggctgtcgatctgcgctctttggagcatggtcctttccttccccgcctcagcgatcgaaggtccaggtgcgggtccactcctgctcctcgccgggcgcgacgtcgagctgcacgaacacctcgcagcacatgcagtgctccacgccccagaccacagcgcgcgcgggggtgaagctgtcctcctccgttacggagagggtggagttgtcgctggtcatgcggaaggagaagggcgcaaagtcctccttcggggtgtccaggaaggtcatgtaggggccctccgggttgcggtgcaggcgcagctcctgcttctcgtcgctgccgtagaggttatcgcccatgaagcggccgccggcgaggttggcaaagccgggcacgtgcagggcgtaagccggcgtcacgggctccccgcccagggagaggaagttgtggttgtactcctgcgcgacgatggcgcgcttgcccaggttgcagagcttggtgcggatctgcacctggttgccctggacgcggacccatctctcctcccgcgcggcaaagccctggcacagggcgatgtccgtggtgaagtggatctcgtcctttgccacgtcccaaatcgtggggaaggggcggcagggctcgttgaccatgaagttgaactccggccgggtcttggtcaggtagccgttgcccaggcgcggatactcctcgccaaggttcgccgaggccagggcctccgggtgctggtactcggagcacaggcccgcgccgtagctggtagtgcggttcgggtcgcgctgctcgggctcggcaaactcgatctcgccgtcgagcgtgatgcggttgacaaagccgttccagttgaagcgggttctgccgtagatctcgctgccggggcgcacgacctgcaggcgcaggcggtcggattcgatggtccagatgtcgttcatggaagttcttcccccttttgcctattttcgcgttctgatgaaagcggttacaatccatccctattgtagcacaagcccgggggaatggaaagatcgcccgcgcggtttttgccctctttttctttttcggcccccgggcgttgacgcgggcgcgcaaatatggaataatagggacgaacctcggcatcattccgcattatttcatcttttttcccgtaaaggaggccatcatgtctttcattctcttcaccgactccaactctgacattccctttggggaggttgccgcgcacgatctaaagatcatctacatgccctattccctggacggcagcgacgaggtctcggacctcggccgcggggacgtcatcccgaacttctacgcggccatgcgcgccggcaagacgcccacgacctcgctgctgaccaaggagaagtacatcgaatccttcgagccctacctccaggcggggcaggacatcctcttcatctgcttctcctccgagctctcgggcacctacaacaacgcggtgctggcccagcaggagctcagcgccgcctaccccgagcgcaagctcgtggtcgtcaactcgcgcaacgtctccatgggcgaggcgtatttggccatggaggccgcaaagctgcgcgactccggcgcgacgctggaggaaaccgcgcagtgggtggaggcgcacaagtacaacgtgcgctactggttcacggtggacgacctggtctacctcaagcgcggcggccgcatctccaagaccaccgcggcggtgggcacgctgctgaacatcaagcccatgctcaccgtgacgcgctccggaaagctgatctccgtggacaagcagaagggccgccgccgcgcggtgcaccagctcgcgctgaacctgcaaaaggagatcgtcgacccgcagaaccaggtcatctccatcctgcaggccgactgcatggacgacgcccgcgcgctgcaggcgcagatccaggagctcgtgcccggagcaacctgccggatcgagatggtgggcccgaccatctgcgcgcacgcggggccggggacgctggccgtggtgttcctgggcgcggagcgcgagcgcgagtaagccggcggcggtctactacatcgcaagctgcctgttcaccgcgcagttcccgcggacgagcctgcggattcaggactacatgcgcgcaaagccgggcgtgcaggtcctgcgctgctgcatcccgaactatcgggtggcgttccacgaaaaccgcatcgcggacggctgcgtccgggacgcgtggaagcagctcccggtatccaaggtctttgggtccggggattccgtcatctccctctgccccaactgcctgaacatcgtcgaggcatggcgggcgcgatggcgcgctccctgtgggaggtcatcgaccaggacggctctctcgccttccccgactaccgcgggatgcgcgtgacccttcaggactgctggcggacgcgggactgccgcgccgagcaggacgccgtgcgcagccggccaagaacgccaagctcgcccccaagcactacgtcgagcaggcccagggcctctttcagccccactcgccggaagagcaggccgcccgcatgcgcgagcactgccggcagtattcggcggaccccgtggtctgctactgccattcctgcctggaggggctgctccagggcggcgcggatgggcgccacctggccagcctgctgttcccgggccagccctaaggaggcaagattctcatgcgtcaggaaatccgcgtggaggcctgcaccggggccgccatcgacgtccgcgccgggcagacgctgaccgtcgtggacctgtgcggcggccaggtgggcgattttttcgcgcaggccgcggggaacccgggggagttcctctccccgggcgtgaccatcgactgcaacgaatccctcgccctgcgcgtgggcgacacgatctacaccaacctctaccgccccatgtttctcctgctgcgggacgacgcggggcagaacgacctgatccatccctcctgccggaaggagatgttcgacttcttctaccacgacggcgaggggcatcccaactgcctggacaacctcaacggcgcgctggggacgcaccacccgatcctgcagccggtgaacctgttcatgaacacgcgcatcctgcccgacggccgcatccgcgtcgaggcgcccgcctccaaggcgggggactgcatcgtgctgcgggcgctgatggacgcgcgcgtgggccttgccgcgtgcagcgtgtccgagagcgcgtgtaacgccgggcgctgcacgcccctggccatgatcctggaagacgcgtaaaactgcgcgccgcggagcgcaaagcggcccgcaggacggttttcgtcctgcgggccgcatcttttcggaccggatgagcatgtctgtaagccgagttctgtcttgggtgaccatctatctagtctgcccgttgccggacagctccagcgattacccgggaacgtgacgggccgccacatgtgttccacaatcaatcttgcatcgggtggggtttacatagccggcaagtcgccaagccgctggtgagctcttacctcgcctttccatccttgcgggcgcgcatggcgcgccttcgcggtatctctctgttgcactatccctggagtcgcctccgccggacgttatccggcacccttgccctgcgatgctcggactttcctcacacgtttctctcgtgcgcgatcacccggcatactcatccttccgaaaaaagggaaaaacgcgatttattccgcctcctgcgccgcatccgggatgtagaggatgcgcccgcagttttcgcactcgacgatctcgtcgctgccctggagctgcttggccacggccgaggggagcgacatgttgcaccccgagcactggtcgttgcgcaggctcgccaggaccgggaagcgctggctgcggatggctttgtaccgctccatataggcctcgtcgatgccctgggcggcgtcggcgcgctcctgcttgagctcctccaggcgcgcggtctgcttctcgaactccttgtcgtagcccgccttcaggcgcgtgtactcgtcgcgggccttggcggccttggtgcgcacttccttgtagcggttctccatcatctgggagtggctgaccatcttgctgagctccttctcggcgctcttgagcttgccctcggcgtcggccatctgggcgatggcgcggtgcacctgcgcggcggtctcaaaggcgttgtccgcaaggctcttcttgatctcctccagcgccgcttcggccttgtcgcgctgggcggtgagctcctccaggcgagccagggccttgttggcgtcgttctccatgccgcgcacgaccgtctgctggtccgcgacgatgttgcgcagcttcaggagctgctggcgcagcgggaactgacggatctccgtttcgtagtccgccaccttcttgtccgccgcctgatatttccacaacctgtccagttgacgcatggactcgcctccgttcctgatttcgcccgggacacaacccgacattgtattataccgcaaattcccccgtctgtaaagggcacgcgctatttttcctcctcccgggaggcgcggcgcagcaggcgcgggccgagcagcagcgcccccagcaggaacgccaccgccagcaccagcgccagccggtaccgcccaaaccacccggcgatcacggacaggttcttgccggccgcgcgcccgaggaagaagaagatcgcgttgtgcacgacggtggtcagcacgatcatgaacgtgcacttcctgcggtcgtagcccagcgcgccgctgagcacgagcatgggcacgttcatgccggtgacgaactttgccgcgaagatcgtcaccgcgccgtagctgcccagccaccgggtgacgctggtctgcgcccgctccgggaagagccgctgcaccgggcccgcccggagcacgcgcgcgccgaagcgccggcccacctcaaacgcgcccaggctgcccagggtcgtgcccgcccaataggaggcgagcatgggcgccgcgcgggagatcggctccgcctgcttgaaccccccgcccaggaagagcagaatgtcccccgggaagggcggcaccaggatctgcaaaaagccgaacagcgcgtacagcgcgcaaagcgtcccttggctgagctgtcggaagctcgcgaccaggctctgcgcccactccatgattcccatccctcacctttcgtagacgatctttcccgcgaccagggtcatgcgcacctcccccgccgcatccagcaggcacaggtccgcgcgcaggcccgggcggatgcgcccgcggtccgcaaggcccagcgcatcggcgacgtttgccgaggccatggccgcggcctgctcgagcgagatgcccgcaaagcgcatggcgttgcgcacgccgcgctcgagcgtgagcgtcgagcccgccaggttcccggccgcaaggcgcgccgcgcccccgcgcacgaagaccttctgcccgcccaggtcgtagtcgccgtcgggcatgtccgcggcctccatggcgtcggtgatgagcagcacgcggctgcacgcgcgcacggcgagcttgaccgccgccgggtgcaggtggatgccgtcggcgatgacctggctggagaggccctccagcgtcagcgccgcgccgaccgcgccgggcgcgcggtggtgcagcgggctcatgcagttgtacaggtgcgtcatctgcgtaaggccgctctccatcgcctcgcggatctgctcgtatttgccgtccgtgtggccggcgctgaccgcgacgccgcgcgcggcgagcgcggcgatcaggtcccgcgcgccggggttttccggggccagggtgagcaggcgcacaacgtcctgcgcgccctcggtcaggcgggcgtagttctcccacgtgggcgcgaggtttgcgccggccttctgcgcgccggggtaggccgccccgaggaacgggccctccatgtgcgcgcccgcgatgtccgcgccgggcgcgccggcctgcatggccgcctttacgccccgcagcgccgcgttcgtctcctccgggccggcgttcatggtggtgggcaggaacgtggtcacgccgtggcgcgccagggcgcgggacatctccagcacgtcgtgcgcgccgcgcatggtgtcgtgcccggcgatgccgtggatgtgctcgtcgaggaagccgggcacaaggtcgccgcagacgcgcagcacgtcgccctccaggccctcgccgaccgcggaaatgcggccgtcccggatctggacgtccgcatccaagaagctcccctcgcgcagcacgcgcgcgccgcgcaggaccaaggtttcgctcttcataacgtatcctccttatgcgtaggcgatggagaagatctccagcgcgtggaccttttcatccaccgtgtaggcagagccggagggatagacgccggcctcgtccgcggcgacctgcaggatggcctgcaggttgtccacggcgtcccggcactgcgcaagcgtggcgaactggacgctgagcgccgtatccccgcgggagagggcctcggccagccagccggccagcagggccttgccgtcctctccctccgggacaaaggtgcccgcctgcacgcagtagttccagtccagcgtcgcaaagtccggcatgcccgcaaggccgaagtccggcgagggctcgtggctcccgttcatcagggcggcgtcgaggttgaaataggcgtgggagagcgtctcccgctccccgaccgggtcgtcccaggtggcgtccaggagcacccagtccccctcgatgcacacgccgttccacgcgtgggactcggttccgctctcgctggtcgcctcgccgaagaggtagatgcacgggatgcccaggcgccggagcgccaacatcatggcgttcgcatagccctggcaccgcgcgcggccgagcacccacgcgccgtaggccgagcccgtgtggtcggacgcgctgtcgtacgtgcagccgttcaccagcgcgtcgtggacgcagagctcggtttcgtagtcgctcatgccctgggtctcctgctccaggcgcgaaaggacttcctcgagcgcctggtcggcctgggccttttcctccggggtgagcacgtaggtcacggccacctccaggatcacgtccggcgcggactgcacaaaggtataggaagaaaggtgggaaaagtggatcagctccgggcagtcgacgtagagcagctcgtccacggcctcgacctgctcgcgggtcgtgccctgcggcagctcgatgcgctccgcgaagttcgtcacgccctcgtagaccagccagaacagggactggatctcctcgctctgctgggcgacgtagtagtgcatgtccgcctgtgcggtctgcacggcctgcgcccccggcgtggcctcgggcgcggtggtctgctccggctccgcctcgccgccgccccccgcgccgtgcgcctggcgggtgatgacgaaggtctccccgttctccaggcgcacggtgcggcacgcgcacagcgtcagcgcaaggagcagggccagcgccccgcacagcagccgtcttgcctttcccatgttccgcctcccttgtctctctccgatctacggttccaaaggggatgcttccaaaatcccccgctctattggaacgagccgggcgcgccttcggttcctgcgatgcgcgcctccggaaagcgggaaaagggcggaacctcgggcggcgggcaggaaaagtgcatggcctctttttttgtcgggtgcacgaggtccagcgcgcagccccagagggcgatctgctcgccgggcctgcccccgccgtagcgcgcgtcgccccacaggggccagccgccgtgcgagaactggacgcggatctggtgggagcgcccggtctgcaggtggatttcgcacagggcgagccccgcccgccgggccaggacgcgataggtcaggcgcgcctctttcgcgccgggcgtgccctcggggaccgcgcgggaggtattggtccgctcgtccttgaggaggaagtcgcgcagcgcccccgagcccggcgggtccccgcgcacgacggcgaggtaggtccggcccatctggcgcgtgcgcacctgatcggtcaggcgcgcagcggccttggaggtgcgcgcaaagaccatcgcgccgcccacgggccggtcgagccggtgcacaaggccgaggtagacctcgccgggcttgccgtacttgcgcttgagatacgccttgagcgcggtgagcaggtcctcgtcccccgaggcgtcggcctgcacggggacgttttgcggcttgcacacgacgagcaggtggttgtcctcgtagaggacgcaggcggcaacctgggcctcggtcatcgcgcctcccaccttccggaggcgccgcagggcagaacgacaccgccccgggtcacgggcaggccgacctcgtccgcctcggcgcggccgccgcgcgcgcgcacgaccgtcttttgcagcaggttgcgcagcaccgcgggctgcaggcccgtcgtgtagccgttgatgaggaagaagagcggctccgggctcaggagcttggcgcactcggccaccagggaatagacctcgttctccagcttccagacctggccgtccggcccgcggccgtaggagggcgggtccatgaggatgccctcgtaggtgcggccgcgccgctgctcgcgcaggacgaacttgagcgcgtcgtccacgatgtagcgcgcgggcttgctgcccaggcccgagagctgggcgttctccttggcccactggaccatgcccttggccgcgtccacgtggcagacctcggccccggcggccaggcacgcggccgtggccccgcccgtgtaggcgaagaggttgagcacgcgcaccggccgcccggcccccgcgatgaggccgcgcatccagtcccagttgacggcctgctccgggaagaggcccgtgtgcttaaagcccgtgggccgcacgcggaacgtcaggtcccgatagcggatggtccactgctcggggaagtcgcgcatgcgctcccacgcgccgccgccctgggcgctgcggtggtagtgcgcgtcggccttcttccagagcgccgcgtcctccgcaggccagatgacctgcgggtccggccggcgcagcaggatcttgccccagcgctcgagcttttcgccctcgcccgtgtccaggacctcgtagtcctcccagccgtctgcgatgtacatggttcgtcctcccttcgtgttgtggatctgtaaaggggcgaaaagggcggcgggcgcgcggcccgccgacccctctatgcttcttcgcccgcaaaggcgtactccgcgatctccccctgccggacaaaccccgcgcccgcatagctgcggttggaggcggggttgcgcgcgtccgtgtagagcatgggcgtccatccctgctctaggcactcccggctgatctcgcgcacgagcatccgggcgtagccgcggcagcggtgcgcgcgggcggtgacgaccgcgttgatgcgcgcgaagcgcccggccgggcacgagccgcggtgcgcgacgcgggccagggccacaacctccccttccacctcccagaggaagcagtccgggtccgcctcccgctgcgcggcccagcgcagggcctcctcgcgcgggagcgcctggccctcgccgtcctcggcaaagacctgcgcaaggtccgcaatggcctgcgcgcatcccgcgcggggccgcgtcagccttccgacgcgcggcccctcctggatgcgcgggcaggtgtaggcgatcaagggcatgtgcacgcgcagctgcgcgccggccgcgcgcgccgcatccgccagcagggcgcccgcccgatccgcctgcgcgttgacgtgcaggccgctctcctcccgcaggcgctcgagcagcaggccgcgcagctcgcgcgcgaggtccccctccggcgcctttgccaggtagatccagagcgggaacccgggcccggactgcgcgagcaggcaggtccggccgtccgtctgcatccgcgcgcccgggcagtcccgaaggagcaggagcaggttgaacatcgcccagtccgcctcccgcagcatgccaaaggccggatctgccgcggagatgtcgcgcaggatcatgcctcggccttttccggggcgagggtcgccttctctacggcgagggtcgccttttcgccgttgaggtcccacgccttggcgtaagcgccctccggcgcgtcggcgacgagcgccgcgacggcgagcacgccctcgcagagcgccccggcgctcgcggaaacgacgttctcgatcaccgggctccccttggcgtagacgcggatgcggtcggtgacctcaaagccggcctccttgcgcatggtctgcaccttggagatgacctcgcgcaagtagccctcctgccgcagctcgtccgtgaggttggcgtcgagcacgacggtgaaatcgccctcgctctgggcgacgtagccgggcttctgcgcaggcgcgatgagcatgtcctcccgcgccagggacacgtgcgtgccctccaggtcgaactcgtagttctttccctcgtccaggacgtcgacgaccgcgttgccgtcggccgcggccaggtgctggccgatcttgcccagcagcttgccgtagcgcgggccgagggtgcgcatctgcggcttgatctggtaggtggtgaagtgacgcgcgtccgtgacgaagcggatggacttgacgttcagctcgtccgcgacaagggccgccatctcctccggcagggaggcctcgctcttgacgtacatggcggcaaggggctggcggatcttgaggtttgcggcgttgcgcgcggcgcggccgaggttgacggccttgagcacgagctccatctcgtcctccagcgcgctgtcgatgaggctctcgtccgccgcggggaaggcgcacaggtgcacggactccggctggctctcgtccaccttgcgcacgaggttctggtagatggactccgcaaggaagggcgtaaagggcgcggtgagcttggccagggtcacaaggaccgtgtagagcgtctggtaggcggcgagcttgtcctccgtcatgccgctgccccagtagcggtcgcggccgcggcgcacgtaccagttggagagctcgtccacaaagtcggacagggcgcgggccgcctcggtgatcttgtaggaatccaggtcctcgtccacggtcttgacgagcgtgttgagcttggagaggacccagcggtccatgaccgtgcgcggcgcagcctggggatagttcttggggtcgaagttgtcgatgttggcgtagagcacgaagaaggcgtaggtgttccagagcgtgcccatgtacttgcgctgcagctcgctgaccgcctcgtgggagaagcgggagggcagccacggcgcggccgaggcgtagaagtaccagcgcacggcgtccgcgccctgcttgtccagcacgtcccagggcgagatgacgttgcccaggtgcttgctcatcttgatgccgttcttgtcctgcacaaggcccagcaccacgcagttctcaaacgggttgcggtcaaagagcagggtggagatggccagcagcgtgtagaaccagccgcgggtctgatccacggcctcggagatgaactgggccgggaagttcttctcgaagatctccttgttctcaaaggggtagtgccactgcgcaaagggcatggagccgctgtcgtaccagcagtcgatgacctcgggcacgcggtgcatgacgccgccgcacttctcgcacttgagggtgatcttgtccacatagggcttgtgcagctcgatgtcctcgggcacgttgtcgccccgttcgcgcagctccgccttggagccgatgacgtgcgtgtggccgcagtcgtcgcagacccagaccggcagcggcgtgccccagtagcgctcgcgcgagaggccccagtcgatgacgttctccaggaagttgcccatgcggccttcctggatgttgtccgggaaccaattgacgcggcggttgttctccacgagcttgtcgcgcacggcggtcatcttgatgaaccaggaggcgcgggcgtagtagagcaggggcgtgtcgcaccgccagcagaaggggtaggagtgcgtgtacggcgcggcggcaaagagcttgccgctggccttgaggtcctcgatgatgaggggatcggcgtcttttacgaacatcccggcccagggggtcaccgcgtcgacaaagcggccctgggtgttgaccagctgcacaaagggcaggccgttctcgcggcccacgcgcgcgtcgtcctcgccgaaggccggcgcggtgtggacgatgcccgtgccgtcggtgagggtgacgtagtcgtccgccacgacgtaccagccgcgctcgcgggtcttgccggcaaagggatagagcggctcgtactccgtgccgatgagctcggcgcccttgacggtccgcagcaccttcgccccctcgcccaggaccttctcgcacagggccttggccaggatgtaggtctcgccgtccttttcggcgtagacgtagtcctcgtgctcgtttacgaccagcgcgacgttggagggcagggtccagggcgtggtggtccaggccagaaggaaggtgttctcctgaccgcggacgcggaacttgacgtagacgctcgtctcggttacgtccttatagccctgggcgacctcgtgggaggacagcgccgtgccgcagcgcgggcagtagggcacgaccttgtggcccttgtagagcaggcccttgtccgcgatggtcttcagcgaccaccagacggactcgatatagttgtcgtcgtaggtgacgtagggatgctgcatgtccgcccagtagccgacgcggtcgctcatctgctcccactcggtcttgtacttccagacggattccttgcacttcttgatgaagggctcgatgccgtattgctcgatctggggcttgccgttgatgcccagggccttttcgacctccagctccacgggcaggccgtgggtgtcccagccggccttgcggaagacctggtagcccttcatggtcttgtagcgcgggatcaggtccttgatggcgcgcgtctccacgtggccgatgtggggccggccgttggccgtgggcgggccgtcgaagaacgtgaagaccggcgcgccctcgcgctcggtgaacgtcttttccacgatgccgtgcgcgcgccagaactccaggatctccttctcgcgctcgacgaagttcaaagacgtggataccttgtcgtacatgagcgtcattcctccttgcgtcataaaaaaagagaaactccgccccgaatttcttcgggacggagtcattttccgcgttaccacccgagttggcgaggaaacccccgcccgctctgtccggcacaaaccatgccgcttccctgtatcgggagaagcccgccctgccctacaatatcgggaagggtgctccgaggcgatggcgaagggctccgcgcgccgcggggctttcaccctcccccgctcgcttttgcgcgcccatggagtcccgcgcgccctcttcatcgcaatttcctgtattatagcggagtttttcccgcttgtaaagtgcaaatgcgtaaaatctagcgcccgtcagcactcgccgatggaggcgtggccctccgggatctcggccaggagcgccgcctgcgcggccccgtcctgcgcgggctccaggatgtagatctcctgcccccagtgggcgctgcacagcgcgccgccgaacgtggcggtgaagaacggggtcggcccgtcctccccgcccggcgcagccaggatggcctcgagcgccgcctcccccgcgcacccgcgaaagatgcgcccgtgcggccaggaaggcgcgctctcctccggcaaaaggctcccggcaagggcgcacgccgcttcctcctcccgccagcactggagctcgatcgcgtcgccgggccgtgcaaagaggcggaccagccgcacccaccagtcgcgggacggctcgtcagggtagaggaactggatggcgatcacgtcactcgtcctttccagcgatgtccaggcgctcgacgagcagggagggcgtgccaaaggcggacgcgcccggcacgccgaacttcaggtccttgcccacggcctggacgctctcgagcatccggtagaagttgccggagaccgtgatctgcgtcacgggctcggcgagcttgccgccgcggatgcgcacgccctttgccgacagggagaagtcgccggagatggggttggcgcccgcgtgcgcgccctggagctcgtcgatgcgcacgccgtcgccggccttggcatagagctcctccggcgcaaagccgccgggggcgatgtagaagttcgtgggcgcggtgccgaccgtggagaggtgggacgggcgcgaggcgttgccggtggaggtcttgcccgccttgtgcgcggtcttgaggttgtacaggagcgtggtgagcacgccgtcctggatcacggccttcttctgcgtgggcacgccctcgccgtcaaacggccggccggcaaggcccaggccatcggagggatcgtcccagatcgtgacgcagggcgcggcgatcttctccccctccttgcccgcaaggagcgagaacccgcgctggcactcctccgcggagaacacctccgcaaaggtggagagcagcgtgcgcgcggcctcgggcgagaagacgacgggcatggcgcccgagggcatggacgcggagccgacgtccgcggcggccatctggacggcctcgcgcgcgatgaccacggggtccaggtcctcgaacttccgggaaaagcggtaggcgacctcttcgtactgccggtccccgtcggcgagcaccgcgtccgccacggcgtaggccgcgccgcgggcaaactcgcggcgcaggccctcggtgttgagcagcaggcacgcggaggtcgtcgtccccacctcgcaggtggtgccgctggcgatgcgcgggtcctccgccttgcacaggcgctccatctccagggccagggcgatcttgcgctccggggagacggcaaggaggctctcgtccacggcgctcacccaggcgagcttctcgtccccgtcgtagaggaactgctcgtcctgggactcgagcagcgcggcgttctccgccgcggcgcgcacgagctccgcataggccgcctcgccctcggcctcggtcgcggcgtagcccatctggccgccgagcaggccgcgcagggcgacgccggagcggcgctccacgcgcaggtcctcggccttgcccttgtgggcgctgacggagaaggcctccgacgtgcagacatagacctccgcgcgcgaaaagcccgcggccttggccatttccagaatcggttcatactttgcatagtccgccatggtgcttaccccctctcccgtccgccgacggtgatgctggaaacgcggatgcgcggctggcccacgtccacgggcacgccgccggagagcgaaccgcacaccccctgcgcgcgggccaggttcttgcccacgcggtcgatgtggaacaggatctccgagcccttgccgatgaggctggcgccgcgcacgggctcgacgatcttgccgtcccgcacgaggtacccctcggccacggtgaagttgaactcgccggtgacggggttgacggagccgccgcccatcttggcggcgtagaggccgtcgcccatggtggcgatcatctcgtccccgtcgtcctctcccgcgcagatgaaggtattggtcatgcgggaggtcggggcgaaggtgtagtcctgccggcgggcggagccggtcctgggcatgcccatgcggcgggagccgagccggtcgaccaggtagcccttgagcacgccgttctcgatgagcacattgcgctgggcgggcatgccctcgtcgtcgaggttcaggctgccccaggcgttggggatggtgccgtcgtccacggcgttcacgcagtcggccgcgatcttctggccgagcttgccgcagaacacggagctgtccaggcccacgctcgtggcctccagggagtgcccgcaggcctcgtggaagatgacgccgccaaagccgttctcgatgaccacgggcatggcgccggccgggcagggccgggcgtggagcatggtcagggcggactttgcggccttgcggccgaggtaggcgacgtccagcccctccaggaactcaaagccggcctgcgcgccggggctctcggttccgtattggttctccgtctcggacgaggcgaccgccgtgcagaccaggcgcgtgtgcgcgcgctcgtcctgcacgagcaggccctcggtgttggcgatgagcacgcgctggtattcgtcggtgatgccggcgctgacctggcggatttccggggaaagggcgcgcgcggcggcgtccgcgctgcgcaggagctctgcgcgccgcttgccgg

SEQ ID NO: 1613 - DNA, 1795 bp, Unknown
  16S sequences of unknown bacteria
cgcgaagcgactgcgttcatgagcaagtagcgaagctaggccctgtcagcagagctgcagggatggattgcgaatgtccgctttaccgcagccgggaaaacggccgcccgccggtacagacattgacccgcaaaacagacaaaagccctccggatggacatatcctgtctcatccggagggccttttttacatttttgagcgcttgtgcatcgctttcatctgatacatctgaagatccgccatatccttgaccttattgatatcatctccgacccgaaagactgcagagccaaaggaaacctccggcaaaacagcaagcgtttttcttcttttttccagctccttttgcagccttttctcacaggcctctgtatccgcatcgctgttgagcaggacaaaaaattcatcgccgccaatccggtagcacagcccgtcattgaaataagcattccgaatactgtctgcgacctcgaccaggcactgatctcccttcaaatgcccgtactgatcgttgatatccttaaaatcatcaagatcaaacaccatcaatatcgcatcctgattgaacgatgcggttttgttcagatagctgctctgattcaaaagcccggtcagcccatccagctcctgccacataatattacagtatacgtaataaaggatggacagaagcgtgacacaaagccatgtcacgtgtatctgagggcagatcacctgtatcgttgagcctatgctcagaaaaacagcaatcagataaatgcagtttttgctcttattctgatattttctgatcgttctagccgttatgacaagcagataaacgatgctcatgaaataagcggcaagatagatccagaacgcatcgccgcgcatgtaatgattgttccggtcaacggaaaaaacacctccgaacagaagcgatataccgagcactgccagatataccagctctgcggcagccattattttctgtgaccggtttttcccaagtgtaaaagaaagcacaatggaaaccgccggtgtcagtccgaacccgagatagtttgcgagaatgttcagccagcgaagcgatgccggtccatcatccaccacaatcgtcagaagctccagtatcgaaatcagaataatcagcaaaaatgcactgataaaccagaacctgagccttttccgtagtattccgttataccttacaaacacgcacatgatgctaagcgtaaaaatatctataattgtaataatcaaaaagtaatagtccattggccgcctcacattcttgccgtccctggtctgtgtcaggaagcatgcctgttgtatcattttatgaattatcggccgcatccgctgtgttctccggatgctcctttgcttttaccgtatctgcctcgtatcgctgcagatcctcttcgtagctgctgtatgcacggtcccctctgtgatccggcaatgcatagtccttcgccagccatgcacctagatccgccgtaagcttcccggcaccttctgtattcagatgcgtctgatcccggaaatctgttgcaaaatcgatcagctccggctcctccttctgataaaaccgaaacggaatcccgcgctccctggcccagtcctccagcgtcagattcatgccctgacgtttcagataacggtctatgtccgcttccgagccgtacggaatcgccagcagtaccaattctgtatcattttcctcacaaagcttccacagcttttccagatattccagactgagctttggcaaatcagacgcttcctccggaagccccggatcctccacct

SEQ ID NO: 1614 - DNA, 1981 bp, Unknown
  16S sequences of unknown bacteria
catatttgagatgaattttcttctttttttgttacctatctattgtaccataacaaattgaaagagaacagcgcataaattaaaccgattctcacttctgggaaaagcctcaagattcgacagccgcagcacagatttactcttgttattgcggagataatttgatataatatatgtgacagataatattgcactatagggagtgtgtctgatgattaatgaaaaatatcaattgtggtgcgaaaaggcaacagccgaccccgagcttataacagagcttaaagcaattgcgggggacgaggctgcaatatctgacgcattttataaggatcttgaattcggaacgggcggtcttcgcggcgttataggtgccggaaccaaccgaatgaatgtttatacggtgggaaaggcttcccaaggtcttgcttcatatgtaaattccgtgaacagtaacggaaagatcgccatagcatacgacagccgaataaagagcgagctttttgcccgcactgcggcggctgttttcgcggctaacggcattaaggtttatatttataaggagcttatgccgactccgatgctgtcgtacgcggtaaggcatctgcactgcgacgcgggcgtggtggttaccgcaagccacaatcctgcgaaatataacggatacaaggcatacggctctgacggctgccagctggggcttgaggctgcggactatgtgctctcgataatgaacggcgttgatgttttcaatgatgttaaaaccgttgattttgataaggcagttaaaagcggagagatcgaatttatcggcgatgaggttatagaaggctatcttgactgcgtgcttgcctgccgcgtcgcgcccgaggctgatgtcagatctctcaatgttatttatacgcctctgcacggcagcggcaataagccggtgagaaagattcttgaaaagatcggcgttaaaaaggttacggtagtgcccgagcaggaaaaaccgaacggaaatttcccgactgcgccgtatccgaatcccgaaatcaggcaagcgtttgaatgcgccttgaagctggcggataccgtaaagcccgatctgctgcttgcaaccgatcccgattgcgaccgtgtaggcattgcggtcaatacaggcagcgattataaattgctttcaggaaacgatgtaggcgcgttgctgcttgattttgtgcttgcaaggcgcagtgaaagcggcacgcttccgaaaaatccgattgcggtaaaaacaattgttacaaccgaaatatgcagaaaaatcgccgctgattacggctgcgagctgcgcgaggtgcttacgggctttaagtttatcggcgagcagattacacagcttgaggaaaagggcgaggaaaaccgctttgtgttcggctttgaggagagctacggctacctcggcggcacatacgtgcgtgataaggacgcggttatagcctcaatgcttatatgcgagatggtggcatattataaggaaaagggtatgcttcttaccgatgttttagaggagctttataaaaagtacggctattatttctgctcgcagaaaagctttacctgcgaaggcgaaagcggcatgaaacagattgccggtataatggaaaagcttcgcacggaggctccgtcggaaatagcgggggagagggtagtgcgtgcggacgattacgaaagctccgtcagccgcaacctcaccgacggcagcgagaagaaaataacgctccccgtttccaatgttttgtgcttctattcggaggacggcagttcgcttatcgtccgcccgtcgggtacagagccgaagatcaagctttatatcggcgctgtaggcaaaaccgaagaggctgcaaatgaaaagaaagccgcgcttgagaattgcggcacaaagctcctcggattttaattaatgcctgctgaacaattcaaaagcaccttaacccgaatgtcggtgtaaacttttgaa

SEQ ID NO: 1615 - DNA, 1677 bp, Unknown
  16S sequences of unknown bacteria
ggagaaaatcagctgttctccccggcactgatcgaactccagcggctgctgaagttgccgccctccggcagagcaagccctgtctccatcgcctgcgccgaagtgatcttggacttgtaatccaagtgggcgtagatgttcgccgtggtggtaaagtcgctgtgccccaaccactcctgaatgtgtttgagggggacgccgttggccagcagcaagctggcacagctgtgacgcagatcgtgaaagcgcatccggcgcaaaccgtgactctccagaaatttcggaaatgcgttggtcaggtattccacccgcatccgctcgcccagctcgtccacgaatacaaagccgtcgtattcatagttgtagcagtttccgcagacctgcttgttcagctcctgcgcctctttcacctgcataaagtattcccagaagctgccgatgagcggcagggtgcgcagactggacttggtcttggcggattgctgctcgaactcctgatacttgccgtcgatgatcgttgaggtcacggtgcgctttacggaaatggtgccctgctcaaagtcgatggcatcccatttcaagcccaccacctcgccacggcgaagtccgtaaaaggcagccaccagcaccggcaactccagcttggatccccgaagggcttcaaacatcttctgcatctcgtccgccgagagaaagaccggctgaaagctgttctttctgggccggtccaccttgtccgccacattctggatcagcatatcggtcttgactgcatatttcagtgccgagtgaatgacggcgtgataatggataacggtattgggcgtgacccgcctgagcatttcggaataaaacatctgcaaatgtcgggcttccagttcccgcagtgtcaatttcttcttgcgaaaataagggacgatggtgcttttcagcagtccttgataggcaccgtaggttgcgtgggccagccttcccttggcgatctccagccattccagcagatagtcggcgaacagcatatcactgctcaggtcgcccacttctttgggcggctcaaattccgctcggagccttgccagttctgactcggctttgcgcttatttcccttttcggaaagccccagcgagatccatttcgtttttcgctgccctccggcgtttttgtagttcaacacggcataatacttgccgtttttcaaagtcaaatgtcctgctaccattttgttttcctcctgtctctttctatttgcagaacagaactccaaaccgacagtatcagtataccatcggtttggggttctctctattctgcgaattgtttgattgcagccgtatcggtacgaatcagcgggcgtcccggttccgttctctctgccgcttcagcagttccaggcccttgataatgtcccggcgcatctgctcctcggtgtagccggaggggaaatatttccgcagctcctcccgcttgaatttcagttgctcctgctggttgggctttgtctccgccagcacggcatagatcatctgatcatccagcacgccctcctgtgccagcttcttcaggcggatgctctgggcgtgggacggggtgcagtcgttcagcgccatcgcgtccagcaccgcccgctgctgatacgagtctaagtaagaaagctccaccgccgggttgaaggcgat

SEQ ID NO: 1616 - DNA, 20398 bp, Unknown
  16S sequences of unknown bacteria
cttaatatttcctgccagggggcttttttgtactgtccgcacaagatggggcagttcagattttcggcagggcctttgttttcaatgattgacaaggtatatggatttacaggcaaatcctctggttttatagaggaaatcagagaaaatgaactattgctgcttttcgttcagttcgtaacacagatgccaggcggcactttggatggccttgggcatatagtcggaagagaagcgagtgacaggcagtcgttcccgtacatccatccccatatgcttcagggtgtcttccatcaggcccaggcagcggatgactccgttgccggaacctccggcacaggccacgatcatggctttttttccgttcagggcgtgattgaccttgcagtcgcaccggcgcacccgatccagcagcgctttcaggggttcggccatatcgtgccaatagaccggcgtcaccagggccagagcgtcgcattgctgcatcagggcatagagccggttgaagtcgtcctccagcacacaggtgcctttttgggcacactggccgaagccggtggagcatacctggcagcggccgatgttcagacggttgagatgcacttcgctgcactccataccgtattccagaacgccgctcaccaaagcggatttgcattttgcggtgagcccttcttggttggggctgcaccagatgaccagcagagacattgcgcattcctcctttgctgttattatgaaggaacaaaaagaaaggcgcaagtcttttttggcggaagggaaaaacggtcttttccatggatgtgggatgtggtaggataaaagaaaaaggatagaaaggggtaagcatatgcagcagcatacatgggtttcccaccggtgccagccttcgggagaggggagcaattttgctcagggagcggagcaatattccgacctgatcgatctgaccatcggggacccggatcttcccacatcggaaaaaattctggaaccggcctttgaggatgctcgccggggacataccaaatacacccaccccatgggggatggagagctgcgtcaggagatctgccggtattatcaaagagcctatggcctttccatcgaccaaaatgaggtgttcgtcaccacagccgggtgtatcggtatgaccgaagcgcttttagccaccatcaatcccggggacgaggtcatcattccggacccctatttcatggtgtatcccgaccaggtgcgtctggccggtggcgtgccggtgtttctggagacccggggggatgaaaattttgccctcaatccccagcggctggagagcctgatcacccccaagacccgggcgattctgatcaatacccccaataaccccaccggcgccgtctattccaaagagaaccttcagcaggtggcagaaatctgtatccgccacaatttgctggctatttgcgacgatatttacaccggattcgtctttggcggcgcgcagttcactcccatgatcaccattgaggggatgcgtcaccggacggtgtgcgtcaattctttttctaaaaactttgtcatgaccggtatgcgggtgggcaatctggtagcaccgccggaaatcattcaggctgtggactatctgaatgggtttataatgtatacggcccccagcatctctcagcgggccgccatttacgcgctgcgccaggcggaggagatcactccccaggtggccgccgagtttggccgccggttggaatatgccgccgggcgcatcgagaaaatcccggggatgagcgtgcacaagccccaagggagcatttatctgttcccctcggtgaaggagagcggtttgaccagcttccaggcggtgcggtgtttgctggagaaagcccatgtgctcaccatgccgggcgaactgttcggccaggccggagaaggattcctgcgcattgcctgcacccagggcatcccccggctgaaagaagcttttgaccggattgaagaaacccaggccctgagcgaacatcgataaaaagagaaaagaaaaaccgggtggcagaatttgttccgtcacccggtttcttttcagctacttagtgctctgcgccttcggcggtgtgtacatcctgggtgttttccacacagacccccagagcggcggtgatgccttttatcatctccggcaccgaaagggaaggggtacccggcttgtccaccacctggcaggtggcatagggcacatggacaaagccgccccggatggtggggaagctgtggtggatatgatacagcagtccgtacatcagatcattgcacacataggttccggcggtgttggatacctgggcgggaatgccttcctgccggatggcctgcaccatggccttgatgggcagggtggaaaaataggcattttccccctgggagaataccggctcatccaccggctgattgcccttgttgtcggggatgcgggcgtcccgcagattgatggccacccgttcggggcagatggcctgccgccctcccgactggccgacgcacaccaccacatcgggccgctcctgctccatggcctgacgcacctgtttaatggcctcgccgaatacacaggggacgattttcttcaccacctgagcgccggaaatggtttccggcaggccttccacgatctgctgggccggattgatggtctctccgccgaagggctcaaagcccgttactaaaattttcatggaaccgtttcctcctccatttgttcttggggtcagtatagcacctttctgccgctgtcacaagcaggccggataggggagagagaaaaaagaggggattcataggtaaaaggctatcaaaaagatgaaaagatgctattttactttgcctcggggatgtgttatgataaaaacaacagttgagcaaaacaacagaacaaaaaggaggtcttttttgtgaaagttttgattgtaggcggcgtggccggcggcgcttctgcggcggcccgtctgcgtcgtttggatgaaaaggcagagatcattatgttcgagcggggagaatatatctcctttgccaactgcggcctaccctattacatcggcggtgagatcaacaagaagtcggctctcactctccagacaccccagagcttcaacagccggttcaatgtggatgtgcgggtatggaatgaagtcaccgccatcgatccggagaaaaagcaggtcactgtgcacaatgtccagaccggtgaagattacaccgaaagctatgacgagctgattctgtcccccggtgcagcgcccctggtgcccaagatggacggggtggacgatcctcgggtgttcaccctgcggaacattcccgacaccgtcaagatccgggattatgtagaagaagagttccccgaaagcgccgttgtggtaggcggcggctatatcggtgtggaaatggcggaaaacctgaagaaggccgggctgaaagtgaccattgtggagctggccgaccatgtgatcgctcctctggatggggatatggccgccgaagtccatcgctatctccgggatcagggcgtagaactgatgctgggcaaggccgttcagagcatggaggacaagggcggcaagctgaccctccacctgtctgagggagagatcgaaaccgatatggtgatcctgtcggtgggcgtgcgccccgacaccgccctggcccagggagccggactggaactgaacgccaagggagccattgtggtcaacgagcatatgcagacctccaaagagcatatctacgccgtgggtgatgccattgagatcgtggactttgtcaccggcaagaagggctatgtgcctctggctggcccggccaacaagcagggccgcattgctgccgacaacatctgcggcatcaagagcagctataaaaacaccctgggttcctcggtgctgaagatcttcgacatgaccgtggccatgaccggcgtcaatgagcgcaccgcccaggccgccgggctggattatgacaaggtctatacctattcccagtcccatgccagctattatcccggtggacacggcatctccatcaagaccctctatgaaaagggcaccggtaagattttgggtgcccagctggtgggctatgacggcgtggacaagcgctgcgatgtgatcgccaccgccatccgggccggcatgaccgcctatgacctcaccgagctggagctgtgctatgcacctccctttggttcggccaaggacccggtgaactttgtgggctatgtgatcgaaaacaccctcaccggcaaggtgaagaacttcttctggaacgatgtggagaagctgccccgggacggctctgtcacactgctggatgtacgcacgccctctgagcgggaagcgggccatatccccggctttatccatatccccctggacgagctgcgtcagagagcaggggaactgccccaggacaagccggtctatatccactgccattccggcctgcgcagctatctggcctgccggatgctcaccggcttgggctatgattgctacaatttgtccggcggctggcggttctatgagatcgctgtcaacgataagctgaccccggatcacggctgctacgatcccaaataatcttccggcgtcccggcgacctgctgcatacagtccatcaggtggcgcaaaggctcggatagatacttgtttttgtggtacaccagccggaaggagcgggtcagccgggcgtcggccaggcgcagcagccgcaggcggcccgcgtctgcccgaggctgggccagcagacgggagatcaccgtcagcccctggccctcttccacggcgctgaggatggaatcggcgctgtggcacacccatttgggatagatctcaatttgtctggcccggagataatcttcaaacaaagcccgggtccccgaccccttttcccgcaggacaaagttctgcccttccagctcctccggatggagggtttcccggaaggcaaaggggtgatcgggggcgcaggccagcacaagctcatcttcgattaccggcagcgtgcacagatcggggctttccaccgatccttccaccagggccacatccagttggctttccagcagcatttcttcaatgagccgggtgttgtctacaaagacctgtacctgggacaggggaaacagctcttcataccggtggatgatgggggagaggacgcaggcgcccaccgtgatggtggcgcccacccgcagaagcacctgggcggaggaattgcgcatgctgcgctccatttcgtcaaaaagactgacgatgtgccgggcataggacaaaaggcgttctccctggggcgtgatatagagttttttggacagccgttcaaagagtttgacaccgtagcttttctccatatcggaaatgacttggctgacggtgggctgggcaatataaagttgtttggccgccaggcccattttgccggtctcggccacggcgatgaaaatgcgcagatgacggatggtcacaaaaatcgctcctctttggcaatgtaataggtttttgcctatgattttgattcaatattactattttacctgatggatgacaaggggtataatagaagcaagacgaggaaaggcttttcggtgtgaggaagagcctgaacagaacggaaagacgatggaggataacaatatggctattacacagagcgatatcaagcgagtcaaggcagagggctttttgctcaaccgtggcaccgaggagttttccggccggatcatcaccgaaaacggcatcctcaccgcccagcagatgcaggtgctcagcgaagccgctgccaaatacggcaatggcaagatcgagttcacctcccggctgacagtggagtgcccgggcatccactatgacaacatccctgctttccaggaagcggtgaaaaaaggcggcatgctcaccggcggtaccggctccaaggtgcgccctgtggttagctgcaaaggcaccacctgtgtctttggcctgtatgacacccaggaactggccaaggagattcacgacaagttctacaccggctatcacgatgtgatcctgccccacaagttcaagatcgccgtgggcggctgccccaacaactgcgttaagcccgacctgaacgatctgggcattgtgggccagaaggtcatcaagatcctccccgaaagctgcaaaggctgcccctcctgctccatgatcgataactgccccatgaacgccatttccatgaaggacggcaaggcggtcatcgacgccagcctgtgcaacaactgcggccgctgctcgggaacctgccgcttcggcgccaccgaagagagcgagaccatgtacaaagtctatgtaggcggcaagtggggcaagcgggtgcgcatgggcagccccttgcagaagctgttcacccgggacgaagtcatcgatgtggtggaaaaggccatcctgctcttcaagcagaagggcatctccggtgagcgtttcggcgatactgtggagcgcctgggcgtggacaaagtagaaaagatgctggtgtccgacaatctgctcaagcggaaggaagagatcctggagatcgaaaccgtggccggcgccaagtgctaagcaaaatagtcgttcagtcattcagtcatcataaacaaaaaaacaagcgggaaagcaatgctttcccgcttgttttttattgcttggcctgttccaaaaagccataccagacaggagggtttttcacggaaaatccccgggtgtggcccatccggcggagaatggccttgcgggaacccaccaccaactcccaaggttcctcatcgtacaggaactttaccagaaagccttcttccggcggggccgaaagggggaggggccagatttgcagcgttcccagataaagggggatgtgctggagatccatttcttccgttatagcagcagactgtgaccaggtgagtacctgctggatggagatttcctcccaatcctccaagggataccaggggacaagaaggaggaagaatagcagcaaaagaatgagtaacagaagagcgagccagtgtttgcggaaaaacagcttcatttccatcagctcctttcagcatcatgcctttttccgtttcttgttctgcatccgctttttcttggcttttttcaagggcgattgctttttgggaccggagcgcttgggcggagtgagtttgtttcctttcgggctttttttctttttgtcctttttgcagccaggtgttttgctcggcttgctttctttcggatgggctggagaagaaatggccgcttccggagccgtggaaagaggagaaaggctggctgtttccagcaccggctgagtaggggaggaaagctgacctttctttccttttcggggcaggggagctggttcaaaccggcggaagcgccagcggagatagtggcgctcgtccatgagatacaggctcatacacagagagaagattcccatcaggccaaggatcagggccagcaggccgctgagggattccaaaggaagcagatggatcatattgttttgggcatcgtagtaggcatccaccagatcgcccacagaccactgagagggcagaagccagccggagagccggtccagcccccgggaggtaacggcgtaaaaattgcctttgaagccatgggtggagctgagcagggctttgacccggacccaatcagggtgaaacagaggcgcgccgtagtaaatggcccaccacaaagctgaagcaccaaagagcaaaagcaggatgggagcggtataccggggctttttgggtttgccccgcagggaatagcggaaaggctgttccagatggacccggcggcccagcaggcacatgaaaaagagcaccagaagtccacatcccaaagccacgaccgcacaatagagataaaacagctgctcattttggatcagatcataattgcggtagaagcagatgcggtcaggattttcgtgataaacgatctgggtgccatagccgaaagagctgctttcccaggcggccagaatgctgacgctgcctacaaaggggctgccgtcggcggtatgggtgatggggagcatcccatcgggaggcagattgtgaatcaggcggacggtgtggggcgttccttcataggaaaactccacggtggggtaatattggggctcgcttccgggaatctggatctgttccactttggtgataagggcatccagtacggtgatatcggtgatttgctcccgggcaaactgaaagccgcgccaaaggcacaaggcggccagcaggcagaaaaaggctcctgtcaaccgtttcatcccatcatccctttccaaatcccccgttttcaccattgtaagacaaagtgtcggaaaaggcaagaaaaagcaaaaactccccaaaagagatattggttttatctataaatgccatagtattttataaatagaaacgattggaaaagccgggtgggaagtgatactctgttagataagggaaacttattttcgaccaaattttcagaaagaagggaatacccatggcagattatcatgagatgtggaagagcctgggcatggacctggaaacccatgaccagctttgcgaagttttgcccggtatgttcggccaggtttatctcagccaggaaaaccggcctgaggggatggattattataacttcgtcatcgccgaaatccacggagtgcgccccgccgaactgatcgagcatcaaaaaaaggcggcaaggtctttggcaccttctgtgtctatgtgcccgatgagatcgtttttgccgccgatgccattgccaccggcctgtgcggcggttctcagttctgggtccccggcggcgagaaagtccttcccgccaacacctgccccctgatcaaggcttcggtgggcgcccggctggacagaacctgccctttcttccgcatcgccgatatgtatgtgggcgagaccacctgcgacggcaaaaagaaggcctgggagatcctgggcgaggatgtgcccacctatgtgatgcagctgccccagatgaagcgggaaaaggacatccaggattgggcctatgagatccgtttgttcatggaaaaggtggaggaagtcaccggcaacaaggtgaccccggaaaagctgggcgctgccatcaaactgatcaacgacaagcgccgcgccctggcccgtctctatgagacccggaaaaacaagaatctgcccatcagcggcaaggacgctttggtgatctcccagattgctttctatgacgatcccacccgctttacccagatgaccaacaagctgtgtgacgagctggacgagcgcatcaaaaacggtgtcagcgtattcccccagggacagaagcgcatcctgctcaccggcacacctctggctgtgcccaactggaagctgcaccacatcatcgaaaccagcggcggcgccgtggtggccgaagagatgtgcaccggcacccggtactttgaaaaactggtggatgagagccagaccactctggatggacagatcgaagctctggcccgccgttatatgaacatcaactgcgcctgcttcacccccaacaccgcccggatcgacgacattctgcgcctggcagaggaatatcaggtggacggcgtcatcgatgtgaacctgaagttctgcagcctgtacgactctgaaggctaccatgtggagcgggccctgaaggaaaagggcatcccggtgctgggtctggagaccgattacaccgatcaggacgaggctcagctgcgcacccgcatcggcgccttcctggagatgctgggcgaataacatggattcttcccagatggtggggtatgtgattttccccaatcataccaatgccctgcgattatatcagcggctgaaaggggagaagattccctgcacattggccccaacgccccgggagtgcagcgtctgctgcggggtttctgtccggctctcccaggtggaggacattccccgggtgaaagagctgatacaggaggaagatgtgcaggtggaggagattgccacgctgccccgatgaaaacaacaataaggcccccggcggaaatttccgccgggggccttttctgtgcgcgaaatggtttgtgtggaaggaatagacaaaattgatgtttttgttttgtgtggtttgcctctatgaagaaaagggtagcaaggtttataataaatcaacaagaaaaaaataattccccaaaaaactttgcaacttatttaaaattaaaatccacgcgttcttccatgatccggatcagctcatggggtttcatatccagggcataagaaatcttgaaaatggtgtcaatggtgggacttcgaaggcctctttctattttgctgtaatgtgttcgatccaaagtggccagaccgcttaactgctcttgggtaagcccttttttctctcgcaattcgcgcaaaatatccccgatgctggttgcattgatcataagtattcctccttaattggctaaatcatagcaagggaatattttgtatttgaggtcagttgacctcattgagaaaatgtgctattatttcggtaataaaatcaggaggaagacagcaggggtgtgaggaaaggatacgatggaatagaagaagccgttccaaattcgatttttaaatgatacagtcttttgcgtgtcaatgagtgaaggaggggttttttgtgcttctgatcgcctttccggcttgggtttattggcggtatcaatatcttttttacaacaagtatgatggagacatcaccccggaattgacccaatggatagagcgtttttggggatctgctcctgcgctgctgggatatgtggtgcctgttttgcttcttttgcttattgtcagcctgatctgggctaagtattcctggaaggacatggcctgtcatttgtttttcactttgagtgctgggtttttcctgatttttctcacccagttcttttcggttcattcagccaggaatatctatatttctctgtaccaaactttttcctatcttcttgcagaccctttggcagagaattggagcggcggcgaaggcctgatgctgaccgtgctgctggccccggcggcggttggactgtacgcactggtcacggcgctgaaaaagcagaaacaataattgaaaaagcccccggcggaagttttccgccgggggcttttctgtatggatttattcttttcccacaatgggaaggggttcgggatcgatggtctcggtgcgctgcatcccatccatgaaggccaggtattcttccttggtcatgggagccttgtagtgctcaatgttttctttcgccttttccgcgccgtttttcatcagccggtaggctgtgagggcaaagattttggcggtgaccacataggccaggtactcgtcttccacccgcacatccgggttgtggaggttgcccacatagccgccggtgcagaaatgaaccaggggcatcagggttgccacatcgccgaaatcatcgctgccggtggcatgggtcagcatatcccggcgatggtgataggggcccatggcgtccagatcctggagaacgctttccagcacctgggtgtccgggttgaccacgccggacatatagccagccatggtttcgatggtgacgccgcagccggtagccatggcggcggccttcagggaacggtccacctttttggcggcgtccagataggcctcgggggttttgccccggacggaatactgcatggtcacatgatcggcgatcacattgacggcggtgccgccgccggagataaagccgtggacccgcacggtgtcctcgtcccggaagctctcctgctgcaaagcgatgttcaccatggccgaagtggcggcattcagggcatcgatgccctcgtgaggggcgtcggcggcgtgggaggagcggccctggaaggtgacagtcttgttcacaaagccgttgctgctgctgttgtagatgccgtaatcggcgccggggaaggtgtggtggcccagggcgatctggatgtcgtcaaaggctcccaggcggatcagttcgcatttgccgccgccgtaacccagcttaccctctttcatcatctgggatttgaactcgatgtccacaaattcttcggccggcactgccatgaagcacagattgcctcccatggcctgggccacttccgggtcacagagggccatggccgcacccacaacgccggtgagctgggcattgtggccgcagcaatgggaagcaccggtttcgctccaggcgtccggatgattggggatgggcagggcgtccatctcaccgatcaccgccagggtggggccttcctggcttcccttgggcttgagatagcttttcacgccggtgatggccaggccggtctcacaagtgaggcccagtttttccatttcttccacaaatttctggctggtgcggtgttccttgtatcccagctcggcgtggcagaagatatcccggccgaaggccatgatctcatcctttttgctgtcaatgatctgacagattttttcttcgatccgatccattgatcaattccccttttcctgccccgaagggcgatatatatacattatatcggattttcatactacttgtaaaggggcagagaaatgtgatatgataaaaacagaacattcgtttgaaacgaaggaggggagaccatggaccggcagatcctgcatgtggatatgaacggcttttatgcttcggtggagatgatcttccatccggaggcccggaatgtgcccatggcggtggggggagatgcccaggcccgccacggcgtgattctggccaaaaatgagctggccaagcagcggggcgtcaaaacggcggagaccatctggcaggccaggaaaaagtgtccggaattgctgctgttgccccctcatcacgatttgtatcaccagtattatgaaaaggccaacgccatttaccgccggtttaccgatcaggtggagccggccagcatcgacgaaagctatctggatgtgacggggagccaggctttatttggaacaggggaggagatcgcccaccgcatccgccgggcggtgaaggaggaattgcagctcactgtttcggtgggggtgtccttttgcaagacctttgccaaaataggcagcgacttgaaaaagccggacgctgttacctgtattccccgggaaaaggtgccggagatcctatggcctttgtccattgaacagatgctgtcggtgggggccgtgacggcggcccggctgcggcagaagggcatcggcaccatcggtgatctggcccggcagagccgggaaacgctggaagagatgatgggcaagcatggagccagtctgtatctggcggtgcacggcctggaggaagacccggtgcgccgttggggggagggggaggaccccaagtccattggccgcaaccgcacctttcgtcaggatgtggtgggagatgaggcggtgcgccgggagctgctggctctgtgtgaggatgtggcctggcggctgcggcgtcagggaatgcgctgctggggggtgcaggtcaccatcaaagaccctcaatttgtcaccatcgaccgtcagggcaaactggatgagccggaaaatgctatgacgcctctgtttcaagcggcctggcaggtctatcagcgctcctggaaggggaataagcccatccggatgctgggtgttaccgccattcgcctcacccgggaagcggggcagatgagcctgtttgacgatgggaaaaaagaaaaactcagccagtccatcgatggcatatgggacaaattcggccccggggccatccgccctgccgccctgctgaaaaaggaggactgaaaatgaaccgggaaaagggaatgggtttttgcggcctggcctgttgtttgtgcgaggaaaaagaaggatgtcttggctgccgggaaggcacctgtccggaaaaagaacggtgccgcccttatgagtgtgcccaaagcagagccttggaggggtgctggcaatgtgaagaattcccctgccaggccccggtgctgcaaagccttcggacccaggcttttgttgggtacatcggaaaattcggcatggaaaaaatactggatcggctggaagaaggagaaaaggatggaatcgtgtatcaccacccaggcctgctcaccggcgattatgatgggatagaaaatgaagaagatgtgtgggcactgctggaggggaacaaaaagccgcagaaagcctgatcctgtcatgaattgttaagaaattcgttggaaaaatccagtggtatgggatgggttctttctgttatactgtacaaaatacgccggaaaggaaagcagaaggaggagcctatggagctgaggttgacagatcgggaggcgctggctttataccggatgctgctgcgctgggagaaaacaggcaggctggccccgcgggaagtggaggaagagcagctgctttgggatctccaatgcttgctggaaaaggaattggaaccggtgaatgaagaaattaccggaagatggagagaggaatgagggaatcacatgaaaaggctgtacaaggtagccatggtcatggcgatggtggggttgctgctgcttctggcggtgataggggccggggtatcctatcctcatcctttctttaccatcggcactttggtggggatggggtgcgtgtttctcagcctgcctttgtttttcatcgcctggatcggacagctgcgtcagtcggtgaaaaccaagcaatatggatgggcgctgtgcattgctattttcgggatctttctcattgtccgcgggcttttgcagatatggtagaggaaggaggggacaaaaaaggtgaaaaaagcagttttccatgatggagaagaacaacagggaatggaggaagtcatcctcagtcacgacagccaggccatgctgtatcgggtgccctgggaggtggcccgggatctggaaagctattgtgaaagtttcagcgcagagtgggtgtggcatggaccggaaaaggagaaattcctgcgggagatcggcccgggccagcaagtggccgcatacggtgcgccggatttcatcgactatctcaaccggtgggtctttccggagaggccttgcaggctggtgaagatgctggatttttacggttacgatattccgccggaataccagggaacgccccattataatttttgaagcaaaacaaaacgccgcagatttctgcggcgttttgttttgctttattgttatttggccagaacttttttcagccgggcaaagcggggcaggccgttttcatagggaagctgggtctcgccctgaatcaggggcagagcataggcgataaagtcatcggcgaggccggtgtggtcgggcttgatccactctgtgggcaccttcttttcggtgttggccacaatgtccaggggcaccggcttcatctccagctggtactccgggccttcttttcgctcaaaggccaccattttgtcggtgacgccgctgacggccagttccacggcggttttgccggcctgataggcttcttcgatgtcggtgagggatgcggagtgggcagcgcaccgctggagcagagacagctcgatgctgcgcaccttgtagccgaagcggctctttacttcgtttgctacaaaagcaccggcaccgcccatctgcttgtggccaaaggcatcggtggccacatcctggccatattcggcgatgaatttgccgtccttatccatgatgccttcggaaagagccaccaggcagttgttcctcttgtcatagacttccttgatctgggccatggcggcttccaggtcaaagggctgctcgggcagatagatcaggtcgggaccgccgcccatatgggaggccagggcgctggcggcagtgagccagccggcgttgcggcccatgatctccacgatcaccacggtgccggtgtcatacacattggcatcctggtagatctccatgcaggaggtggcgatgtatttggcggccgagccaaaaccggggcagtgatcggtgccgaacaggtcgttgtcgatggtcttgggcacgcccatgatccggcactcatagccctggctcatcaggtacttggagaccttgttgcaggtgtccatgctgtcgttgccgccattgtagaaaaagtagcggatgttgtatttctggaagatctccagaatgcgcttgtagtcggtgtcgtccacgctgctgtctttcagcttgtagcggcaggaacccagggcggaagagggggtataccgcagcagggacagctccttcttgtcctcctgggaaatgtcgtagagacagtcgttcaaaatgcctttgatgccatgggcacagccatagacggcggtgatgcagtcttcacccaacgcagtttccagcacgcccagggcgctggaattgatcaccgatgtggggccgccggattggccgaaaaggcaggcgcctttcagtttgttcatggtacatgacctccgtggagagataaaatttgaaaaatcaagtgtaactgtattttaccacacaatcccttctgtggcaatgaaagaaaggccccgggcgaaatgcccggggccagaaagaacgattgcagcgattattcggtgaccattacattgtagagacgccagatggtcatgtaggcctgctggcgggtgtaggtgtcgaaggggctgaaggtggtttcggaggtgccgttcatcacacccagcgccttcacataggccacggcctcctgagcataggaagctaccgaagcattgtcggcaaaggtctcgccagaggtatccacatcggttttgcccatgtatttgcccatgcgcatcagcagagcggcggcgtcctgacggctgatggcgctgtagggatcgaagatgccttcgccgcggccgttgatgacgcccagcgcattggcagctaccacatcccagctatttgtgtcggagaagggataggccagggccaactcttccagggtcttgccggtgtcttccaggacgatgtcctcaatgtctttaccggagacaacttccagcagctgaaccacgatgatggcaaagtcgccccgggtgatgttggcataatactggttctgcagatcggagggcaccaggtcatgctggatggcctgagtcacttcttcataggcccagtcggccatttcgccttcctggggcagaggctgggtgtagccgatgcgggcaaagccatatttgccgttttcgatcaccgtgatgatctcatcaggggtcatagtcagagaagattccagcccggcggggaaatagctctcctgggagatggtgttggaaccgggcacttccttgccatagcggtcgatgcagaaggctctgccgcccttcacggccacagccagaccattcgagtaagaagtgatccgggtgtactcaaagggaaccaccacattgttctgggtgtcgatgacgccgtatttgccgtctttgcaggcaaaggccagaccttccaggaaggtgcccagagcttcgtactcaaaggggatcaccgtcttgccctgtttgtcaatgccgccccatttgccgttcagattcttcacagaggcgatgccgtcgcagaagatttgataggtagtgaagaccccccggacatagaagtcctgatactggaaggggatcacggttttaccgtttttgtcgatgaagccaaaaacaaagccctcgcgctccacatcgtacttagccaggggagacagaccttggttgaaggggcgggtgtaggcttcttcggaaaattccaggacgggcttgccgctttcgtccaaataaaggccgttgccgcccatggcttcggtgacggcgaaggcgccttcgttcagacagtagcccacccagtaatcccccaggtagacctgtttgccggtgcggtcaaacaccagactgggggcatagttgtccaccgacatgatgctgcccagcactacatagccgttgtggtaatagactttggcggaagaatccagaaaatccacaaattccttggcctgcttgtattctgtgtccccttcctctttatagagcaggggagtcacattgccctgtttgtccaggatggaccagaaatacaccggggccgttgcgccgtcatatgtgggatgctcgcccagagtgcccaccacggccaggccttcactgaaggggaaggcatagtcgaactggaaggggatgacggtgttgccctctgtatcgatgtagccccacttgccgttctttttcacagcggccaggtcttgggagaaggagccggcatcctcatactgaggatcgatgatcacctcataggaaaggccttcctcttcggcggctgtgacggggagaatgagagagaacagggtacaaactgccaggaacagggaaattgctgcgcgggatcgtttgtgctttttcatacatttcattcctctctttttggattttccagggtatgacttaattttacaataaaaagaatgaaaatacaagaacaggaaaatccataccgcaatttttaaggaaaagaaatttgcatggcatctgtttttctgatacaataacgaaaagacctactttggaacgatacgagcaggaggaaaacatcatgccgctagtcagtacaaaagaaatgtttgaaaaggcctacaaaggtggttatgccatcggtgccttcaatgtgaacaacatggagatcgtccagggtatcacccaggcggccatggaggaaaattctccggtgattctccaggtgtcggccggcgcccggaaatatgccaagcacaattacctcatcaagctggtggaggccgccatcatggaaaccggtctgcccatcgccctccacctggatcacggtgaaaacttcgacatctgcaaagcctgtgtggacggcgggttctcttctgtgatgatcgacggctccaagtacagctttgaggaaaatatcgccatcacccgccaggtggtggaatacgcccatgcccacggcgtcactgtggaaggcgagctgggcaagctggccggtattgaggacgatgtgaatgtgtccgccgaggacgcccagttcaccaatcccgctgaggtggaagagttcgtcagccgtaccggcgtggactctctggccattgccatcggcaccagccatggcgcctataagttcaagcccggtcagaagccccgtctccgttttgacattctggaagaggtacaaaagcgtctgcccggtttccccatcgtgcttcacggcgcttcttcggtgcctcaggagtttgtggcccaggtcaaccagtatggcggctccatgcccgatgccatcggcatccccgaggagatgctccgccaggctgcatccatggccgtgtgcaagatcaatattgactccgacctccgtctgtgcatgacggcggccgtgcgcaagcacctttgcgagcatcccgatcactttgatccccggcagtatctggccgacggccgtcaggccatccaggatatggtccggcataagatccgggatgtgctgggttcttccggcaaggcataaaatacaaaacaaaaatcgggcggttttccgcccgattttttaaaagattgaaaaaggaacgatgctatgaaatatcagactattttgttcgatctggacggtacgctcaccgacccgggggaggggatcacccgttcggtggcctatgcgttagagagcttcggcatccatgtgcccgatcggaaagtgctctatccattcatcggtccccctctgctggattccttcatggagttttatggttttgccgaaaaagacgcccggcaggccattgaaaaataccgggaatatttcggaaaacagggtatttttgaaaatgagctctatcccggcgtgccggaggctttggaggaactgaaaaaagccggtggccgtctggtgctggccaccagcaagccggagccttatgccaaagagattctggagcattttcatctcatgggctattttgatttcgtctccggcagtcagctggatggaacgcgaagcaaaaaaggggaagtcatcgcctacgccctgggccattgcggcaaagggccggaggataaggccctgatggtgggggaccggaagcacgatgtgcagggagccttggaaaatggtctgccctgtgccggcgtgctttatggttatggaagccgcgaggaactggagcaggccggcgcccaatggattttggaaacgcctgcccagctttcccagttggcccggctgtaacaaaacaaaaaaagaaagaccgtgccaaactgaacaggtccagtaaaaacggacagtgacaaaagaccccctgatgta

SEQ ID NO: 1617 - DNA, 17778 bp, Unknown
  16S sequences of unknown bacteria
atataatattataatttatatattgacacagtttataaaatgatataatataatggtgaagaaagggaagtgagctgtatgacacggacaattcattctgcaccgttgccggctgctgtttccgacagagtgcaaaaacagcaaatcactcgggttcgtgacccctatgatgctttacgtttttggtctgcgtttacccatgggcttggcgcggtgctgagtgtgttgagcggtgcggcgctgattgtcctggcggcttaccacggtgcgggggcgctggatctcgtatcgctggccgtttatacggcatctatgacggcgctgtatctggcgagctgcctgtatcactgtgtcaatacgtcgattcgggggcgcctttttttgcgtaaactggatcactccatgatttacgtgctgattgcgggcacctacaccccggtttgcctgtcggtgctgggcggtgcgctgggatggagcctgttcggtgtgatctgggggctggctgtggtaggcgtcatcgtcacgttgtgctggctggatgctccgcggatcctgaccaccatgttttatgtggggatggggtggatagcagtactggtcttacagcctttggcagcggcgctcagcgcatcggcgtttttctggatgatcgccgggggtgtggcctatacagtgggcggtgtgatgtatgcactgaaatggccgctgaaacatcatgcacggttcggctgccatgaggtgtttcatctgtttgtgttgttaggcagcgcctgctttgtgctgatgatgggtgctgtgtgtatgggaatttgattgcggctcagcctatggcttgccgtttacagtcagagcgccgcagggtctcctgcggcgctctgttttaatgtgcattttggtttatttgtgctggtgcggatcttccccgcaagagataacgttccctctgcttttgtacacagtcgtgccatggttacgtcagccgcaacacatacaaggcagacagcactcccaattgcccagccatagagaccctgccccaattcggcgtctttcgggtgggggtcaaacaaaaacaggacaagattgaaatgacttgcagagatcgggcatactcctgtgttcaggtagtatccggacggaccggaacccagtccgtatgtaacgtttgcggtaccgacttgcggaaaaaattgtattccgtgagaagtttgtatacttttatcctcatagagtagcacggtgggagagtcaagtgcttttttataaaaagtgaaacagaaaagtgcggcacacccggaatcggatgtgccgcactgcggttcatgcgtcttctgccgtcggttccattgcagttttggtcttgtctgcgttctctggtgcatcccaatccaccatggtggctacgcagcgatgaatcggtgtacccagctcgtggaatttggcttcataatcggtcatgatgccctggggaccgttttcgtgcagattgtgggtgacttcggacagggtaaagccacacgaggggaattcttccagagagaaggcgaacagcggggcgttgtcggttttgaagtggatttgtccgccctcagccagcacctggcggtacaatttcaaaaaattatggtgggtcagacggcgcttggcgtggcgcttggtaggccagggatcgcagaaattgatataaatgcgatctacctcacctggggcaaacagctccggcagccgggcggcgtcacaggaaaggaagcgtacattggtcaggcccatggagcacacccgctccatggccaccaccatggcgtcgggaacccgttcgactgcaagaaacaacgtgtcgggatgtttcagggcggtttccgctgtgaagcggcctttaccacagcccagttccacatgcagcgccccgttgccctcaaacagcgcgcgccagtgcccgcggtgctcctgcggttcgcgcacccacacagcagcacagcgctccatgcgcggcaccagatttttcttttttctcatacgcatagcgataaacctccataggggatcagattgcagaaaacgtgattattgtaccataggcgagaggtgtattgcaaacatctgtgtggaaatcttttttgatgccggagtgcagttccttgtggagaaaaaacggagcgcggcgctttggcgccggggctttgcgtcctggcggccatccggggaaggaaaagaggactgctcacgcagagtgctgcggtgctctgccgaaaggcggtttaccagatattgggcctgtgcgctttacataacacaaacaaatggatgttttgcataaaatagcgccttgattttgacgaaactgtcaaaaatcgactgaaattttgtgtgagcaaaccgggataaacctcttgatatttatttcacaaagacgtataatctaaccataaggtggggataggcatgcccacttcttctgttgcgctgcggcagggaacatgagcggcccgaaaggacgaggtccctttttggccgactgaatgatgaggaggaagaaacatggcagttgatttggaaaaaaagggtcacgttggcgtgatcaccatgaatcgtccggaggcactgaatgcgctgaacactcccatgcttcaggaacttgagaaggtcatcgaccaggtcgaggcagacgatgagatttatgtctgtgttctgactggcgctggccgttcttttgttgctggggcagatatcggcgagatgagcgctttcggtgcagtggaaggcaaaaaattcggcgattacggcaacagcgtgttcctgaagatcgagaatatgagcaagcccatcatcgctgcgatcaatggttttgctctgggcggcggttgtgaactgtcgatggcctgcgacatccgtctggccagcgaaaaggcaaagtttggccagcctgaggtaggcttgggtattacccccggttttggcggcacccagcgtatgcctcgcatctgcggtgtctccaatgcaatgatgatgattttgaccgccaagaccatcaaggccgaagaggccaaggctatgggtctggtcagcgaggtgtatcctgccgatgaattgatggacaaggctctggaactggccgagactatcgcttccaaggcgcaggttgccatccgtcagagcaagcgctgtatccgccgcggtatgcagaccgatatgtacaccggtacggcatatgaagcagaggcgttcggcgtgtgctgcgccacggaggatcagaagggcgcaatgaaggcatttacggaaaaaacgctggacagctacacttatttgaataagtaatagagccagtattttttataaaaatttgtaaggaggctatttatcatgaaaaaagtatgtgttatgggcgcaggtaccatgggtttggatgtggcgcaggtctttgccaccaagggctttgaagtaacggtccgtgacatcagcgacgaaattctggacgctgccaaggcaaagctgattaagggtctggataagaaagtcgccaagggcaagatgaccgaggaagccaaagaggcgatcctgggaaatatgtctttcaccaccgatctgaaggctctggccgatatggatctgatcgttgaggcaattctggagcgcatggacatcaagaagagcgtcttcggcgaactggataccatctgcaagcccgagacgatttttgcgtccaacacctcttctctgtccatcaccgagatcgctacggcgaccaagcgtcaggacaagttcatcggcatgcacttctttaaccccgcaacggctatgaagctgattgaggtcattcgcggtgcgcatacttccgatgagactttcgagatcatcaagaatctgtctgtggaaattggcaagactcccgtcgaagttgcggaagctcccggttttgttgtcaacaagattctggttcctctgtgcaatgagggtgtctgcgtgtatgccgaaggtattgcttccgccgagggcatcgacactgctatgaagctgggcgccaaccatcccatgggtcccctggagctaggcgatctgattggctgggatatcgttctgaacgttatggatgttctcttcaacgagacccacgattccaagtacagagctcatcctttgatgagaaagatggttcgcggcggcctgctgggcagaaagtccggtaagggcttctacgattacaccaagtaatagcacaggaggagtttaattatggattttgtcattgatagagaacatcagctgctccgcaaaatgtatcgtgagtttgctgaaaatgaagtcaagcccattgcagcagagatcgatgaagaggagcgcttccccgaggaaacgatcaagaagatggccaagctgggcatgatgggcctgtatttccccaaggaatacggcggcgctggcgcagatatcctggcctatgccatggcagttgaagaaatggccaaggtctgcaccaccacttccgttgccctttctgcgcacgtttctctgtgcactgcacctatttttgagaacggtaccgaagagcagaagaagaagtatctgcccaagctgtgctccggcgagtggctgggcgctttcggcctgaccgagcccggtgcaggtaccgatgcacagggtcagcagacggttgctgttttggatgagtctggcgagaactggatcctgaatggttccaagatctttatcaccaacgccggttatgccgatgtgttcattatcattgccgttaccggcacgatcatcaacaagcgcggcaagaaggagaaggaaatctctgcttttgttgtggagcgcacggatcccggcttctccgtcggcaagcacgagaagaagatgggtatccgcggctcctccacctgcgagctgatcatggaagactgcgtcattcccaaggatcgtatgctgggcaagaagggcaagggcttccagctggccatgaagaccctggacggcggccgtatcggtatcgctgcacaggctctgggcattgctgaaggcgcaattgaagagactgtcaagtataccaaggagcgtatgcagttcggtaagcgtatctcccagttccagaacacccagttccagctggctgacatgcaggccagaacgcaggctgcgcagtatctggtttatgctgctgcctgcaagaagcagaaccatgagccttattctatggacgctgctatggccaagctgtttgcagcggagacggccagtgatgttacccgtcgctgcctgcagctgttcggcggctacggctacacccgtgagtatcccattgagcgcatgatgcgcgacgccaagatcaccgagatctatgagggtacttccgaagttcagcgcatggttatctctgcgcacatgggcgttaagtaattgaggaggtaaaggttaaaatgaaaatttttgtttgtgtcaagcaggttccggatacctccggtaaggttgctgtcgatgaaaatggtatcctgatccgttcttccatgcccaccatcatcaaccctgatgatatgaacgcaatggaagcggcgctgcagctgaaggatgaaaccggctgcaaggtggttgccgttaccatgggtccccctcctgcagagggcatgctgcgtgagctgatcgccatgggcgctgacgagggtatcctgatctctgcccgtgagttcggcggcagcgacactttcgctacgtctcagatcattgccgcagccatcaaccatgtgggcctggaaaaggacgacatgatcatctgcggccgtcaggccatcgacggcgataccgctcaggttggtcctcagatcgctgaaaagctggacctgccccaggttacatatgcagcggaaatcaagaaagagggcaacgaagtcaccgtcaagcgcatgctggaagatggctatatgaccattaaaatgcagacaccctgcctggtgacctgcatcaaggagctgaatgctcctcgctacatgtccgtgcccggcatcttcgagtgctacagcaagcccctgaccattctggactttgaagcactgaaggacgagcctctgatcgagctggacaccattggtctgaagggttctcccacgaacatcttcaagtcctttactcctccccagaagggtgtcggtgtcatgctggagggtgccgacaaggcaaccgcagcagatcttgctgacagactgctgaagaagcatgtcatctgattgaaaggagaaataaattatggcttttaatagtgcagctatcgaagaattcaaggatatctgggtattctgcgagcagcgtgatggtaaactgatgaacaccgacttcgaactgatctctgagggccgcaagctggcggacgagcgcggttccaagctggtcggcatcctgctgggcgacaacgttcagggcattgccaaggaactgggcggctacggtgcagataaggtgatcgtttgcgaagatcctgctctgaaggtctatacgaccgacgcttacaccaaggtcatctgcgatgtggcgatggagaagaagcctgaagtcattctgattggcgcttccaacatcggccgcgatctgggtccccgttgcgcagcccgtatgcacaccggcctgaccgcagactgcacccacctcgatattgacatggatggttatctgaactatctgaaggaaggctccaccatcgatgtagacagcgtgaagtggaacatggaagatatcaacctgaagatgacccgtcctgcattcggcggccatctgatggcaaccattatctgcccccgtttccgtccctgcatgtccacggtgcgccctggcgttatgaagaaggctcctttcgatcaggctaaggctgacgcttgcgagatcgaagtcatcaagcccaccgtgtctgaggccgacattcaggcaaaggtagtggaagtggtcaaggaagctaaggaactggtggacctgatcggtgccgatgtaatcgtttccgtgggccgcggcatcaacaaggatcccgagaagggtatcgagttggccaagcagttggcagacgctttcggcggcggcgttgtgggttcctcccgtgcgctggttgacgctggcctgatcaccgctgatcaccaggtcggccagaccggtaagactgtgcatcccaaggtgtatgtggctctgggtatctctggcgccattcagcacaaggctggtatgcaggattccgagctgatcattgcggtcaataagaacgagacggctcccatctttgacgttgccgattacggcatctgcggcgacctgtttaaggttgttcccatgatgatcgaagcgatcaacgctgcaaaggcatccaaataattctgtccgggtttttgcccggagcaaacgagtccgctttgccatggcaaagcggactcgtattttatcagacgtttgttatcgatgcaatgcaaaacggatataccaaatgggctggggcgaagtgctgtaccgcatgcggcgaatgctcattgcgccgatttcctgcgctcacgcggcttggctggtttgccctgggctgcagaaggaacgggagcatgggaagagacgctatcggatgcgggatgcagcgccgtgcggaggacatagtctgcagctccaaacagggcgcgtttggtgtcaaaacatgcaatataaacctgattgcccatggcagcggagagggcgtcgggcatacggccgaccatgtgcatgtgcgcgccgtacagcgtcatgatctcatcatggctatgcaggtactgtctgtgatcccggcggccgaagtaggcgcagtaggcgtgggggcctgtatagctgtgacgcagttcgccgaaggccaccatgtcggcatagatctgatacaggctggtggagtaggcgtaatcgatcatgtcagggggaaaaccgccggcaggacgcatgttgatctccagcgccacaagatcccctttgcggcccataccttcttttgcctggctcaggcggaaaaactccagatggaaacaacgttttttagcgcccagggcggcaagtacactgcggcctgcagctgcgacatctgcgggaacggacttgctgacgtaataaaaacagtcgtttccttcgttgaccatttccatgatagaaccaggcgaaacgtggctggcggccaggagcacttcgccctggctgccgcacacgccgtcaaacgttgttacctcgccggggacaaattcctccataatgtattcagtatccaatggtttggcaaaaaaggcgctgagatcggcgttgttgtccagtttccaggtgccgcaggctcccacgccactgttgggcttcacgatgataggatagccgacttcctgcacgaaagcggaggcagcctcagcagtggtggccagttgccagcgggcggcagggatccctgctttggcatagatttccttcatgcgggatttgcatttgtatacggccatgtctgccgatttcaaacctgtagtaatattgaaatccgtgcgtagccgagcatcctgttccagccagtattcgttgttggattccagataatcaatttttccatatttgaaagtgaaataagcgacggcacgcaacatctgatcgtagttctccatatcgttcacgcggtaatattcctgcagtgcgccgcgcagggagtcggacagagtttcatagggagcatcgccgatgcccaggactgtcacaccgttttcccgcagtgctatgcagaagttctgcattacggccgggaaatggggggaaatatatacaaaattcacaccaacacgtcctttcttgtctctcacctgtattttagcgcatttttggggggatgaaaagggaggagcagcaaaattttgcgcatcgttcataggggtgtggtataataacaaaagaaaaaacggcagcggtgtgggaggcgctctatgaacattgcatattataaagaatacagcagacagcttggcagaaatatggagtttaagcgctatggttggggcgggaaaatttgtgtagtgtttccctgtttgaacggtcgtttttatgattatgaggattttcgtatgccggaggcaatcgccccatttcttgacagcagaaaactgcagctgttttgtgtggatggcatcgatgcagaaacctggaccgcccagggcgatccgcgccagcggatggaacggcatgaagcgtggtaccgctatattaccgaagaactgatgccccgcatgtatcaaatcactggaagccgggagaaactgatgtgcaccggctgctccatgggggcgtttcatgcggcaaatttcttcttccggcgtccggatctgtttgatactgtggttgcactcagcggcgtgtatggaacggaggaatttcttggagattactgcgacgaactggtgcacctcaattcccctctgaaaagtctgccccatttgagcgacgatcatccctatctggaactgtatcgccaaagccgcatggtgttttgcgtgggacagggagcctgggaagacgcgttgctggaaagcacccgccaattggacgaggtgcttcgctgcaaagggatccccgcctgggtggactactggggaaccgatgtggcacatgactggccgtggtggcaccggcagatgaattatttcctgggacatttatttccctgaggtacagaaaagatgaaggatcatataacaatacaaacgcagaaaagcgaagcagagctggaagcattgatcgaggcgctttgcaccattccagccccgttgggccaggagcgggccagagcggaatttgtgcaggactggctgaacggcaacggactgactggcagctggatcgatcgcagtgggaatgtcatttttccttactcctgcaattctgaaaagtatatagcctttacagcgcatatggacacggtttttccggaaaccgagccgtttccctttgtccgggaggggacaattgccaaatgccccggcatcggggatgatacggccaatatggctgcgctgatgctggccgcgcgttgggtcgtacagcagaggctgtgctttccgtattcgctcctgttcgtatgggataccggtgaggaagggctgggaaacctgaacggagtacggggcctgatggaggattatgcggatcacatagcagccctggtggcgttggacggcgtttatcccgggctgatcaacggagcggtaggctcggtgcgctggcgcatccgcgcaaaaaccagcggcggccattcttttcgaaactttggcagccccaatgccattgagcgcatggcggcgctgatcggggcactgtatgcccagcctctgccggatgcagagggcgcccgcactacgtttaatgtgggcagcattgccggcggaacttcggtgaataccattgcccaggcctgtgaaatcttatatgaagtgcgctcggatagcgctgcggcgctgaatgccatggaatgcgcgctgaatgccctggtgcgcgatgcgcagcagcgtggcggcgtggatttctcctgcgaagagatcggccgccggccggcctccggcgcgcgggcggagggacaggacgcgctggaatcccattggaagcgtgcggtgcaggcggtactgccggggcaggaggtgcgctgcacttctggctccaccgactgcaatatccccctttccatggccattcccgccatgtgtgtgggagcctatcgcggcggcgcggcccatactcgtaaggaatggatcgactgtgccagcttatctactggttatgcgctgctgcttcacttgttccattcgtttgcgcaggaggatcagcagttcttgtaattgtatgccaacaagaattcatggcggcaatgggaagcggggacttggtaaagtctccgcgttctggtatactatagagcagcaacagacaggcaaagggggcaggcagatgcagacgatcccggtgattgcggtagcggcctggtcgggtacgggcaagaccacgctgctggaacggctgatccctgtgttaaaggaacgcgggctgcgtgtatgtgtcatgaagcacgatgctcatgagtttgaagtggatcgggtaggaaaggacagctggcgcatgacgcgcgccggagcggacgtcacaatcctgaccaatggcgcccatgcggctattctggaaaaccggcccgtgacagcggaagcgttgctggagcaggtacatgacgtggatttggttttgacagaaggctataaacatggcctctggaaaaagattgctctgtaccgtgcggcggtgggcaagccttttccctgcgctttggaggagtgtatagctgtggtgacggatacgccgattgcagattgcccggtgccctgcctgggctttgaagagattgaagccctggcggatcggatcgaagaggagatcggaagatgaaattggtaagaacggaagaagccgtgggccatgtgctctgccacgatatgacgcagatcatcccgggcgtaacgaaagacgcccggttccgcaaggggcatgtggtgaccgaagcggatattcctgtgctgctgagcatgggaaaagagcacctctatgtgtgggaaaaacaaccggggatgctgcacgaggacgaggcggcggaaattttgtttgccctttgccacggggaaaatacctgccggaaggcgccgccgaaagaaggaaaggttgaattgattgctgcttgcgacggtttgttccggatcgagcgggaaggcctgcgggcggtgaatacgctgggcgatatgatgatcgctgcccgcgctggggattttgccgtcaaaaaaggagatagcttgggggccacccgtgtgatcccgcttgtcattgaagcggagaaaatggatgcggcttgcgctgcggcgggggacaggcccctcttttccgtgctgccctttcaaaagagaaccgtggggatcatcacgacgggaaatgaagtgttcagcggccgggtgcaggatgcgttcggaccggccattcgccaaaagctggccgaatatgacgctgaggtgttggggcagaccattttgggggatgacccggatgccattgccgcgcagatcgccgcatacatcgatcagggggcagacatggtgctctgcaccggcggtatgagcgtagaccctgacgataccacgcccacggcgatccagcgcagcggtgcgcagattgtgtcctacggcgcaccggtgcttccgggggccatgttcctgctggcctatcgggatggggtgccggtcatggggcttcccggctgtgtcatgtatgccaagcggacggtgttcgacttggtgctgccgcgcattatggcgggcgaacggctgagccgggaagatctggtgcgttacggggagggcggactgtgcctgaattgcccggtgtgtaccttccccaactgtggatttggaaagtgaggatagaatgggaaccaatcagctgaatcattttgacgagcagggcaacgctgtgatggtagatgtgacggacaaagcggaaacggagcgctgcgccgtggcgcggggcagcatttatgtgacgcgggagatttttgacgccattgctggcggaacggtgcgcaagggcgacgtactgggcactgcccggctggcaggcattctggcagccaagcagacgccgcacctgatcccgctgtgccatccgctgctgctgagcaaagcgagcgtggattttgagctgcatgaggatacgctctgtgtggatgcggtctgcacggtaaagcttcgggggcagaccggtgtggaaatggaagcgctgaccggcgtcagtgtggcgctcctgacgatttacgatatgtgcaaggccctgagcaagaccatggaaatcggcggcattcatctggagcggaaatccggcggcaagagtggaaattatactcgggaggaggagaacgtatgaactaccgtgtggcagtgctgacgctgagcgataagggcgcccgcggcgtgcgaaaggaccggagtggccccgccgttgcagaactggtgtgcgcagcgggatttgaagtcgtttatcagaaactgctcagcgacgatctggaagcgatgcaggcagagttggcgcggctatgcgatgagcatgtgtgcgacctgctgctgacgactggagggaccggcttttccagccgggatgtaacgccggaagctacgctggcggtggccgagcgccaggcaaacggcattgccgaggccatgcgctggcactcattgacgatcacgccccgcgccatgctcagccgcggtgtcagtgtgctgcgtaagcagacgctgattgtcaatttgcctggttccgaaaaagcggtgcgggagcatctttcttatctcctgccggtgctgccccatgccctgggcatcctgacggggcgggaaaacgaatgcggcggtgatggggcgcagtgtgcccctgcgatagaggaggcggagtaaatggcgtcctatccgattttgctgtctctggaagatggacgggaacggatcctgcagcgcacggcgccgctggggcgtgaatctgtttcgctggaagaagccgacggccgcgtgctggcggaggacgtgatctccacggaagaccttccgccctttccccgctcgccctacgatggttatgctttgcgtgcggaggatacacgggaagcctctgagaagcagggggtgacactgcgtattgtggaagaaatccctgcgggccacgccccgcaaaaagcgctgacagctggatgcgcagccaagattcttaccggtgcgcccattccattcggtgcagatgcggtggtgaaatttgaggacacgacgtttgatgcgcagacggtgacggtttacacgccctgccgcagcggtgaaaacattgtaccggctggggaagatctccgacggggcgaaaccgtgttgcgccgggggacgctgctccgcggcgcggcgctggggctgctggcggggctgggccgcagcgagtgcctggtgtaccaccgtcctttggtggagctgatctccacaggggatgaactggtgggagtggaacagactccggggccggggcagatccgcaacagcagcgtctatgcccttgcttcctatgccaggcgctgcggcgcgctgacgcgctgtgccggaattgtaccggatcagacggagtgcatcgcggcggctgttgcacgcgcggcgggtcgggctgatctggtactgaccaccggcggtgtgtctgtgggggattacgaccggctccgtgcggcgctggaacatctgggggcggaaatcctcttttggaaactgcgcatcaagcccggcgccgcctttttagcggcggtttatcaggggacactccttttgggcctgtccggtaacccgtcggcggctgccgtggcctttttcctgctgggtatcccagcgctaaggcggatagggggctgggaaaaggcggaactggaaaaaatccgcgtgcacatgggcggtgcttttgcgaaaaaaagccccaatcgccgttttctgccggggcggttggagatgtgcggcggagcagcctatctggcggtggccgaacgccagggaaacggcatgctgcatccattgttggaatgcgatctgctgggcgaactgccagccggcagcgcacccatggaaaagggaagtgaaattgacgcgtaccggctgttcatttgatatgtagagcgctcctgcaaaggaacccaaaccctttgcaggggcgtttttgcgcagacgggcgcccttgctcaatgacagtggacatggtacaataaaagaaacgaaagggggaaccgccatgggcacctatcttttggcgctggatcagggaaccaccagctcccgcgccattttgtttgactgccggcagaatattgttgctgtggcgcagaaggaatttgcgcagcagtatccccggcagggctgggtagagcacgacgctatggagatctggtcctcggagtatgccgtgatgatggaagtgctggcaaaagcagatgttccagcccgggatatcgcagccatcggcatcaccaatcagcgggaaaccacggtgctgtgggaccgggaaaccggccggcctatttacaacgccatcgtttggcagtgccggcgcacctccggccttgtggacgatctgctcgctcaggggtatggggatcatattcgaaaaactacagggttggtgccagacgcttatttttccgccaccaagatcaaatggatcctcgatcatgtagagggtgcccgggcacgggcagaagaggggaaaatccttttcggtacggtggacacctggcttctctggaaactgaccggcggagcggtgcacgccaccgatgtgaccaatgcctcccgtaccatgctctacgatatccgcaagctggtctgggatgaaacgctcccgcgggcgttggatatcccacgtgccatgctgccacgggtctgttcctccagcgaggtgtacggttatgccgcgctgcagggcgtgcaggttccagtttccggaattgccggcgatcagcaggcggcgttgttcggccagacttgctttactccgggggaagccaagaacacatacggcaccggctgctttttgctgatgaacaccggccatgtgccctgcgaaagcaaaaatgggctgattaccaccattgcagtggggcttggggatgaggtacagtatgctttggaaggctcggtatttgtgggcggtgcggtgatccagtggttgcgggatgagatgcgctttttcaccgaaagccaggatgctgagtattacgcccagaaggtgcccgacactggaggcgtgtatctggtcccggctttcactggcctgggcgcgccatattgggatatgtatgcccggggctgcatcgtgggcctgaccaggggtaccaagagggagcacatcatccgtgcggcccaggagtccattgcctaccaggtggccgatttggctgagtccatggaaaaggatacgggcctgcctctttcccatttgaaagcggacggcggtgccagccgggatcggtttctgatgcagttccaggccgatatcctgaaccgtccggtgcgccgtccggtgatccgggagaccaccgctctgggggcagcctttcttgccggacttgccgtcggcgtatggagcgatcgggaagcgatcaaagcgctctgggtttgcgatcaggagtttacgccgcagatgacggatgcacagcggcaggcgctgctgcgcgactggcaccgcgctgtgggccgcagccgcggctgggcggaagaataaaaaattcagaacggtttgtattcaatgcagcaggcgcgtgtgctttctttgcacacgcgcctgctgtgttggaaagggggtgagcgaacggcattggaaaaagagaaaatatgtcactcattttcagaaaaatgacgtgtgcatccttccgtggaaagaagcacacgtcattgtgcggagtgatctgcagtgcagactgcagaccgggtatattcaaaaagaaacgagagaataaaataatcaaatattgaacagcatttcgccgtaggtgggatagggccaatattccgatgcggtcatggtttccatttcatcggtgatggcgcgcatctcctgcatcagggcaaacaccttgtcgtgataatacagcgcggctttctgtgtgtcttccggtaccttgatgagggctttttccaaatcagcgcatttgccgtacagtccgtcgctcagggaggagagctttttcagaagttctgtatctgctatgcagggaatatccttgctgaccgcccgcttgcccaggatcgaagagctgagggcgtctgtgtatgcagaaactgcgggcaggatatcgcgcttgaccatgtccacggcggtctgcgcctcaatgttgatgatcttgctgtagctttccagatgaatctcatagcgggctttcatctcggtctcggtgtagatgttatgcttggtgaaaagcttgatgttctttttggagatataagcgcgcatggcttccggggtatttttcaggttggccagcccccgggcttccgcctcgccgatccaggaatcgtcatagccgttgccgttgaaaataatgcgtttgtgttccttcagcgtttgctgcagcagtgcctgcaggtctttgttgaaatttttggatttttccagcttgtcggcaaactggcataactcttcagccacaatggtgttgagcgcgatattggggccggagatggactgctcagaaccgagcatgcggaactcaaacttgttgccggtgaaggcgaagggagaggtgcggttacggtcagtggtgtcctgcgggatatggggcagcgcgtccacgcccacttccagggagctttcctgctggcccttgtatacggtgcctttttcaatggattcgagcactgcgttcagctctgagccgaggaatacggacaccacggcgggcggcgcctcatttgcgcccaagcgatggtcgttgccggccgaagccaccgtacagcgcagcatctcctgatagtcatccacgcccttaatgatggccaccaggaacagcaggaattgggcgttgtcacggggcgttttgccgggatccagaagatttttgccagtgtcggtggaaatcgcccagttgtcgtgcttgccggagccgttaacgccggcgaaaggtttttcgtgcagcagacacaccagaccgtgctttgcagccacgtttttcatgatctccatggtcagctg

SEQ ID NO: 1618 - DNA, 32759 bp, Unknown
  16S sequences of unknown bacteria
gactttggccgcgcgcaggcgcgccttgccgcgctggacccgcaggccgtgctgcggcgcgggtacgccgcggtgcgccggggccgcgagcccatcctgcgcgccggccaggtccggccggaggacgagctgttcctgcgctttgccggcggcggcgtttcggcccgcgcgctcgcggtgtttctggacaacgacgagggggagacaaacccatgaagaaaatgacctacgagagcggcatggaagagctcacggccctgacggagaagatcgagagcggagagatgacgctggaggagacgctcaaggcctacgaaaagggctgcgccctggccgagaagctcagcgccctcctgcaggaggggcgcggccgcgtcgaaaagctggaaaaggacggctcccgcacgccctttgacgccgaggagcaggaggaggattgacgatgcacgcgcagttcgaacgctatcgcgccatggtggaggcggcgctgcccctcgccctgcccaaggacggcggctgggccgaggtcatcaccgacgccgcgcgctattcgctgctcgcgggcggcaagcgcctgcgcccgtgcctggtgctggccgcggccgagcgcgtgggcacggacctgcgcgactccccgtccgctttgcgggaggcgctgcccgccgcctgcgccatggagatgatccacacctattccctgatccacgacgatttgcccgccatggacaacgacacgctgcgccgcggccggcccacgaaccacgtcgtctacggcgaggcgatggcgatcctggcgggcgacgccctgctcacgcacgcctttgcgcacatggcgcgcgcggcgcaggccaacccggagcacgcgctccggcacctgcgtgccatcggccgcgtcgcggaggcggcgggcctgaccggcatggtcgcgggccaggcgctggatgtgctctgcgaaaagcagggcgcagaccccgcccgccgcgaggagcagctccacttcatccataagaacaagaccgccgccatgatccgcggcgcgctgctggccggcgcggagatcggcggcgcgagcgagcgggagctgaccgccctttcccgctacggcgcggcgctgggcctggccttccaggtcgccgacgacatcctggacgccacgtccaccaccgaggaaatgggcaagaccgtcggcaaggacgaaaaagagggcaagctcacctatgtcgccctctacggcgtggacggcgcgcgccaaaggctcgacagcctgaccgaggaggccgtccgcgaggtgcagcccgtggacgccgacggcttcttttccgatcttgcgcgggactttgccgcgcgcaaacactaaggaggcagcccgtgaccaacaacatcctgctcgtcttccagaacccgtgcctgatgcctgcggcggtgggctgggtcagctcgcagatcatcaaggtgctgctgaacctgatgctgcttcgccggctggacgtgacgcgctttgtcggggcgggcggaatgccctcggcgcactcggcctttgtcacggcgctggccgcctccatgggcctgaactacgggtttgacagcgcctacttcgccatcgcggcggcccttgccgtggtggtgatgtacgacgcggcgggcgtgcgccgcgccgccggcaagcaggccgccaagatcaataagatcatcaagcacctgatggacaagcgctccggctaccaggacacgcaggagcagctgcgcgagctgctcggccacacgcccctggaggtcctggccggcgcgctgctgggaatcatcatcgccatcctctgggtgctgtgacgggcggcgcgcgccgcccgcccgcaaaggcggcggcattttttttgcaatcccgccagccccggcgcaaggcacgggcgaaaaaaagagagaggggttccatgtcgattttagagcaaatccagggcggcgcagaccttcgccggttctccctgcgcgagctcgagcagctctgccaggagatccgctgggagatcctgcgcgtcgtcgcgcgcaacggcggccacctttccagcaacctgggcgcggtggagctgacggtcgcgctgcactacgtctacgacctgccgcgcgacaagctcctgttcgacgtgggccaccagtgctatgcgcacaagctcctgaccggccgcctgcacgagttccccaccctgcgccgcgcgggagggctgagcggcttcccccgccggcaggagagcgagagcgacgccttcggcgcgggccacagcggcacggcggtctccgcggcgctgggctttgcgcgcgcggcgcgcctgcgcggggaggactaccactgcgtcgccctggtcggggacggcgcgttcatggacggccccaacgtcgaggcgctcaacgacgccggccgctcggagctgccgctcgtcgtcgtgctcaacgacaacaccatgtccatctccaagaacgtgggcgcgctgtccgaatacctgaaccgcctgcgctccaaccgggggtactggcgcttcaagagccgcacggccggattcctcaagcgcatcccgggcgtgggtccggcgctgcacgacgcggtctattccgtcaaaaacgccgtaaaatccctgctcgtccacggccagttcttcgaaaacctgggctttacgtacctcggtccgatcgatgggcacaacctctccctgctcatccggaaccttacgcgcgcgaagaacctcggccgccccgtgctcgtccacgccgtgacgcagaagggctacggctataagcccgcggaggaaaagcccgacaagtaccacggcgtcgcgccctatttcgtcgagcgcgaggccgcgcccgcgccgggctttgacgcctgcgccggccagacgctgctggagatggccgcggaggacccggcggtctgcgtcatcaccgccgccatgcgggacggcacgggcgtcgcgggctttgccgaggcgcatccggaccgcttcttcgacgtggggatcgccgaggagcacgccgtcaccctggccgcgggcctggccgcgggcggggccaagcccttcttcgcggtgtattcgaccttcctgcagcgcgggtacgaccagatcgtccacgacgtggcgctgcagaacctgcacgcggtcttcctgatcagccacgcgggccttgtgggcgaggacggcgcgacgcaccagggcgcctttgacctctcgttcctcacgcacgtgccgaacctgaccctccttgcgccctcctgcgcgcaggagctcgccatgatgctgcgctgggccaaggacgcgccgggcccggtcgccatccgctatcccaaggcggagagcgccgccgcgcacaacatcgtccccctgcagaaaggggattggcaggtggtcagcgtcgcgcaccgggcgcaggccgtggtctttgcggtggggtccatggtgggtcccgcgatgatggccgccgacaccctcgccctggaggggctggaggtcgaggtcgtcaactgccgcaaggtcaagcccctgcccgaccgcatgctggaaaaatatgcgcgcctgcccatcgtgaccctggaggagaacgcggtgctgggcggctttggcgcgcaggtggccgtgcggtgcgcgcagctcggcctgggcgcgcgcgtcctgccgctgggcatcccggacgccttcatcccgcacggcacgcgcgcgcagcaactcgccggctgcggcctggatgtcgagggcatctgccgcgcgctgcgccgcctcctcggcgccgacaacccgaaagatgcgcaggaagtggggaaggactagaacatgaagcgagagagattggacgaggcgctcgtgcgcctgcaaatcgcagacaccgtggaaaaggcccgcgccctcatcatggagggccgcgtcttccagaacggccagcggctggacaagcccgcgctgccgattaagaccgatgccggcctcgtggtcaagggcgacaagatcccctacgtcagccgcggcggcctcaagctcgagcgcgcgatccgcgccttcgcgctggacctttcgggccttacctgcctggacgtcgggtcctcgacgggcggatttacggactgcatgctgcaaaacggggcgcagcgcgtcttttccgtggacgtgggctacggcctgctcgactggaagctgcgcaacgacccgcgcgtgacggtcctcgagcgcgtcaacgcccggaacctcagcccggagctgctcggcggctgcgcggcggactttgcctccatggacgtgtccttcatctccgtgcgcacggtcctgcccgcggtgcgcacctgcgtgcgcgaaggcgcgcacctggcggtgctcgtcaagccccagttcgaggcgcggcgcgagcaggtgggcaagggcggcatcgtccgcgacccgcaggtgcaccgggaggtgctgctgggcgtcatcgccgctgcgccgggcatgggctttgcgccgctgggccttgcggtttcgcccatccgcggcgcggaggggaacgtcgagttcctcctgcacctgcgcgcaggcgcggcggagcccttcaacgccgagggcgcggtcgaaacggcgctccaggccgtagattctgtataaaattgcaaaaagcgttgtatattttgaagttttcgtgtatactgtaggaaaagggaggacgcggatgaagatcgaacgggtaggtctcctgcaggggccgcaccgcgggaaggtggaggcggcggtgcttgcggcggcggcgcgcctgcgcagcgaggggatcgaggtgtgcagcgaccgcgcggagatctcgggcggcgaggtcctttcccgcgaagcggtcatcgcgggaagcgacctgctgatcgtctgcggcggggacggcagcatccttgcggtcgcgcggcgcgcggcggcgcgcagcgtgccggtgctgggggtgaacttcggccagctcggctttctgtccgaggtggaggctgcggggctctctggcgcgctggaccgcgtgctcagcggggactacgaggtcgagcggcggctcatgctccgggcgagctggcagggccaggaggtggacgcgctcaacgacatcgtggtccggcgcgagtcgtcgctggccgtggtccgcgcggacgtggaggtggacggcctgaagctggaccactatgtcgccgacggcatcctcgtctccacgcccacgggcgcgagcgcctacgcgctctcctgcgggggggcgatcgtccatccgcggctgacgtgcctgtcgctgatggcgatctgtccccactcgctgcgggcgcggccggtcatgctcgcgccggaccaggagatctccgtgcgcatcgaggcgcggtccctgcccgcgatgatctgcgcggacggccaggacctgatctccatggcctcgggcgagagcgtgcgcatccgccgcgcgccctacgacgcgcggctcatccgcctggaccggcgcgactttttcgccaaggtgcacgccaagctcgtcgagcgctaggcgcgccgcaaaaccgtcccttcccatctcacttgcaaggaggaacgcatgaaatcggtacgacatgccgtgatcaaggagatcatcgaatcccaggaaatcgagacccaggaggagcttgcggctgccctgcgcgcgcgcaacatcgacgtcacgcaggcgacggtctcccgcgacatcaaggagctgcgcctgctcaaggtcctctccgacaacggcgggtataaatacgccaccgccgacaaggccgagcacggccttgcggatcgcttcatccgcatcttcaacgaatcggttttgagcatcacgcctgcgggcaacctgatcgtggtgcgcacgctctcgggcagcggcagcgccgcgggcgaggcggtcgactccctcaagtggccggagatcgtgggcaccatctcgggcgacaacacgctgctggtcatcgcgcagaacgagcaggacgtcgccaccctcatgcgcaagtttgagcgcatgaagaaataaaggaggaatccgcgccccccggcgcaggagggatcgagacatgctttgtcagctgagcatccaaaacatcgcgctcatcgacgcgctgaacctggagttcaccgaggggctcaacgtgctcacgggcgaaacgggcgcgggcaagtccatcgtcatcgacgcgatgaacctggccctgggcgagcgggcggaccgcgacctcatccgcgccggccaggaccgcgccgtggtcgaggcgctctttgacgcgagcgcctgcccgtcgctcctccccctgctggaggagaacggcgtggaggccgagggcgggcagctcatcgtctcgcggacgatcaccctctccggtcgcaacatcgtgcggctcaatggatcgctcatcccgctcagcctcctgcgccaggtgactaacgccctggttgacgtccacggccagcacgagcaccagtccctgctggacgagggccggcacctgaagttcctggacgactacgcccacgaggagatcgccccgacggcccagcgcgtgcgcgagctcttcgacgcgtaccgcagcgtgcgcctgcgcctgcgcggcgtgcgccagggcacaaaggagcgcgcccagcgcctggacatgctccgctaccaggtcgaggagatcgaccgcgcgcgcctttcccccggcgaggaggaggagctgaccgagcagcgcgacctcatccgcaacgccgagcgcatcctctcggcgctctcgcagtgctccgccttcctggacggctacgaggacatgcccgcctgcacggattccatccgccaggcggtgtcgattcttggcggcatctccggctacggcgcgcagttcgcccagctcgaggagcagctgcgcgacatctactacacccttgaggacatcgccatgcagatccacgtccaggccgagaagatggactttgacccggcccgcgcggactacgtcgagaaccgcctggacgagatcaagtccctgaagcgcaagtacggcaacagcgtcgaggacgtgctccgctactgcgaggacgccaaaaaggagatcgaccagctctcccggcaggagaaggactccggcgcgctggaccgccgcttgaacaagctcgcccgcgagctctacgccgcctgccgcgagctgagcggcctgcgccgcgttgcggccgagcgcttctgcgccgcggtcgaggcgcagctccgggacctgggcatgaagagcgcgcacctgcacgtggacttttccgccctgcccgcagaggaggaggccgaaaagttcttttccgcctccggcctggaccgcgtgcgcttcctcatctccgtcaatgccggcgagccgctcaagcccctgagccgcacggcctccggcggcgagctctcccgcatcatgctcgcccttaagaccatcgccgccgacagcgacgacgtgggcaccctcgtctttgacgagatcgacaccggcatcagcggccgcatggcccaggtcgtcggcgagaagatggccgccatcggccggcgccgccaggtcatctgcgtcacgcacctgccgcagatcgccgccctgggcgacagccaccatctcgtcgagaagcgcgaggaggagggccgcaccctcacgcgcgtgcgcgccctgtccttcgaggagcgcgtgcgcgagatcgcgcgcatggtcggcggcgcgcaggagaccgccgcgaccctctcccacgcgcgggaaatgctccagatggccgccgagctccgaaatcgcttaacttaaaatttacaaatcgtgccaaattgcaaaaaaaactttccggatgtatatttccccgcgcagcatacatcaatttagatgtgggtttgcgtttcttttctggattttgcgtgttttttgccgtgaattttcgttttctttacacaaaaagccgcacattcgaaaaaaacaatcctccaggtagaaaataccgctattgaatgtttgagagggttgttatacaatgaataagtaagttgcttcataactatttctgcggctgtaaaaggtacgcggcatcggaggtaagtatgacacgcgaagagtttatcaaacggaagatccgggaaaagggcatgacgctcaaggattatgcgcgctcgatcaacatgccctattccacgcttctttccatgctggcgggcaatctgggcggcgcctcgctggacaacgtggtgcgcatctgcaatggcttggacaccagcattggcacgatgcagtccgcgtacatggatggcggattggagaacaacgtcacggacctgagcgagcgcgaaaagaagctcgtcctcaactaccgcgcggcgggcgtcctgcaggaggccatcgacaagctgctcgacctcaagtaatccagtaagaaaaaactttccatcgggcctgcggcccgaagagaatgcggccaactagaccacgtcgagaaacgggttccgacatctcccagaataacgcggatgcaaagtccacaccttaagcgtgaaaaatcgcaaatggggtgtggaaaatgaaagcaaaacgggtgctgggagggatattggcgtgcgccctggtggcatggaactccatgccttccgtccagagcttgcgcaaaatcccggacctgattcatttgacgccgggcgaggaaaagtcgtattctttttttctgcccataaaggcggaggtggcggaggacagcacgtgcgtgctctcctcaacggatgagacgctcggctcgcgcgtgacgacgctcaccacggaggagccgggcagcgcgcgggtcgagttctccctcctgggatggattccgctcaagaccgtcgaggttcgcgtggagaattcgcgcctcctcatccccggcggccagagcatcggcctgacgctgtttacggacggcgtgttcatcgtcgacagcgcggaggtctaccttccggacggcacaacggtcaaccccgcgcgcgacgcggggctcagctccggggacctgatcaagcgcgtcaacggcgcgtccatcgactccatgcaggacctgacggacgccgtgcgcagcagcggggacggcgcgctcaccgtggagtatgtgcgcgacggccaggagcgcaccgcgaccgtcgagcccgcgacggatgagaccggccagcgccgcctgggcatctgggtgcgcgactccaccgccggcatcgggaccctgacctatatcgaccccaaggagaacgccttcggcgccctcggccacgcggtgacggacctggacaccggcagcatcctgcccatcgaccacggccaagtctacgtcagcgagatcgtggacgtgcagaagggcgcccgcggccaggccggggagctgcacggcgtcttcactgggaacttcgacgcgctggaagccctgaccaagaacacggaattcggcgtctacggcagcgcgcgcgacccggaccccaacccgctctacccgcagggcctgcccgcggccgcgcagtccgaggtggagctcggccccgccacgatcctgaccaccatcgacggcagcggcgtgcaggagtttgcctgcgagatcatccgcctgacgccccaggcctcccgggcctcccgctccatggtcgtcgagatcacggacccggagctgctcagcgtcaccggcggcatcgtgcagggcatgagcggcagccccatcctgcagaacggcaagatcgtgggcgcggtcacgcacgtctacgtcaacgacccgaccaagggctatggcctctacatcgactggatgctcgacacccagtgagagaggacggcttttcagccgccctcttcagtccctaaaaagagtgcataactcatcttttaacaaatgcacaaaaaagagtgcatggtgtctttggcaggaaatcgcgcccgcgcgtcgaaccctctttccatgggtgcgaaagggggcgggcagatgcgcatctatatccttcgccggacgctgggggatgccgagcgcgcgcaggcgcagatccgggcgcgcggcgcggaccgcgtcgtgggccttgccgcgggcggccgtgtggacgaggaggcgctgcgccgcagcggcgcggatctcttcgtcctggacgcggtcctgccggggcaggacggcctcgcgctggcccgcgcgctcgcgcccaggccctgcgtactgctcctgccctgcgcgcagaacctgcgcgcgccaaagaatgcccgatttgcccttgaggcggagctcgccgcggcgctggacgatgtgcgcggcgcggccctggccacgccggaccgaaacgccctcggcgaggagctcctgcgcctggggttcaagccgcagacgctcggcacccgccagctctgccgcgcgctggagatcgccctgcaggacgagggggcgctggccgacgtgcgcagccggatctacgcgcccatcgcgcgggagatgcgccgcacgcccgacagcgtggagcgcaacatccgctacgccatcgagtgcgcctgggtgcgtggcgacctgcgcgcgctgcagtcccggttcggctataccgtggaggccgagcgcggcaagcccacgaaccgagcgttcctcgcgcagatctgcgagcacctgcgcctaaggcgcatggacgcgcaggaggaaacatacccttcctaaaaggggagggatgcgccttgtggaaagacgcggcgcgcggcgcaaaaaaacacctggcagactatggaatcggatatggaatcgccgtctttctcgccattgcggcggcgacgagcggttttcgcacgggcggggagggactggatctcttttcgccggtctccgcctcggcgggcgcgctgctctccctcctgcgggagggacttgcggtgctggcgctctggctctgctccctgcatccctttggctgcgcgctctgcgcggcgctgctcgtgagccgggccttctccgtggggatgggctggagcgcgtggatcgcggcgcacggctgggcgggcgcgctggcctttggcgcgttgctcgtgccgcaggggctgttgtcgcttgcggcgtggtgcgtgggctgctgcgtgacggcctatgccgcgctgcgcgcgcgcatcccggagaagacggcctatgcccgcctgctcgccgccgtctttgcggcgcaggcgctcgccctcgcgctgcggtgcctcgcctcggcgtgccttgcctaagacgcggaaactacgaaggaggaaaccccaactatgaagaagaaaaatcgcgccgtcgtcgtcgtgctggacagcctgggcgtcggggaactgcccgacgccgcgcagttcggcgacgcgggcagccatacgcttttgcacatcctggccagaatgcccgacctcgcgctgccgaacctgcgctcgctcgggctcctgcgcctgctgggcgcgcaggacgcggtcctgccccaggcgggctgggggaagatggccgagcgctcgcgcggcaaggacacgaccacaggccactgggagctgagcggcctcgtgctggacaagccgttccccacgtttccgcacgggttccccgacgcgttcctggagcggttctcccaggcggtcggccggccgtgcatcggcaactgcacggcctcgggcacggagatcatccagcgcctgggggacgaggccgtccgccgcggcgcgctgatcgtctacacctcggccgacagcgtgttccaggtcgccgcgcacgaggaggtcgtgcccctttcggagctctacgcgatctgccaaaccgcgcgcgggatgctcaccggggaccttgccgtcgggcgcgtcatcgcgcggccctttgtgggcggccaggggcagtacgtgcgcaccgccaaccggcgcgacttctccctggagccgaccggcaggacgatgctcgacgcgctgcaggccgcgggccgggacgtcctggccgtgggcaagatctccgacatcttcgccggccggggcatcacggagtccttccccacgcacgggaacgaggagggcgagcgcgcgctgctcgacctgctcgagcgcgacttttccggcctgctgtttgtgaacctggtggattttgacatgctctacggccaccgccgcgacgcggagggctatggccgcgcgctggagcacttcgacaggacgctgggcgaggcgctccggcgcctgcggccgggcgacctcctcgccgtgaccggcgaccacggctgcgaccccaccttccgcggcacggaccacacgcgcgaatacgtccccctgctgctgcacggcggcgcgaccggggacctgggcgtgcggacgagcttttcggacctggcggccacggtctgccggcacctgggcgtggcctgggcctccggggaagccatcgaataaacgcgcggaatccgggcataaatccctcccgttctgcttacctatggagcagacgggagggattttgcatgaaaaagcgatgggttgccgcattgcttgcggcgctgctgctgctcttgcccgccgcggcgcgggcggagagcgccaccacgcaggcggagaccgcccccgcgcagggcgagcccctggagagcgagctgcccatggaggcggacgcggtctcggtgctgctcctggatgcgcgcagcggaaccgtgatcctggagaagaacgcggacgagcagcgcccggccgcgagcctgacgaagctgatgacgatcctgctgaccctggaggcgctcgatgccggagagatcgcccttgcggacgaggtcaccgtctcggaggcggctgcgggcatgggcggctcgcaggcgctgctggacgcgggcggcgtctacacggtggaggacctgctcaagtccctgatcgtggcctcggcaaacgactccgccgtggcgctggccgagctcctgcgcggcagcgaggacgcctttgccggccgcatgaacgagcgcgccgcggaactcggcctttcgggcacgcactatatcaacgcctcgggcctgccggccgaaggccagcacaccaccgcgcgggacatcgccgcgctttcgctcgaagtgctctcgcatcccctgtactttgactattccaccatctggatggacgagatcctgcacaagaacaaccgcgtgacggacctggtcaacaccaaccgcctcatccgcttctacgagggcgcggacggcgtcaagaccggctccacgagcgaggcgggctactgcatcagcgcgaccgccaagcgcggcggggagcggttcctggccgtgatcctcggctcctcgacgagcgcaaagcgcttttccctggcgcaggagctcttaacatacgcctttgaccactatgagacggcggagcttctgcatcagggggatgtcgtcgtgcagggcgtgcccgtggaaaacgccgtcgtgcgccaggcggaccttgcggccaaggcggacctgacgacgctcacgcgcaagggcgagggcgcgagcctcacggtggaggtgagcgcgcccagcgtcctgcgcgccccgctttccgccggggagatcgtgggcgaggccgtcgccatgcaggagggcgaggccgtcgcgcgcgtgccgctggtgctgacgcaggacctgcccggccgcagttaccgctcctccctgggcgaagtcctgcgcctgtggatgcagtgcgccgcgcaggacgggatttgacgcggctggaaaaatatgatacggtagagaaaattcgattgtacgaaagaggggaatgcgcatgtgcaatgtgaaccaggaccgggtcgagcgcccggaaaaggcggagaagtttgtgcccgagtaccgcggcaatctccgcgaccacatgatcgagatcccgcgctgcatcgcccaggccagcggcatccgcgtgtttggccgccggatcaagtccctggtctttaccacggacgtggccatcatccgcaacatcaatgcggacgcggtcatcgccgtctatccgtttacgccccagcccgccatcacccacgcggtgctgaccgcggcggagatgcccgtgttctcgggcgtcggcggcggcatcaccagcggcgcgcgcgtggtgaacctggccatggacgccgaggccctgggcgccacggccgtcgtcgtcaacgccccgacgagcaacgagtgcatccgccggctcaaggaggtcatcgacatcccggtcgtggtcaccgtcgcgcgcatggacacggatgtcgaggcgcgcctggccgccggcgcggacatcctcaacgtctcggccgccgaaaacaccgcgcccctcgtgcgccgcatccgcagcgagttcccccaggccgccatcatcgccaccggcggctccacggaggagacgatcctgcgcacgatcgaggccggcgccaacgccatcacctatacgccgccgacgtccgcggcgctcttccgcgagctgatggtcaagtaccgcggggattgaaccggcctccccgcggccccgaaagggccgaaaaatactccgcaaaaaataaattttttctcggcgaataaaggggcttttcaacatcggtaaagtatgttaaaatggcgttatcgagttctttgattacggaagaaggaggaccccattccatgaaagactatacttctcagaatattcgcaacatcgcgatcgtcggccacggcggcgagggcaagacgaccctgaccgaagccctgctgtggaccaccggcgcgattgaccgcatgggccgcgtggaggaggggaccacggtctccgactacgatccggaggagatccggcgccagttctccatcagcaccgcggttgcccccgtggaatggaaggacacgaagatcaacttcatcgacatccccgggtatttcgacttcatcggggagatgatgggtcccctgcgcatcgcggacgcggcgctgatcgtcatcggcgcggtgacgggcctgagcgtcggcgcggaaaaggccatggcctacaccagcaagcactccatcccgcgggcgatcttcatcaactccatggaccgcgaaaacgccgattacgacaaggtcatctcccagctcaaggagaagtaccagaccgccatctgcccggtcatgctgcccatctacgaggacggcaagttcatcggcttctcctcgctggtcacgggcaagtcctaccgctacctggacaagttctccaaggagatggacaccacgcccgagatgcaggagaagatcgacgaggtctgggaagaggtcaccgaggctgcggcctctgcggacgacgagctgatggagaagtacttcgagaccggggagctcacggacgaggagaagttccgcggcctgcgcaagggcatcgcggcggcgacgatcacgcccgtgttctgcggcgcggcgctgccggcgctgggtatctccaacctgctgaacttcatcgtgaccctcatgccctcgcccgtggaaaaggccttccccaagcgcggcaccaaccccaagacgaacgagccggccgagcgcgtctgctccgtggacgagcccttctccgcgcaggtctttaagaccctggccgacccctttgtgggcaagatctccctcatcaagatcatctccggcgtgctgacgcccaacacgcagttcaccaacgccaacatcgaaaagaccgccaaggccggctccatctcgaccatgtgcggcaagaagctgacgccttccttcaagctcatcgcgggcgacatcggcgtgctgaccaagcttgcggacaccaagaccggcgacacgctctgcgaccccgtgcatcccatcgtcttcccgtgggtgacctaccccgaacccagctactccatggccatcgtcgccaagaagaagggcgaggaagacaagatcatgcagggcctgcagcgcctggccgaggaagatccctccttccgcatcgaaaagcccgccgagacctcggagaccatcctctccggccagggcgagatgcagctggacgtcacggtcaagaagctcgcctccaagttcggcgtcgagtccacgctcgtggaccccaagattccctaccgcgagacgatccgcaagtccatcgacgccgagggacgccacaagaagcagaccggcggccatggccagttcggccacgtcaagatcctctttgagcccctctacgacgaggacaaggacttcgagttcgtggacaacgtcgtcggcggcgtcgtgccgcgcgccttcatccccgcggtcgaaaagggcctgcgcgagaacatcgtccgcggcgtgctcgccggctacccgatggtgcacctgcgcgccaccctccacgacggctcctaccaccccgtggattcctcggaaatggcgtttaagaccgccgcgcgcctggcgctcaagaagtgcgtggacgccgatcccgtgctgctggagcccatctattccctggacatcacggtccccgacgagtacatgggcgacatcatcggcgacatgaaccgccggcgcggccgcgtgctgggcatgaacccggtcgaggacggccaggaggtcgtggtcgaggttcccctgtcggagatcttcaagtacgccacagaccttcgcgccatgacgcagggccgcggctccttcaccaagaagttcgtccgctacgaggaggtccccgccaacatcgcccagaagatcatcgcttctgccaacctgcccgacgacgacgaataatcgcgtttctgcaaaaagcggcccccggaatcatccgggggccgcttttttctcccctgcgcgggacgtcaacttcgcgtcccttggcgcataccctgaagaggaggaagggggaaaagagagatggattccttgcaggactgcacgcgcgcctacctggaagcgtccggctgccgctgccgccgggaggaggaggggggaagcctctatacctttgccgcgcggggcgagcacggcgtctatcccgtgctggtctacgcccgcgcgccctttttgatctgcatcgccagcttccgccagaccgtgccggacgcgcgccggctcgaggcggccgagtatctgcaccgcatcaattacggcctgctgctgggcaatttcgagatggactacgacgagggagaagtccgcttccgaacctcgctcatggcggaagggtcccttacccacgaggtgctcgaccgctacatccagatgcccgcggccatgctggaccgctacgcccccggccttgcggccatcgtcgcggacggcgagatcgccggggaggcgctgcgccgcgtacaggatgcccgctagcccttggctgcggcgcggcggcgggccaggtcctcccgcacgaggtcgtagatcacgctcatgaccgggatgcccacgaagatgcccgggatgccgaagaagccgccgcccacgatcaccgccagcaggacccacagcccggaaaggccgatcgaatcgcccacgacgcgcgggtagatgaggtttccctccacctgctgcagcacgatcaggaacaccaggaagatcaccgccgagagcggattgtccatgagaatgaggaacgccgagacgatcgcgccgatgtaggcgccgaagatcgggatgaccgccgtgacgcccaccagggtgctcaccagcggcgcgtagggcaggctgagcaccgtcatgccgatgaagcagagcatgcccaggatcaccgcctcggtgatctggccgccgaggaacttgcggaacttgtcgttcaggcgcgtggccaccgggagcacgaccttggcaaggcgcggcgcataggcgttcagcacgctcttggcctggcgcacgagcttgttcttggacagcagcaggtagaacgacagcatcagcgccaggacgaaatccgtgatcaccgaggccgtggacgaggtcagggagaacaggtgcggcgcagcgttggagaccaggtcctgcagcgcgtccatggtcatgtacttctgtatgaactcctggatgcgcgtctccaggtccagaccgggcaggtattcctgcgaccactcgatcagcctgcgcccgtattccggcaggctgcgcacgagctgcgtcacgctctggcgcagctgcgggtacagaagcgccacaacgaacaccagcaccgccacaaaggtcagaaacgacagcagcatcgagagcgcccgcaccagcgtgtccttcttctgtcccagccgcgcacgggccaagagcttgccgagccatttttcatagaggcgcatgggcaggttgacgaagaaggcgatgacggccgccagcacgatcggccggaacaccgaggccgcgctggagaagaaacggcagacctgctgccagtacagcgcaacgccgaagcacagcgccgcaaaggcgatcagcgcggccgcgcgccggaatgcgggggagggcttgttcatcgcgggaaacctccttttttgttcagtgtgcgtccatggacttgtccaggggcgaaaggccgcgctgcaggcgcacgtgccgctcgtagatggcggtgcagacctcgaccatctgccgcatctggtagagcacgatgctgccgtagggcgcgcccaggatctgctcgaccgcgtagcggtagagctccaggttctccaggatcttcgccgtgtccggcgggacgtcgggggagagcagcagcgccgcgatcgcgtctgaaaagctcgcgcccagctgcagaaccagcgtgcccgttccctccggatagggcgtgagaaatacgccgtcctgcacgccgccgcgcacgatctcctccacgagcgggagcatgaggctcatggtccggcgcttgagcttgtcgcgcatgaccaggttgtcctcccgataggccacgcggatgagcaggcccatgaagtccgcattgcccggccgccacatgccgtattggtcaaagagcgcgttgaacttctccggccagccgccggggcattcgtccaccgccttgcgcgcggccgcataggactcctgcgccttgcggtcgcagatggcctgcagcagcgcctccttgctcgcaaagtgatggtagaacccgcccttggacaggcccagagccgtgagaatctgctggatcgtggtccgctcgtacccctgcgcgtagaagagggattccgccgtgcgcaggatctcctcgcgccgcctttcgccctttaacaccgtgccaccccatttcccgaatctcctctcattgtatcggcatacggctcgcaagtcaagccgggcacaatcttgcgcaccggcttcacaaaagaagaaaagaatggtatactggaatatagatgagtcgggagaggaaggaaagcggcgcgcgcggccgcccaagtcctctttccgttttaccaggaaaccgggtttggaggaactgccatggactttgttttgggctggctggatgaagcgctgacgacctttcttccggccgatattttcagcaggctggacgtttactacaacggaaccatcctgttcctgggcgcggggctggtgctcttgctttccgctctcgccctcctgattgctgccgtgcgcaagggcaaaaaacatgcgcccagcgcctgagcaacctgagctgctgggggaggaccccaaatgtcgatctacccgagatggttccgcgcggtgcgcgcggtcgttcgcgtctttgcagagaagatggacgtgcgcggcgcggagcgcgtgcaggcgccctgcgtgctggtcacgcggcacctgaacaactacggccccgtggccgtatatctctactctcccgtggaattccacatctggtcgctgcacatgttctttgacgcggataagtgccgcgaacactttgccaactacacccttccccagcgcgcccggatgccaaaacccctggcgcgcgctttggcgcgcctgatgagccatcccatcgcctggtttttccgcacgcagatccgcgcggtgccggtctggcggggactcaagaccgtgatgaagacctttgacctctcggtggacgagctggaaaagggcgaaaacctcctcatcatgagcgacgtccactacgcccaggaggggaaggagatcggcgagatctacacgggctttctgcacctggggaagctctactacaagcgcacgggcaagcgcctttcctttgtggccatgagcatcaaccgcaaggagaagtacctgcgctttggcgagccgatcgtctttgaccccaccgtcccctttgcgcaggagaaggagcgcatcacagaggcgctcctgcaggaactgcgcgacgactactgatccgggtcctttgccgcacaggggccgggagcgccacaggggctgggagctccacaggggccggggttttgttccgcggccttttttgcgcgcgcgtagagcgcgcaggcgcggcgcagcagggcggacgcttcgtccacggcgccggcccgctcgcggggcagcgcgccgcgcagcccctccagcagggagagcgcgtggccgagcgcatcgtccgcgtcggaaaagagtccgtcgtaccagggcctgctcaagcttcccgccccctttcgatgcgcgcgaccgcccgcagcagcgcgtcgacgtccgcggcggtgctggcgtagcccaggctcgcccggaccgcgccgcgctcgcccgtgcccatggcctcgtgcgccaggggcgcgcagtgcagccccgcgcgcacgcagatgcccgcagcgtccagttcgtccgcgacgcggccggagggcaggccgcccacgttgaagctgaccgtgcccacgcgcgagaccgcgtccagcggcccgtagaccgtcacgcgcgggatgtccatcagccccgcgagcaggcgctcggtcagcagcagctcgcgcccccggatctccggccggtgcagcaggcagaaccgcgcgccctggccgaggctcgcgatgccgggcgtgttgagcgtaccgctctcgtagcgctccggccgctcccgcggctgcgtgagcaggtgggaggaggtgcctgtgcccccggccttcaggggctccaggtccagtccgggccggatgtagagcgcccccgtgccctgcgcgcccagcagcgccttgtgccccggcatggcgcacaggtccacgccccattcctccggatacagaggcagcacgcccgcggtctgcgccgcgtccaccagcagcaggcacttgtgcatgcggcagagcaccgccgcctgctcgacgggcaggatcgcgccggtcacgttgtccgcgtggggcagcgcgagcaggtccacgtccggccccatgcgcgccagcgggtccaccgcgatggtcaggcggatgcgcccctcggtcgccaggcggtgcagcggccgcagcacggagttgtgcgcgtaggccgaggtcaaaacgtgcatcccctggcggcacgcgccctgcaatgcgaggttgagcatgtccgtgcagttggcgccaaagacgatgtcgtccgggttctgcacgtgcagaaggctcgccagcgcctcgcgcgcgtccaggacgatgcgcgccgccgccagcgacatccggtggccggagcgccccgggtttgcgccgaggaagcgcattgtgcgctccaccgcgcgcagcacgctctccggctttgggtacgaggtcgccgcgttgtccaggtaaatcattctcttccctcccgcaccactggcaattccaaatcgtattctaagtgtatggcaggtttctctgctttacgacgacctttgggagggaaagtttttatggaaagctacggaattgccgccttccgttccagacaggcggtccttcgctttgaggagatgctgcgccgggcgggcgtgcgcgcacaggtgatcaccacgccgcgcgccgtatccctgggctgcggcctgtcggtgcgatttcccgtgcaggatatgcccgtcgccgcgcaggtctaccgcgcaaatcccctgcacaacctcatcggcttttacatcgcccgggagcagggcggctcgctgcaggtttcgcccgcgccgctctgatcccgcccgtctacaaaggaaaggagaaccatcgtgacacagatcaactctgcggagagaaacgcggaaatcctcgcggagctccggcgcctctatccggacgccgggcccgaactgcactttaccaatccctttgagacgctcgttgcgaccatgctctccgcccagtgcaccgacaagcgcgtgaacctggtgacgcagaagctctttgcgcgctacaaatgccccaaggaccttgccgccatcacacccgaggagctcgagccgcagatccgcgagtgcgggctctaccacaacaaggccaagaacatcgtcgccgcctgccgcatgatctgcgaaaagttcggcggcgaggtgcccggcgactgggacgcgctcaactccctgccgggcgtgggccgcaagaccgccaacgtcgtctacgccaacgccttccacggcgacgccatcgccgtggatacgcacgtgttccgcgtctccaaccgcttgggcctggcccacgccaaggacgtggaaaagaccgaggcgcagctcatgcaggccatccccaaggcggaatggtcccgcgcgcaccactacctcatcttccacgggcgcagggtatgctcggcccgcgcgcccaagtgcgcgcagtgcacgctgcgcagcctttgcgaatactgcgccgcgcaggagtccgcggagaaaaaagaggggagcgcaacgtaaaatcttgcgcaaatcccctcctttttgcgcgccgcgcattgcaaagccgcgcgcaatccgatatgattaagggacgccggagggattttcccccgtttccggcgcgcgcaggctctttcccaatcgcgccatgcaaggagaaatcaaatgtcaacatttgtcgatatcgttcgcatcaaactcaaggccggggacggcggggacggcaaggtcagtttccaccgcgaaaagttcgtccaggccggcggccccgacggcggggacggcggccgcggcggggacatcgtctttgtggccgaccccggcatgcacacgctgctggacttccgctacaaccgcaagttctacgccgaagccggcgcgcccggcggcgcgggccgcgccagcggcaagagcggcgcagccctggtcatcaaggtcccgccgggaaccctcgtgcgcgacatggccacggacaaggtcctggcggacgtgcgcgagccgaacgagccgcgcgtggtgctccacggcggccgcggcggctggggcaacagccacttcgccaacgccgtgcgccaggcgccgaactttgccaagcccggcgtgcgcacgaaggtgttcgacgtgcagctggagctgaagaccatcgcggacgtgggccttgtcggcttcccgaacgtgggcaagtccacgatcctctcggtcctcaccgccgcaaagcccaagatcgccaactatcacttcaccacccttttgccgaacctgggcgttgtcaaggcccgcacggacgggttcgtccttgcggacatcccgggcctgatcgagggcgcgagcgagggggcgggccttgggcacgagttcctgcgccacgtcgagcgcacgcgcctgctcctgcacgtgctggacatctccggcagcgagggccgcgacccgctggaggacctcgcggtcatcaaccgggagctcgcgcgctaccgcgagctggacaagaagccgcagatcctcgtctgcaacaagatggacctgcccggcgcgcaggagaacctcgagcgcctgcgcgacgcggtcgcggggacggatgcggagatcttcgccgtctccgcagcgaccgcccagggctttgcgccgctggtggacgcctgcgtgcgccgcctggccgcgctcccgcccctggactccttcgaggaggaggccgacgcgcaggagttcgccgagggcctgggcgcgccctttgccgtgcgccgggaaaacgaggacttcgtcgtcgagggccccgcggtcgacgcgctgctcctgcgcgtgcgcatggacgacgccgagagcatggcctacttcgagcgcacgctccggcgcctgggcatcatcgacgccctgcgcgaaaagggcgcctccgacggggataccgtgcgcctgggcgacgtcgaattcgaattcatcaactaaaagaaggagggcccgtttcatgccccttacgtccaaacagcgcgcccagctgcgcgccctgtccaatgactttgaccccgtggtctacatcggcaaggagggcatcacgcccaacctctccaagcaggcctgggacgcgctggaggcccgcgagctcatcaaggttcaggtcctcaagaacgcgccctatgaaacgcgcgaggcctgcggcctgctgtgcgaggcggtccacgccgatccggtcctgtgcgtgggcaaccggttcgtgatctaccgcccggcgcgcaaggaccccaagatcgtcctggtctgattttagaagagctcgcgctcgccggactccgccgctctgccccgcccggccagggcgaggaacagcagcagcagcgccgccagcaggcagctgagcgcgtccaggagaatgtacgcggtcatgagcagcgccgccagcagcaggcagcgcggcgcgcgctcctcgcccggcagccgcgcaagcacggcggccgggcctttttttgccgcggcgcgcggcgcatcgcatttcgggggatcggggaggggcaggcgctccgcctccagcaggcgcagcggcggctccaggctcccggcataggacttggccgcctccgtcgcgccgcccgcgcagatcaatacgccgtggtcttccccccgcgcgcggtggaagtcgtgcacctcgcgcacgtccgcgggctgcgggctctggtgcagcccggcggcaatgcgccggccctttgcgtcggtaaagaggcggacagacgcccgcgccccggcgggcgtcagggcataggcctgggccagcgcctccgcagcctggcagagcgcggtcttttccggcaacatcgtcaggcggtataccgccgcgcgccgctgccccgcgcgctcccgctccgcgtcgagccgtcggctgcgccgcctgcggtacaggtgcagcgcatacgccgcgagcgcggtcagcgccgcggccagtgccgccgccggccacagcgcccccaagcgcgtcgcaaaccagaggaaggaaaggccccacagcatcgccgcgcccagggcgcggtccagcgcgcgggccgcctttgtgcgcgcctgcatcttttcgtcatctcctcttgccgccccattgtccaactttgggcggaaaatcattttacatttttcccgaaatcggttatactatgtatggattataggagtgtgccaagatgagcagcaaaacacgcgtgggcctgatgggcggcagctttgatcccatccacttggggcacatcgccatcgccggggaggcccgggatgcgctgcagctttcgcacgtgctcttccttccctcgggaaggccgccgcacaaggcgcatctgggcgcgagccctgcgcagcggctggagatgacgcgccttgcggtcgaatcccttccctgggcgcaggccagcgacgtggaggtgtgccgccagggcaccatctacaccgtcgacacgctgcagatcctctcgtcgcagcacccggaggccgcgttctattacatcatcggcgccgatacgctcctggatctgcccaactggcgcaacacgcagaaggtgtgcacgctgtgccgctttatctgcctgcaccggccgggcgtcgcggacgaggccatcggcacggccctggaggacctgcgcacccgctacggcgcgcaggtgcacttggttcccgcctcggggcccgatatctcgtctacggagattcgccggcgcgtcgcgcgcggccaatccaccgagggcctgctgcccggcgcggtgcgggcctacatcgacagggagaacttataccgtttatgaagcgtttggatgaaagtctgcgcaaaaaatacattcattacctcgaagaccacgtctcgaaaaagcgcctgaagcacagcctgggcgttgcggagacggcggtgcagctcgcgcaaaaatacggggcggacccgttgcgcgcggaggccgccggccttctgcacgactgctccaagggcctgagcccggcggagatggtcgagacggcccgcgcctttggcatggagccggacgcctaccagctggagaacccggagcttctgcacccctatgtcagcgccatgctcgccgcgcgcgacctcggcgtgacggacggggcggtgctcaccgccatccggcggcacatgtgcggcgcgccggacatgacggtgctggacgccgtggtcaacctggccgattacatcgagcccacgcgcagctatcccgacgtggacgaaatccgccgcttggcgcaaggatccctctttgacacgctctgcgaagcactcggcagaaccatgatcctgaccatccgccaaggcagcgtgctgcatccggacacgcttgtgacctggaacgcgctcattctgcgttccaaagccgaaaaaggagaagaaaaatgacggaaaacatcaaagaaatcgcccttcgggcttgtgatatcctggacgaaaagatgggcacggacatcgtgtgcctggacatcacccaaatgaccatcatcgcggactacttcgtcatcgcctccggccgcaaccccaaccacgtcaagtccctctacgacgagctcgaggtcaagatggaggacctgggcttcccccttgtccgctcggaggggtacaacgagggccggtggatcgtcatggacttctccgtcatcatcgtccacctcttctacgagccggagcgcgagttctaccacctcgagcgcctctgggacgacggccgcaaccgcgtcccctacgagaagaaggattgacggagccgcgtttttcggacggacaactgcaaaaaaggggaagccgtgcgcgcgttgcgcagagggcgtgtttcctgtaccctttttcaagccgttccctgcgaatgaaaagaaaaagcttgcatttttctccggtttccggtatactatttgggtcgacattttgcgtctgcaatttgccgtactaggtcgcaagacggaattcccaagtgcgcgggtcccgtgcaacgccgcaccgtgaaccgtgtcaggttcggaagaaagcagcactaagcggaccgcggggtgtgccgcggggaagcctgcgcgccttgggtgtacggcattccaattttgcaaaaagggttgtcccggttcgccgcgggcagcccttttgccatgcaaagaaaccacctccagggagggaagcgaacgtgaacatccagatcttcatgggcaagaagaacttcgactgtcagaaggcggagcgctggttcaaggagcgcggcatccgctaccaggccgtggaccttgccaaaaagggcatcagcccccgcgaactcgactccgtgctcgaccaggtcggcctcgccgccgcgatcgacacccagagcaaaaagtatgcagaatctgcgctccgcttcatgagcgatcccaagatgatccgcgcgcagctcctggagcatcccgagctcctgcgcacgccgatcgtgcgcaacggccgaaaggcgaccgtaggctattgcccggagacctgggcggagtgggagtagagtttcttcacaaaatcaacaaaatctgttaccacaaaatgcgtagcgcccattccttacgaaactgtaaggaatgggtaaggagaatccatggaaagatccgcccgcctgtgcgacaatcattggcgtcaaggaaaagggagggatcaccatgaaacgagaccttgcgcttctctttctcgtgctgctcatcgccctgtgcgcgctgacggggtgctccaaggacgcgctcgtcgccagctacagccagggccttgcctggatcggggatcttccgctgcagtcggagagccgcctgtgcggcgagcgcgacttcggcccggaccactacacgggcggctaccgcgcggagtacgaggcggagacggggacggagttcctctttggcgggacgagcctggaggcgcggacgggcctgcgcgtccagtgcgagatcgaagcggggcagggcgaggcgcggctgtgcctgcaggagccggagggcgacgtgcaggtgctctgcgaggcgggcgagacctgcgacgagacgctggatctgcccgccggcagcaactacctctacatggagctgaacggctacacgggcgtcgtcgccctgaccgtcgaggacgccgcagaggaaccctaaaaaaaatcgcggcccacggaggcaatttccgtgggccacgattttgccgtttttcggggatttaggcgttcaggcgcgtgccgttgcggcgccagagcagcgaggaatcgatgtggcggatgtcgggcgaggcggtgcgcgccatggcgccggccagctccgcggtcacggcctcgatgacctcgcaggcgccctggggtcccttttcctggatggggcccatgaccgggcggccgacggacacggccgtggcgcccagagccaggcacttaaaggcgtcggtcccgttcatcacgccgcagtcgacaaagatcgggatgcggccgccgatgacgcgcgcgatctccggcaggaccatcagcggcggcacggccgtgggcaggatgccgtggtggtgcgagaccacgatgccctgcacgcccgcgtccaggcacttgcgcgcgtccaccgcgctgagcacgcccttgatgatgaaggggagcttggtgcgcttgacataggattcgatgtccttctgcgtgcgcgggcgcatgggcaggcccagcaccacgtccggcttgccgttgccgccgaaggagtggtccaggtccatgccgaccgccagcgcgcccagcgcctcggcctggtcgatgcggcgcaggaccatgtcctcgtcgtcgtagggcttgatgatcttgatggagcgcttgttcttctcgcagatcgcggcgaactggctctcctcgcccatgccggcccagttgaccgcgccggcaaggcgcgcgccctcggccatctcgaccatgccgtcgcccttaccgccctggcccttgatgtgggagagggccgccatcatgatgggggtgcggaaggtctcgccgtagagcgtgagcgtcgtgtccggggtgacggcgtccatgtgccgcatttcaatcaggatttcatcgaaataggcgcgcgtgatcgcgttggcgtccatggccttttcgcggatttccatgtgtgtgttccttcctttctgcaaaagccggtctttcgtgtcattataccacgcggccggcgcgcgcggcaaggccctgcggcgcgcatctttcttgcaagcataacgcggacgcgcttgcattgcagggggaaatgtgctaacatgggcaggaaaaacgcggattttcgcaagcatcaaaggacggcgacaagagcatgaagatttccaccgtaaagggcaccaacgactacctgcccgaacaggttgcgctgcgcgactacctgcagagcgtgatcctgaccacgtacgaggacgcgggcttttcgcgcatctccaccccggccatcgaggacatcgagaacctggacaagagcgacggcggcgagaatctcaacctgatcttcaagatcctaaagcgcggggacaagctggagaatgcgctgaagtccggcgaggaaaaggacctggcggacatgggcctccgctacgacctgacgctccccttgagccgatactacgccaacaaccgcagccgcctctccctgccggccaagtgcatccagatcgacaaggtctaccgcgccgagcgcccgcagaagggccgcctgcgcgagttcgtccagtgcgacatcgacatcatcggctcctcgtcgatcctgtgcgaggtcgaattgatcgagaccaccgcaaaggcgctgctgaagatcggcatgaaggacttcaccgtcaaggtcaacgaccgccggatcctgcgcgccatgctggagacgatgggctttgccgagcaggacctggacggcgtgtgcatcgtctttgacaagctggacaaggtcggcgtggacggcgtgcgcgcggagctcacggaaaagggctacgcgcccgccgccgtggaggccctgtgcgccaccctcaacggcggggagatgacgctggagaaggtcgcgcagatcctgccggaaaaccccgcggtgcagagcgtctccgcgatcctttcggcggcgcaggcgctggcggacggccgctacggcgtgaagttcgacctctccctcgtgcgcggccagggctattacaccggcacggtctttgaggtcgagagcaacgagttccgcggggccatcgccggcggcgggcggtacgacaacctcatcggcaagttcacgaacgagaccgtgcccgccgtgggcttctccatcgggtttgagcggatcttcggcatcctgtcggagtcggggttcgccgcgcccaagcgcaaggagcgcatcgccctcttctgcgaggaggcggacgccgcaaaggccgcggcccttgcggaatcgctgcgcgcgacctacagcgtctcgctccttgcaaggcccaagaagctgggcaaggccctgcagcgcctggaggcggacggctttgccggatacctcgtctttggcgagggcgaggaggtcaagcgcttctgacccgaggaggcgcacggacgcctgcgcgcttgcgaaaaacgcctctttttggtatactgaattgaaaaaagcgcgcattccgcgcggagaaggagcggtttcatggcacaatccctcgtcgtctcccaggaggagatggacaagcagcggcaatgcgcggcccgcgtgcgggaaggctttcccggcaggacgtacaagatcgtcacctatggctgccagatgaacgcgcacgactcggagaacctcgccgggatgctggaggagatgggctttgcccctgccgcagacgagggagaggcggacctcctcctctttaacacctgctgcatccgcgacaacgccgagcgcaggctcctgggcaacgtcagcgccctggcccagcgcaagcgcgagaagccggacctgctcgtgggcgtgtgcggctgcatgatgcagcaggagggcggggcgcagcgcctgctggacctctgcccgtttgtggacctggtcttcggcacccacaacctctaccgcctgccggagctgctgctgcgcgcgctgcgcggccagccggtgcgcgagacggacggcgacgagcgcggctgcatcccggagggcctgcccgtgcgcaggaccagcgccatccagggcgcgctgacgatcatgtacggctgcaacaacttctgcacctactgcgtcgtgccctacgtgcgcgggcgggagcgctcccgcagcgtcgcggacgtcgtgcgcgaggcggagagcatggccgcctccggcatacaggagatcctgctgctggggcagaacgtcaactcctacgcgggcggggcgacgttcccggagctgctgcgcgcgctggacggcgtcgtgccgcgcatccgcttcatgacctcccaccccaaggatctgtccgacgcgctgatcgaggagatggcgcgctcgcgctcggtctgcccgcagttccacctgcccgtgcagtccggaaacgacaaggtcctgcgcgagatgaaccgcgtctacacgcgggcgcactacctggagcgcgtgcgcgccctgcgccaggcgattccggaggtgggcctgacgaccgacgtcatcgcgggcttccccggggagacggaggcggaatttgcggacacgctctccctggtcgaggaggtgcagtacgactcggccttcaccttcatctattccccgcgccggggaacgcgcgcggccgcgcggccggaccagatccccgaggccgtgcagcacgagcggctcgaccggctcatccgcgtccaggagcgggccacggcatcgcgccttgcccagcaggtgggctccgtgcaggaggtcctcgtcgagggggcgtcgcgccggcgggagggattcctcgccgggcgcacgggccgcggcatgacggtgaacttcccgggagacgccgccctcgttggcaagatcgtcccggtgcgcatcctcggcacgggtgccaacaccctgcgcggagagcgcgcctaaacaaaaaaacaattcaaaacaaggatttgaggtggattttcgatgaatctggaactgtttcagaagtctcgggagctcggggagctcctggtcaataccgacgaataccgcaaggtgcaggaggcggaggccgccttccaggaggatgagttcgcccaggcgaaggtcgcggagttcaacgccctccagcaggaggtgcagaccctcatgcagacgccggaccccgatcaggcgctgatcgcgcagaaggccaacgacctgcgcaacatgcaggccagcctcaccgagatgccctccatccaggcgatgaacgaggcgcagacggagttctccaagctcctgacccaggtcaaccaggtgctgcgcttcatcatcaccggccaggtggacgagggcggctgcggcggctcctgcgagagctgcggcggctcctgctcctcgtgcggggacgcgcacaaggactgagccttgcgcgcgccgtgtccaccaaaacccacgcgcaccgtgcacccagcctggggcgcggtgcgcatttgactttgtgcgggaggaaatcatggccctttccccaatgatgcagcactacctggcgaccaaggagcagtacaaggactgcatcctgatgtatcgcctgggc

SEQ ID NO: 1619 - DNA, 2408 bp, Unknown
  16S sequences of unknown bacteria
ttcctcttgctccgtttattaccagaatacaatcatagcacatccacttaaaaagaacaggaccacctcggtggtcctgttcttttgtctaacaacattgcaaaactggcagaactgcccggctgctttgacaaatcactccggctttttgtcaattcagctcggctttttccggacaagtcggggcggcgctaacaccgtgcttttgcgaaagcacggcgctcttttggctttttgaggggtgcggcagtcgtgtcttttattcttccacgcgcaccatactgggatagatcttagcgaggcggctgtcggggaaacggtcgtccagcacctgctgccaggcgtgcgttgcggggacgccttcataacgctggctctggcgcagcaccgccgcgccgcttacaagagagttcgcaagcataaatgcgatgagcacccaactgatgacgacaccgtaggttttggaaacgcgccgttcgataaagccgttcagccgtggaaatacctctttcacccataccagcgccagtgcgccccagaacaggcaatacagcagattgatgcgtccgttcaggttgaaaggatacccggtatagtcccaactcacggtgcccagcacggtttcctgcagccagctgcagaaatactcgaaggcgcctccgatgatggaaccgccgatgaagatccagcggtcgctttttccgatgaacggatgcaggcagacggtgagcagcactgcgccgatgccgtagatcagattgaaaggcccccacacgaggccggtgcgctgtgaaagcctgccggaggcgatccagcaaaaaatagtctcgatgaccactcccaggaaacagcaaagaaaaaacacccagaacagcttataaaaattaaggccgtgggcaaaatggccgggaaccccggccaggtcgcgcgcgatctgttcgtcgtgcgcctgttcccgttggagagtgcgcgcctcctgaagatccagccgggtcagcttttcttccagctttttgcggcggcgagcaaatcgttcttgtgttgtcacggtcggttcctcctcttttacgcaataaaagcagtatatcacagtattcttattttgtcgaagaaatgtttatgcgcaaaaggaaaagacatccggcggagaaacacaattacctgttttcacgcttctgcttggggctttcacgcggggagacttgtgtcccggcccgggcaagactatgattttttcaggaagagcggcggtatgcgtgttttgcgctgcgaggtgcaaacagggaggttcgatatgaaaaggacaggcttggctctgctggggcttgtaattgtactggcttttttgcccgcaccgttttcggtgcatgcagccggacacgagtgcacacggccagtggcgagggtaactgctttggacccgctgagcggcgaggcgtggaattgggtcctgtgggacgaggaagccgtgtggatatcccgtacacaagaaactgcatccgacggctcaaagatgcgtagggaggttgtttggacattcgatttggggccgtttttgcgggagacttttccgtctgatgaagcgccggcagcagatgcgaaagtgtggcttgttgtccggacggaacactcggacggaacatccggcaaagtcatagaaacccattcttcatacacatttgtggatgcacagggtggggcgtaccgtccaggctgcactgtgcgctggagctccggcagcctgggggaaaatggaaacttctaccctacgttgagccaggctggtgaagggctggaaaatgacgggccgtttcgcgttttgcatatcggttaacgtcccacgctatttgtgcttgtttctacggcttttgggaatatgttgccgaaatctggaaatcaaggtaaaatgatagggcgcggacaggagataggaacggttgctgctgtttttccataacgggaggacagcaaaaaagcagtgcagacagatgcctgcactgctttggactgggtgaccggattattttttcagagcggccggcttcttgggctgataatgcaggccatagcaacggtcattggcgccgatcttggcggctttgccgatgaatttggagcatgctttgaagaatcccttttcacattttttcatgatgtacctcctgtttttgattgggtgaatggtttgcggggaaatcccataaggaaatgtataccgcaaatctgctgcgggcgcaagggaatctgcgcgaaccccggtctgaaacgcgcgaaatcatcatttttggtaggagagggctcaatgcaggtgttcattgcggaagataattattatgaattggaaagactgcggcggcaggttcaaagctggggaagccggcatggaggcgtcagcatcacggctgtgc

SEQ ID NO: 1620 - DNA, 10814 bp, Unknown
  16S sequences of unknown bacteria
cccgccgcgccgatatgattgtcctttaaaagcactccgtccgaaagattatagcggtgattattgccgccgcccacgcgcaccgcgtacttttcaaaaacgcgcatattcggcgtcgtcttgcgggtgtcgagcagtttggtcttactgccggcgagcaaattcgccacctcccgcgtataagtggcgatgccgctcatgcgctgcaagtagttgagcgccacgcgctcgcccgaaagcaagacgcggatatcgcccgtcagttccgcgagaagctgcccctttttcacttcgtcgccgtcttttacgtaaaatttcgcggtcgtgttttcgtccaaaagccggaaggtgcgcaaaaatacgccgagtccgcaaattacgccgtcctgcttgcacaagagctgcaccgttccctttttatattcgggcatcaccgcgttcgtggaaacgtcctcgctggtgatgtcctcttgcagcgccatttcgatgagcttatccgcctgtattttctctgttatcggattcatagtcgcctcgtatcgtgacgtcgtttgaatttgagcgttctcgcccctcgacgccgtttttgtcttatcgcttctgtcttgccgctttgaaaagagcggaaaaatctcttttccgattccgcatccgcctcccgaacgaaaggctttcttctccgccgcggctttttagattttccgtttttcgtgcgccgcgttttccgcggccgaacgcgctttttcgcgcgccgcccgttcgcggtctatctctgagagcaccgcttgcctgtacgccgctttgagcgccgcgtcgtcccgataggcgcgctcgtcaaagccctgggcggcacgttcccgcgttttcccgctcaaaggcgaataggtattggcgatgcgcagcgcagcgcgtttggcaaagagcagactttccaagagagaattggaggcgaggcggttttttccgtgcacgccgttgcagcacgtttcgcccaccgcgaagaggcggggcatactcgtgcgcccttccgtatcgcttttgattccgcccataaaataatgctgtcccggcaccacggggatgggcgctttgaatacgtcgtatccctccgcctcgcagcgtttgacgatggcggggaaatgcgtctttaccgtttcggggggaatcgtgcgcaggtcgagataaacgtggtcgctcccctccttttccatctcggcgtaaatcgccgcggaaaccacgtcgcggggttgaagttcgtcggtgaagcgttcgcccctgccgttcaaaagcaccgcgccctccccgcgcaccgattcggagatgagaaaccgccgcccccgctttttcgtgtagagagtggtgggatggatttgaatataatcgacgttttccactttcacgccgtgctttaagcaaatcgccacgccgtccccggtcaggttgcggtaattggtggaaaatcggaacagtccgccgacgcctcccgtcgccaaaatcacataatcggcgctcaccgccttcacctcgcccgttttcgcgtctttgagcacggcgcccgcgcattcgccctccgcttcgagaatgtcgagaagaacggtatacgggcggatatgtacgtttttcaaacggcgaacgtcagaaaacaagcgggaagtgatctccttgcccgtgcagtcctcgtgatagagaatgcgcttcgtgcgatgcccgccctcgcgggtatagagaaaattgccggcggcgtcgcgcgtaaaacgcacccccgcgtcgaggagatcggcgatcgtttcccgggaatagcgcagcatacaccccaccgtttcggggtcgttctcgtaatgccccgcgcgcatggtgtcctcaaaataagtttcgtaatccccgtcccatttgagtacgcagatgccgccctgcgcgagataggaatcgctgtgacgggggctttccttggataggagcaaaatcttcttatcacgaggcagaaatcgagccgcgtttaaccccgcgacgcccgcgccgactacgataacgtcgtacttttcccgaatgtccatacaaaattcctccgccgcccctgccgcggctttaaaaagcgctccctcgcgccgactgcggacgcccgcgcctctttaacgcgcctcgcctgcgtattcgtcccgtttctttgcgggaatccgccgacgaagacgccgcgctttttatcctcgccgcgaaagcgcccgacagcttccttttccgttttcttgccgcgtcctcgcgtcctgccccgctcgggcgccgtcttttttaaagcaatcatacgccttttattgacaactgtcaagacatttgtcaaccgtttgtcgctttttatcgatttctcattctttttatcgattcggacaacgagcgagcgtctgatttatactcccgagccgcgaatcgccgcaatgaaaacgaaacgttcggaatattttttcccctttgctcttatttcccttcccgtccgggccgcacggctcgaaaaaagccgccccgcggcggcggaacggctcgataaagacggctttatttatttttctcgttcaaaaaagcgcagacggcttccgcggtcctttcgacgccgagcgaagcgtcaagacagaggtcgtaattatgaacgtccccccaggtcagccccgaaacgctgcgatagtacgccgcgcgcgcggcgtccgagcgcttaatctgccgctgtgcttccgcgggcgtatccccgtacatttccgaaacctttttaacacggtattccataggcgcgtaaagaaagacgcgcacggcgttcggatattcccgcagcacgtaatcggcggcgcgccccacgatgacgcaggcaccgttgtccgcgattttgcggatcaccttttcctgcgcggcaaccgcctgcctgacgacttccgtgccgaggtacaactcccgcaggacggcgggcgaatcggcgttgatgtccgaaatgaactctttatcgagtccgctctcctgcgccgccagcgccgtcatttccttataataaaagggaatccccagcttctttgccaccgcgttcccgatctgctttcccgcggagccgtgttccctggcgatcgtaacgatggcgccggggcgggaaggctttaaaatcgcggcgctttccgacgaagggagggacgattttttcatgccgcggaaaaacgcggcgctgagggctaccgtcaccgccatcgcgatacagtccgcggcgggcgcggcatagagaataccgtctatcccgaagaaacgaggcaggatacacgccatcggcacgaaacacacgagatctctcacgagggaggcgacggtcgctttgacgggctgccccaccgcttgcaggaaaatggaattcattttgacgacgcaggtgaacgtgacgagggaaagaaaaatacggaaagtcttttcggcgaattccagatacagcgcttcgtccgaggagccgaaaacgcttacgacagcccggggaaacgcctcgacgacaagcgtggaaagcagcccgacggcgagcgtcgccgtcaaaatgatccgataggtctttctgacgcggtcgtattttttggcgccgtagttatatcccaggatgggctgaccgccgagaacaagccccacgacgatattgatgatgatggtaaacaccttcgtttcgatgccgatgacggcgatgggaatgtccgcgccgtagggagaagccgcgccgtagcgggagagcaggaagttgcacaccagcgatacgaccgcgatcgacatctgcgtgatgaaagtggaaagtccgagtttgatcgcattccaaaagatgcgcaaatcgggaagaaagctcttcaagccgaggcgaaaggtcttgcttttgaagaaataggcgatacagacggcaaaggacacgacctgaccgatcaccgtcgcccacgcggcgcccttgattccccaatgcagcacaaagatgaaaacgggatcgagaatgatgttgacggcggcgcccgacagcatggaagccatggaaaacgcggggctgccgtccgcgcggatgacggaattcatcatattcatcagcatgaacacggggaaaaagaaaaggatgatgagaaaataatcttccgcaagagagatactttgatcggacgcgcccgaaaggcgcaaggcgggacgtctgaaaatccctaaaaacaggatgagcgccaaactgacggcaacggaaaccacgattcccgtaccgatacatttatgcgcgtttttcgtgtcctttttgccctgacagaggctgaggtacgccgcggagccgtccccgaagcaccaggcgaagccctgcacgataatcgtgatgggaaagacgacgccgatcgccgtattgccgagatagccgagttcgctgttgccgataaaaatttgatcgacgatgttatacagagcgctgatcaagagggagaggatacaaggcagggagaatttcaggagcagtttggaaattttcgcttcgcccaattcgttttctgcgttttcgggggaaatttcttgttgactttgtcgcataaggattccttttcgatttattttcgagtctttatccgagaaaagctgcatgaaaactacgaggaacaaaaaaagcgcggaatttcgtcggaaattctacgccccctgctgttcgacttaggtgattttatcatattttttttcgtttgtcaaataaaacgacgaaatcgcggcaaaatttttctttttcggacagacaacttgccggcgggcgcgccccggcatttgaatttttttcgggaatgtgctatactaaaagagaactatgcgcccgtagtcgttccgcgactcgccgccgcgcttttctccccgcgatgctctcgtcgcccgctttacaaagcgcatccccctccctcgcacttcccgccgagttcggcacgccgaccgtggacgcggatttttccgcgctttcgcagtcgcaggaggaaggaataagaaagcggatcgccttctttaaaaaataccgctttttatggaataaaaggctgcccaatattaaccttttattacttgaaattgaccttgggacaaggtcctgagcctgcgcggacgccccgaatcttttatcagcggcaaaaaaaatcgggcgaaaacaacttgccgcaaaggaactttctcatgaatatttgtcttatcggcacggataccgtcgccttcgcgggcgacgtggacttttcctcgctgaaaaaatttggcgaacttcggctctatccctgcctttccgccgatcaggtcatcgaaaactgcgcggacgcggacgtgcttctcgtcaacaagaccgacctctccgcgcgcgtcatcgcagccctgccccgcttaaaatatatcggtctgtattccacgggctttaacaacgtggatctttccgcctgtaaaaagcgggggatcgtcgtttccaacacgcccgattattccacagacgcggtcgcccagcacacgctcgccctgcttctcgcgggcgccggcagccttctcgactacactgcttccgtgcggcggggggattgggaaaaatgcgccgcgttctcctattacgactaccccatggtagaggtgagcggaaaaacgctgggcatcttcggcttcggaaacatcgggcgcaaagtggcgaaggcggccgtggcgctcggcatgaaaatcctcgtctgcacccgcacgaaaaaagcggactgcccttacgaatacgcggaaaaggaagcgcttttctcccgcagcgattttttgtccctgcactgtccgcagaacgcggaaacgctcggattgataggcgaaaagtcgctggctttgatgaagccgaccgcgatcctcatcaacaccgcgcgcggcggactgatagacgaacgcgcgctcgcggacgcgctcgacggcggccggctggcaggggcgtatctcgacgtggcatccgaggagccgatccgctccgacaatccccttttgaaggcgaaaaactgccacatgacgccgcacatcgcctggcagccgttagaaacccggctgcgcctgcacgagagggtgacggagcacctcgcagcctatctcgcggggcgcccttacgacgtagtaaacgactgaaagaggaagaggaaaaggaaaatgaagatcgaatcggcagtcatatccgacgtttcggcgggcgctctcgaactctcgcgttccgacggattgacgcatatcaaatcgctgccctgcttctccgtcgttcaatctttgcacggggaatattttatcgcgctcgacgacggcaggaagggagaaacgaaagagggcggcgtatttacggcgccgccgcggcggatgcagaccatcgtgcaccgcatggataaggcggacgggcgcatgacggcgaggtgggtatttttcaacgccgaactcaacggtatgcccgccgacgttcttttcgaatttcccttgatcgcggacgaagaaagcgccgcagcgttcaacgaagctttggacggcatctttcggaccgaagatcttttggacaggctcgcatggtgctgtcagatattgaaaacgctcctccgcacggccagggaaaagccgcgcctgcccgaggggatcgccgccgccctcgcctacatagcaaaaaatttcgacagggatctttcggtttccgcgctcgccgccgcggcgggaatgtccctgcccgcgttctatcccgcgttcaaacggtatacggggcagacgcccgtttcctatctcaccgagttcaggctttccagggcgctcaaagatattctgtataccgcccgcccgatcggggaagcggcggaagcggcaggatttgccgatccgctttatttcagccgcgtctttcacgaaagatacggctgctcgccgcgcgcgtacagaaagcaatatctcgaaacgatggcgggaaatcgtatgtagcgcacgacttccccgcataaaatcgggaaagaccgccgatcggctccaacgaaaacacgggaaagtttttaaaaaacgaacgtttccgccagggcgacggcggaaacgtcttaacggataaatgctcccgacaaatgcccgccgcgtttctttcagcggacaagccgcgcggcggcacgaatgccgttccttattttttccgccgacgccgcaatacatccgaggcggcgcggaaccttggcgcggggcggggcaaacggggaatttatcaacaacgaacgccttttcgccgccacgaacgttgcctactctgtcgcctcgacgccgtaagcgcggagttgcgcccgcaagcgggacagttccgcttgcgtcggcgtccattcttttttcgcgccgtccgtcctgccgagaagacgatttttcgaagcgcccagcgcgtgacagggaatcagctgcacgccgaagcaattttttaaacgggcgtataactccgcgatgccgcggagatttttttcgtccgcgttcacgccctcgaccatgatacagcgcatcaacgtcttgcagcccagctcgtccgcaaagagcagattttcccggattttcgcaaacgagcctcccgtattttgaaaatgccgttcctcgcaggtatccttgacgtcccaataaaagagatcgacgtacttcgccgccccttccacgcgttcttgcggcaggtatccgcacgtttccgccacgacggacagcccgctctctttcgcccttttaaggagcgcgaggctaccctcgaaaaaaagcggctccccgcccgagagcgtgagtcctccgccgcccgcgtaaaacgcctcgtcttttttcgcttccgtcaaaatttcctctacgctcatgcgccgccccgaacgctcgcaggcgcccgtcggacaagccgccgcgcatttgccgcaaaccacgcatttttttctgtccagcagccgcacgggcgaaaacgtatgcgcccccgcggggcagacccgcgcgcacctgccgcagccgatacaggcggaaggatcgaacaaaagctcctccgccgccgactgcgtttcgggattgtgacaccaaagacaccgcaaaggacagcctttgagaaagaccaccgtgcggattcccggtccgtccttggcagaaaatcgttcgatggcggtgacgggcaaaaggacctcgtccgcgcccggcgcaatttttttaagcttagaagaagcgagggaaacctccaatcggccgggcgtcatattccctgttccgtcctttcgatgatcatgtcctgccattgtttatcgagcgtgacgaagcgggcgttccaccccgacacgcgcacggacagcgtcttgtacgctttgggatcgtcgcgggcggcgcgcagcgtggcggcgtccacgcagtccgtctgcatgaaatatccgcccaatttgagaaagcccttgacgagcgcgacgagggaggcgattccgttttccccttccatcgacgagggaagaagacgcacgtccaatgccgcgcccgtcacctgttttttcaagtccgccctgcaataggacttgacggaagcggtcgcgcccgagaaatcggtgccgggcgtgggagaattgttgcccgaaagaatctctccttttttaaagccgaacggaacggcgaagcgggcggcgcgccactcgatttgtctgccgaacgtgctggcgccgggcgggaacagcagtccgtccgtcacgtccgatttggaacgccgccaaagaatatcggcaaagtcgtcgagaatgcgggcggtgtaggcgtccgcctcgccgtcgtttccgtaacagatcagtttcttgcgcgcgtattcccgcaggacctcgtacccttcccaattcgcggcgagcgccgccatgagttcgtcaaacgaaacgagtcgctctcggaaacagagcttgtcgacggcgtaaagactattgccggcgtcgggcgccccgccgatatgcggagaaacgatattgtaaacgggaccgccttcgccgtaatcgagcgctttcccgatacacccctcttcgaaaagcgcgacgacggtcatggggaaattccgtttccacgtttttccgtcgccgttcacggtgcgaaaagcgagggcgtccgcgcagatctcctccgtctttttttccagacttttataaaaagcggcgtaaagagtctgaaagtcgtcaaaatgcgccgactctccctgtcccagacgaaacacctcgcgctgtaaaagttccagcgcgtcgaaagggacgtaagaaaaaaaggtcttgccgggaatttgcacttcccaacacccgtcgttggcgaatttcgccgcttcccgcggcggatatccgtactcttcgagggagcggagaatcagctcttcgttatagacggcgacgatccctccgccgtgccgccaaagctccgccacgcggcgaaaaagcttttcgggcgagcgagaagaaaggcggacggtgatgggaaaatcgccgatgccgagctcttctgccacgtcgaggatgaggtacgtcacctcgttcgtcacttccctgccctcttcattcacccctccgagaacgatattctgatagtgctgagcgtcgccggagcccgcgggcggctcggaacgtatccattcgcagcccttcacgaacaaggacgccaaaagctcccgagcgccttcgacgtctatccttcccgcggcgaggtcggcttgcagatacccgcccaaatattcgtctatccgtcccaatcccgaccaattgccgcaaagccgcgtaaaagcgaaacaacaccaaagcgactgcaccgcttctaaaaagctctcgcttttgccgaaaggcacgcgggacagcacggcatatcgctcgtcgtccgcgcgcagggcgctaagataccgcccgtgccagagccgaaaggaggaaagggtgtttttcaggctctttaaaaatcgcttgcttcggggcgaaaaagcgggactgttttccgcttcccgcagttttttatctatccgctcttcgtaggaatccaatccttcgcgcaccgccctgtcaaagccgcaggtgagatgactgacgccggaaaaaacgggttttcccgcatagaaagcgggcacgagatggtcgatcgccgcgccgagagtcgccgcgccgcagatcttctcccgttccgtcacccgcacgggcgcgcgttcggcaatacggcggatcatctcgtcgtacttatcgtaatcctccctctccccgaatcccgcgacgtcgtccattgtcacaaagggcgttttcagcgtttcatccccgtattttccccgcagggattcctcggcaaacgcccgcgtttcctccgacagacacacgggtctgcctcctttatacgccgtatgaaatatcatttttccatctcctttttaattcgcttctctctatcgcaaagcaacagccccgttaaggacagagagaaaaaatgcagagtaccccttttccgttttattcaaagggcaaaaccgcgtttttaccttcccgtttttcatggcaaagtcatcttggaatcaggcgggaagacgctcgcgattgccttcgccttgattgcaccgggcgaaaaaatgtcgcaaccgttttgcgcttttgtctttttaaacaactcctgtccgaataaggcgtaacctacaaaacgtctttgttccccttgcgcttttattataacgggcgcgtatccttttttcaatcgacgtttctataatctttatggaaatttctatataaaagtcgcctccgccccgcgggaaacggaagcgcctttcttcccgtccgcacaccgccgccaaacggcggcttctgtttcgatctacaaaa

SEQ ID NO: 1621 - DNA, 5282 bp, Unknown
  16S sequences of unknown bacteria
aagtgtttatccgtggctggattggctattttcgtgcagccgatatgaagcggacgatgatgtctttggatgaatggcttcggcgcatgttccggatgtacatctggaagcagtggaagaaacccaaaatgaaggttaccaatctaagaaagctgggcgccccggcagacaagccttaccaatgtgggaattccagactgggctaccggcgtattgccggaagtccggtattgaaatgttacattatagaccaaagactcgtggcagctggatactttagtatccggaactgctacgagtctttgcacttatgcggttgaaccgccgtgtgccggtcggtacgcacggtggtgtgagagatcggctcccgggtctggagagcctcccatgagattgttcaaatcgtgcttatccgaaaaaattaacagaatctataagaaagcgttatgccggtgtgatataattaaattcaggatactcccatatccgacacaaaatatgaaaaaatgaactatgaaagggatagtttgcgtatgaaaaaaacgtttgtcacaaaggaacagctcgagaagatcgcggagatctacccgacgccgttccacatatacgatgaaaagggaatacgtgagagggcgcgcgcgctgaacaccgccttcgcgtggaacaagggattcagggagtatttcgccgtcaaggcgacgccgaacccggtcatactcgatattctgaagcaggagggctgcggggtcgactgctcgtcgctcaccgagctcatgatgagcgacagagtcggattcaaaggcgaggagataatgttctcgtcgaacgcgacgccggctgaggattttatcgaggcgagacgtctcggggcgatcatcaaccttgacgatttcactcatatagattttctcgagaaggtcacgggttcgataccggagactatctgctgccgctacaatcccggaggagacttccgcatcagcacacagataatgggcagtccgagcgaggcgaaatacggcatgaccgacgaacagatcctcgaggcttaccgaatcctgaaaaaaaagggcgcgaagcgtttcggcatccacgcgtttctctcgagcaacaacacgaacaatgagtattatccgacactagccggagtgctttttaagcttgcggtcagaataaagaaggagaccggcgtgtcgctctcgttcataaacctttccggcggcgtcggcataccatatcttccggacgcggaaccggctgatatcgccgtcatcggagagggcgtcagacgcgtatatgaggagatactcgttccggaggaacttggggacatttcgctcttcaccgagctcggacgttggatgctcggtccgaacggaatgctcgtcacgcgcgctatccatgagaagcacatctataaggaatatataggctgcgacgcctgcgccgcgaatctcatgcgcccggcgatctacggcgcttatcaccatataacggtcatgggcaaggaggacgctccctgcgaccatatgtatgacgtcaccggcggtctctgcgagaataacgacaagttcgccgttgacaggatgctcccgaagatagatatcggtgacctgctcgcgatacatgacgcgggcgcgcacggattttcgatgggatataactacaacggaaaactccgcagcgcggagatactgctccgtgaggacggctcgacagagctcatccgccgcgccgagacgccggacgattacttcgcgacgcttagggtcacaaaattttttgaataaattccggaaaaattcgtctatgtggttgaaatccgggacgatgtgtggtataatataggtaaactgcggaccggttccgcggtgacctgtggagaccccggcttatacggtgtttccatgaataaaaaataatttttggaggatacatagttatggcacttcctgtagcacttcagctttactccatccgcgacgagatggcaaaggacatgagagaggctcttatcaaggtcatgtcgatgggatatgacggagtcgagttcgccggtctttacggacacagcgcgtccgagatcaaggcgctctgcgctgagctcggtctcaacccgatctccgctcatgtgccgatcgacgatatggtgaaggaccccgagggcgtcgtctccacctacgccgagatcggatgcaagtatatagtcgttccgtatgtcatcgaggagagacgtccgggcggctccaagttcgatcagaccatcgaggatatgaagatgatcggagagatcgcgaagaagcacggcatgaccctgctttatcacaaccacgactttgagttcgtgaagatcgacggcaagtacggtcttgaccttatttacgagagagttccggcaagtcttctcgagaccgagatcgacacctgctgggcaaacgtcggcggtgagaacccgtcgaagtatgtcctgaagtacaccggacgcgcgccggttgtccacctcaaggatttcgcgggcagcaagtccgagaatatgtatgagctcatcggcatcgacaagaaggtcgagcataccaacaccttcgagttcagaccggtcggcttcggcaatcagaacatcccggacattctcgccgcttccgagaaggcgggcgccggctgggtcgtcgtcgagcaggatcagccgtctatgggcaagactccgcttgagtgcgcgaagatgagccgcgattacctgaagctccttgggtggtaagttttccggatttcttatctgctcggatttcgacgggacgctgacgtgtgacgggagaaccgtgccgcgcgcgaatcttgatgcgatagagcgcttcgagagcgagggcgggctcttcaccgtggcgtccggtcgatttccgggacagattgcggcgataccggatttgtgtatcaatacctttgccgttgcggtgaacggcagcgttatcgcggatatcagagagagaccgccgcgccttctctggacgtcggaggtcgaccgggaggtcgtgcggcgtctcggggagaagttcgatgagatggcggatatcgacgcgcttatcatccattcggcggaggattccgtaaccctgcggcacggcgcgccggaaaacccggagcttatgcggagggcgctctcgcgtccggtttataagttcatactcatgcgggatccggtgataacgcctgaaataagggagtacgccatgcgtgagttcccggaggtcgagtttgagcagagctggcccgcgggacttgagggacgcccgaagaacgccgggaagggaaacgccgtcgcaaagctcgcgtggctcctcggcggtcgggaaaagatacacaccgtaatagctgtaggcgactatgagaacgatatctcaatgataaaatacgccgacataggctacgcgaccgcgaacgccgcggagaacgtcaaggcggcggcggaccgcgtcacggtatcgaaccgcgacggcgcaatcgccgctataataaaagatcttggctgatgaaagccggagccgtctggcacggctccggtgttttttaatgaaatcccgtgggacgtcacgggatgaaaggtaattaatatgagaatcaaatacctgtacaaggacggaaagaaaaaggctctcacgatgagctacgacgactgcgcggtacatgaccgtcggcttgtcgaaatattcaataaatatcacataaagggaacattccatcttatttccgagaggatgatgcacgagaactcggagataaagctctctgatatcccggttctttacgccgggcatgaggtttcctgccattcgctcactcacccgttcttcgatcagataccgaaggaggagcttcttcacgaaatgctcgaggataagctcacacttgagaaggcgtgcgggtatcctgtccgcggaatgtcctatccgaacggcatcataaccgaagaggtgcttgaatgcctgagggtgctcggcttcaagtacgggcgctcgacgatttcgacgaacggattcaagctcccggctgacttcatgcagtggactccgacctgccaccatagtggaaatataatcggaaagatagatgagttcaggaacgcgtactatgcgctcccgctgttttacatctggggtcacagcttcgagctgccgagaaacacgcccacgagcagctgggagatgatggaggagttctgcgataaattcaccgctacttttgaggatactgtctggtacgcgacgaatatcgagatctatgattatgtgaccgcgctgagagcgcttgaactctccgctgaccgcacgatggtgctgaacaactcggcgatgagcgtgtggctcgaggtcgacggcgcgccggtcgagataaagccggggctgacccgcctcgtctgagcttaaaataaaatacagaaccgcgtcgggcgtacatccggcgcggctttgtgtttattcagctaacttcttcagctttttcggagctgagcccgacaacggcgtctaccggcgcggcgaaggcaattccctgagcgggggtcccgagtccggcgcccttgtagagggcgtgcaggacagtgtcgcgtatctcgctcttcacgaggatgagcaccatctccttctccggctggatcgagatgttgaagaatttctcggcttccttgtccgctgttccgcgggcgttgattactgttcctccgcgtgcccccgcggccttcgcggcgtccatcaccgcctcgctgaagccgttgttcactatgcagactatcatttcgtgggtgtgttccatttcgttccgactccttgtctgttattgctgaggaagcgatagagcgcgacgcctatcgtgcttgtgagcggtatcgtccacgctattccgctgccgccgcgtatcgttctgaatttgtgtgagagggcgtcgagtgcctcagccgcgcggtcctcgcgtatgactccgatgacgaccgcctttccggtgtcctcaagaccgaggagctgcaaggtctcggtgctggcggtcccgtgcgccatcgtcaccgtctgcatattcacttcgaaatcctgaaggaaatccgtgtagaactcgaccttgtcacggttcacgatgagcattatgagtttgagcttgtgcggtgcggcactgactccgaactttatttttccttgtgtgttgtccattttctgtcctccgcgtcagatgaattcgattatctgctcgtcgtccgcctcaagcatacgacggaccgcgatgcgctccgcgagcttttt

SEQ ID NO: 1622 - DNA, 7512 bp, Unknown
  16S sequences of unknown bacteria
cgacgaacatctccacgaagtcggagccggagatgctgaagaacggcacacccgcctcaccggcgacggcacgtgcaagcagcgtcttgccggttcccggaggacccacgagcagcacgccacgcggaatcttcgcgcccatggcctggtacttggccgggttggagaggaagtccttgatttccttgagctcctcgactgcctcgtcgatgccggcgacgtcggagaagcgcaccttgggcgtctcttccgcggccttcttggccttggtcttgccaaactgcatctgcttgttgttgacgccgttcatctgcgacaggaagaagatcaagaagccgaagatcaagacgagcggcagaagcgtcgtgagaagcgtcgtgatccaggtggaggtggtgacgtcttcgttgtaggtgatgttggggtgctgggccatgagctcctgcagcgagtcatcgccggtgtaggcagacgtgaaatcgctcgccgagtcggagtccttcgcggcctggtctttgtagtacgtgccctcgagcgttgccgtcgacgcatggtacgtcacgtctttcaccatctcgtctttgacggcggtgacgaactggctcgtggtgagctggtctaccggcttgctcggattggaaccgacgacctggctgaccaccagggcgacgagtatcgcggcgagcagcacgtacaagacgatgttgcgcggcgtgttccgcttcttcttgggcgtgtttgggttttcttccacgcacggtctcctttatcgagagcagtcctattacttttcgtacatctccggcttgagcacgccgatatagggaacgttgcggtagcgttcggcaaagtcgaggccatagcccacgatgaactcgctcgggcattcgaacccaacgtacttgcaggtgatgtcggccttctgcgtgccttccttgcgaagcaaggcggcaacttccaaggacttggggttgcggctctgaagcatcttcatgagatacttgagcgtcaggccagagtcgaggatgtcctcggcgatcagcacatcgcgcccctcaatctcggaactcaggtctttgatgatgtggacgacgccggatgactgcgtcgaggcgccgtaggagctcactgccatgaagtccatctcgaggggcagcttgatctcgcggacgaggtctgccatgtagatggaggcaccacgcaagacggagatgacgagcaggtcttctgcgtctgcatagtctttcgtgatctgcgcacccagctctgcgactcggctcttcagctgctcttccgaatacaagaccttctcaaaatctggatgcatgacgctcctaacatcatcgacaacttcgccattatcgcacggggcgtgcgatttccttaattcatcaccgtattgtcatctacctgccgacatgcggtgactatcaaaatatgcattattgcgcacgcgagcaacacagaaagccgtctgcgatgcggattcgtatcccgcccgacacctcggttgagaagcgcggggtcgcaagtcccctgacgacgcgctctatctgggcggactcgaggcgcgcgtcggggttgacctcgagcagcacccggcggatcacgcggcgtgcgtacgggcgcggcagctcggcgagcgccgacgtcggaaagcggaactcgcccccagcgcgcacgaggttcttccggacgtttgcctccacggcacgggagacttccgcgtcctcgctcgcgatgaggtccatggtccgcgcgagagacgcctcgaaccccgggcgcagatcgcgcagcacgggcatgagctcgtggcggatccggctcctgaagttggagccgtcgtcgttggtggcatcctcgcgccacagcgcataatccggctcggtcggatggcagctgcgcaggtattcgcgcagctcctcgcgcgtcgcgtcgagcagcgggcggcgcaggcggccgcgcctgcggggaatggagcccaggccaccggggccggtacccacgagcgagcgcatgtagaaggtctcgacgcggtcgtcgagcgtgtgggcggtgcagacgagcccgagcgagcggtcgacgcccgcgctgtcgcagatgccgtcgagcacctcgcctgccagccggtacctctcctcgcgcgcaaccgcttcgatgccgccgcggcccttcgcggcgagcgcggcgatgtcgacacgccgcacctcgcaggggacgccgaggtttctgcactgcgagatgacgaactcctcgtcgtcatcggcatccatccccctgagctggtggttgacgtgcagcacgtgcagatcgcagcgctgcgcgggcacgagcgagcgcgccagcatccgcacgaggcagtcctttgcctgttgcgcctcgtccagcttgaacatgaccgtgcccgttccgcgcacatagcggaccgccagctcgagaagcgccgtcgagtccgacccgcccgataccatgaggaggacggggatcttgcgcattgtctgctgcgccatactcaccacctgtggattagccaaagagcagccgcagcgcccgtgccgcagccgccccgcgaaaaacgtgccccacgaaagagcgctacttcgattcctcggcaagggagctcaagatctcccccacgcagcgcttgacctcgtgcttcgtcttctcgatgtcgatggtcaggtattcgccgtctcggtagaggaccttgccgtcgcacatggtcatgaccacatccgccgcgttcgcgctgtacaccaggttgaccgccatgtcgtagaccggcgtcatccacggcgtgtcgatgtccatgacgatgaggtccgccttcttgcccggcgcgagcacgccgcagtcgtcgcgcccctgcgccttcgcgccgccggccgtgagcatcctgagcacgtctttggcggggatgaccgtcgggtcgagggcgttgcccttctggctgcaggcgagcaggtaggcgctttgcagcatgttgtgggtgttgttcgacgccatgccgtcggtgcccatcgagagattcacgcccgcgtcgagcatcttttgcacaggcgcaaagccgctggcgagcttcatgttggatgctgggttcaggctcacgttcacgcccctgcgcttgaagatctcgatgtcggagtcttccacccacacgcaatgcgcggccgtcgtcgggctgtcgaacacgccgcagtgctcgaaccaggcggcaggcgtcattccgtcgtgccgctgcttgcactcctcatgctcggatctcgtctcggaaaggtgcaggtggatgttggcgtcgtgcgcccgcgcctcttccgccacgcggcgcaccatgccctcgggcgtcgtgtattcgccgtggatgcacatatcgatcttgacgcgcccgcccccggcgttctggtaattcgcgaagagctcccggttgaccgccgcgaccggcaggctgtcatagtcggtctcgacgaagcacatcgtgccgccgtcggtgtgatttgccttcatgcccgcctcgagcgtcgcgttggcacggtcgatagtcgcgaagtacatgtccgtgtagcttacgacgccgcagcgcagcatctccgcctgggagagcatcgtgccccagtagtggtgcttgcgctccatgtccatcttgccctcgaacggccagaccgtgtcgttgagccactgctgcagcggctggttttcggcgtacccgcgcagaagcgtcatgggcgtgtgcgcgtgcgtgttgtagaaggcggacatgaggagcttgcccgcgccgtcgtagcgctccccgaacctctcgggccgctcgggctccgcatctcccacataggttatcgtgtcgccctcgaccccgacgaacatgtccttcttgtagtcgaggttctcgtcaagaatatcgatgttgctgaaaagcatatgagcgtcccttcgcattagtagacgtcatccaataatacacgttcccagatttgcgccgtaagacgcgatgcgaaaaagcgacggggctacttgcgccgtttgtggtcacgccgcatccacagcaggtcccagatggcgagcaccatgcccgcgaggatgcagaagaagccgaacgccgggacgccggcaatctccggttcgagccccgtcgtgcacaggatgcacgatcccaaaaacagcatgcccgccagcagggccaacgtgaagtggtcgatcgagctgcccaggtcctcgcgcgtgaccttgtcggcgctaaagctcatggcggccttgacctgacctttctggagcatgtcgagcgtgtctgccatcttcgtggggagcccgaccgtcgcctcgacgccgtccacgcccgagttgagcaggtcgcgcaggtacttctcgaccatgccgtcgtcgaaatgcgcgctcatgtactcctgaatggccgacatgatgctgacgtcgccggatatcacgtggagcgacccctcgagcgtcacgagcccgcgtgcaacgttcagaatcgacgggttgaactcgaacccccccatggccatgttgccgatgaggtcctgcaaaagcgcgccggtatcgaggctctgcaagtctaccgaggcatattgctggatgagcaggtcgcaggtggagagcaagacggtgtggtcgatggggcccgtcgggcggaccagcacctggattgccttcatgaggccgtgggaatccctgcgcgcgatggcggtcatgacgtttttcgtcgcctcgcgctcgacgcccgtgagcatgcccatgatgccgaagtcgatccactcgatgccgtcgaagtccccgtttccgtcgctcgtgaggatcatgttgcccagatgggggtcggcatggaagaagccgtcgtcgagtacctgctccatccagttcttcgcgatgaggtgggcgaggtctttgcgcttgtcctccggtatctgctcgagcacgccgtcttgctcgagacgcggcccgcgcgcgaagtccatcgtcagcatgagcgatgtgctgtacttctcgaaggcgcgcggggacttgataccctcgcgcgacacgttgttgccgtggaagcgggcgaggtagcgcatctcgatggtgaggtccatctcgtctttggacgtgcgctccagctcgtcgaggagctgctcgaacgaaatctgcgccgagctcgtgttgatgaactcgtaggtggcgagcaggcggcgcatgagcaggatgtcttttgcgacgacctcggcgacgcctggccgcatgaccttgaccgcgacctcatcgcccgtctccttgaggatggcgcgatgcacctgcgcgacggacgccgagcccagcggatgctcgtcgagcacggtgaacacgtctgtgtacgggcagccgagctcctcgttgatcgtcttgacgacggtgtcgaaatcgaccggctcgacatctgcgcgcagcttgccgaactcgtcgcagtactctttgggcaatacatcggggtgcgtggaggcgatctgcccgagcttgacgaacgtcgggccgagctcctgcaagatggcgactgccttcttgggcgtcagcccttgcgtcgtcaccttgtacttgcggatgatcccgaaaatctcgcgcatgcgcttcgagctcgtcttgtcctcgacggacaggcgggccagcttgacggcttcttggaacgtcggcatgcgtgcatcactcccgaatcataggaaaactcggtcaacagttctgcaagcattgtagcaagcaaagctcgagcacccgcacgtatgcgcctagcgagcgtatttttccatcaggctgccgccgcaggacgaaccgcatcctgcagcgcacgagtagcagatcgggttggccgcaatgcgccgctgcgcaagcggggcatcgacgatgtcgcggacgtttttcggcccgtcgatgggcaggccgagcacgtggttggcctcgcagtcgtacagtccgccgtcgtagtcgacgttaatctgcgtgcggcacatgatccgcgcgacgacggcggcgttgtagttgtcggccagcagcttgaggtaatagtcgaacttgccctgcgacttcagcttgttggcaaagcgccccaggttgtagttgttgaacgcgtacagcccgttgaagtcgacgtgctcggtgttcgcgagctcatagcggtagaactcctcgaggtcgccctgatccggcgggaggaacggcccgtcgacgttgtagacgaggtcgatctgcagctcgggatcgcgcccgtagccgcgctcgttgaggtcgcgcagcacggcgatgatgcggtcgaacgagccgttgccacgctgctcgtcggtacctgcggcgttgaagtacggcagcgaggtgacgatcttcaccttgttgtccacgtagacgtctttgaagcgctcgtattccggcatgtcaaggatgcacaggttgctgcgcacgatgacctcgtcggcggtcttcgcgctctgctggatgaaccactcgaggtcggggttcatctcgggagacccgcctgtgatgtccatgacctcgtagccgccggtctcaaaggcggcaaggcacgcctccatggtctcgcgcgacatcgtctcgtcacagctggggctgcaattcaagaagcagtggttgcacgccagattgcagcggtacccgaggttcacctgcatggtgcgcagctgcacggtgcggagcagctctttgtcgtggatgaagtcgccaaacggctcgatgccgagcttggcgcacgagcgctcgagcgactcgaggtcgacttcctccttgccccgcgcgatgcgcagcgcctcgttggcccgctcgaagtcgaacaggccgatgttgtccttgcgcggcgtcacgaggaagtgctccgcgtagcggctcgactgcaggtacgtcgccatgttgccgctgatcgccacggggcgccccttgatgagacgcacctccttcgacaggtcgaagtagcgcttgttctcggggatggtgcccaggtacgtcgccgtctgctggtagtcctcctcgcggtcctcgaagtcggcgcactggaccgcgcgcaccgtgtgcgaggaaaagccgatgcagccgagcttggtcgcgatctggaagtcgccgatgtgcacctcttcttcctcgacgtcgaagaaggcgttgatgccgttggccgcgagcatgcggcggaagtcctcgatgtacatcgcacccgagagacactcccctctcaagatcggatcgtcgtagaagccctccggcacgcgccggtcgctgaagatgtcggaaaagtacagctcgccgccgggcttgagcacgcggaagatttccctgaacagctgctctttgaacggggacaggttgacgacgcagttggacatgaccacgtcgacgctctcgtcgggaaccgcgcgcatgtcctcgatgtagctctcgatgaactcgacgttgctcttgtcgagcccgagcgcggcaatctgcgccgcctcgtggctccgggcaaactcgagctggcttggggtcatgtcgacgccgatgacgtgcccgttc

SEQ ID NO: 1623 - DNA, 32759 bp, Unknown
  16S sequences of unknown bacteria
ccgccgctcccccgctgcgccggcaaaacgagagaaggcccccgttgcaaatcggttcgccgcaaggcgggccgatttgctgcgggggccttgtgggaaaggcgagggggcccgaaagggcttcctcgcctttcccacacacgtcgagggaggccggggtggggcgggccgcgggcgcgctagaggcggatcacgcgcaggggcgcgtcggggagccggcgctgcacggtcgcgagggattccggcgcgcagtccatgccgataaaggttcggcccaggcggaaggcggcctccagcgcggtgccggagccggcgaaggcgtccagcaccacgtccccctcgcggctggcgcagcgcacgatgcgctccaggagccgcaggggcttctgcgtagggtagccggtgcgctcgggatcgcgctggtgcaggtgcgggatgtcggtccagacgtcgctggcgggcacgccctcgtcgtcgaaatagcggtagaggcggccgccggagcggatcgcgcggtaggcgcggccgtcctcgtccacgccgcgcttcatgtggttgctgcggacctcggcgcggggcagcgggtcctgcatggcgtcgaaataggcgtcgcgggacttggcaaagaagaggagcgtatcgtgcttgcgggaaaagtgcgtctgcgcgcgcccgccgctgcggtagcaccagacgatctcgttgcggaagccctccgcgccgaagatctcctccagcagcaggcgcagccgcgcgtgcgtgcgccagtcgatgtgcagaaacaggctcccgcgcgcgtccaggacctcgtatacgccttgcaggacggcgcgcatcatggcataatagtcctcatcggagggaaaccggtcgcagtacgcgccaaagtcccgccccgtcagatacggcgggtccaggtagcagagctgcacgcgccggccctgctcggccaggcgctgcaagccctgccgcgcatccccgaggtaaaactcgttcaaggcccttcccccttttctcattctctcgttttcggaggcgatgcacatgaccacaaaggaagcgctccttgccgcgcgcgacctgctcgagcaggtcacgcccctttccacggactgcggcgcgctctgcggcgcggcctgctgccaggacagcccggatgaggactcggtcgcgggcatgctcctcttcccggaggaggccccgctctacgcgcgccagggcgcgtggatggagctcctgccctcgcacctgctctttgccggggagccggtgccgctcctgacctgccggatgccctgcccccggcccatgcggccgctcgcctgccggctcttcccgctggttccctttgtcaagggcgaccggctcaccgtgcgcatggacctgcgcgcgcgcccgctctgcccgctgtacagctcgggcatcgcggggctctccccggcgttcgtctcggcggtcaagtccgcgctgcgcctgctctgggcggacccggtgcaccgggaatacctctgcctgctgacggagcacctgaaggaatacgacttcctcgcgccgcaggacctctagcgcagcccctcgcgctccaaactctgcgcgagggcgcgcagctcccactcgcaggcgtcaaagtccggcgtgcgcgcgcgcacgaggcggcggaagtccgccgagtggtcgaagtgctccagatgcgtcaattcgtggatgacgacggaatccaccgccgcggggcttgcggccaccagccgccaggagaagttgagccgtcccgcgcgggagcagctcccccagcgcttggccgcaccggtgatgcgcacgctcgccgggcgcgcgccgaacgcgccggcaaagtgcgccacgcgcgcgggcagcagctcccgcgccgcctgcgcgtagagcgcggcgatctgcggcaggagcgccgcaaggtcgccctccggcagcaggaaggccgcctccgtccggcgcgcaatgccgtcgggcgcgggccgcacgggcaggcgcttccccaggaagggcagactctccggccgcgcatggcgcgcggcctgcgcgcgggctgcatcctccctgcgcgcgcggagccacctgccgtgcttctccagggcggcctcgatctgcgcgcgcgggcagccgatgggcgcgcgcacctggacgcttccgtcctcgcccacgcgcagggcgatggacgagcgcctctcgaagcgaacggtatagcgaatcgcagtcatttctccccctgcccccgtttctgccggcgcagcgcggcgcgggctcccctgtgcaaagcaccggagcccgcgccattttttctacagcaccgagcgaatccagtcaaagaaccagttgtttggataaaagagattcagcagcgtggactgctccaccatgtcggtgatcaaatcgatctgcagcatgttgacggccagggggatcatggtcaccagcaccatcagcagcaggaacgcgcgcgcgagccccagcgcgccgccgaccacgccgtccagtatgcgcaggaccgggaagttgaacacgcggttgacgagcgtgaccaggagcgaggccacaacgtaggtgaacaaaaacagcagcacaaaggaaatcgtgttgagcgaggcgtcggccacggtctggttgaagtagtcgaagagcgtgttgtaggtgccggcatagacgaggccggcgacgttgttggccaggtaggtgtcaaagggcggcgtgaagttcgcgttggagatgacaagcgcgatctgctcctgcgtgagcgaggtcaggtccgtgcgggcatactccatcatctcggtcgtgatgtgggaagacccctccgagaagtagacgaggtagttcatccacgtctcgtgtccggcgatccattccgagaccaggggatagcagagcttggccacgagcagcgccgcgcccacggccacaaggttcagcgcggttgcgaccgagccgcggtagagccccaccagcagcgagagcgcgaaaaaggcgagaatcgcatagtcgatgatgttgagcaaggcgatgtcctcctgttcctcaggggagggttaccaggtagacctggtccgcgctcgagagcagaacgcggttgttgttgaggcggcagagcacgtcctccaccgcatagggcagggagctgacgctcgtggccccgccggccagcggcacggaatagaccgtctgcccggcaaagccgtagacgctgcgcgtgcccatgcacaggtccgtgcagcccgcgggcatatgcaggtcctgcgtctgggtgcccgtgaggacgcgcagggcggtcgggttctcctgctggctggagagggtgaagagcatgtgcagctcgtccccggcgcaggcgtcgcacagcgtccagccgtagatcgggacgctggtctccgtggtgtcgctggtgctgcggccgtcgacggtgcgcgtgccgacgatgtagacggagctgccgctcatcagcgcgcggtaatagagctggtccgtcgtggaataccccgccatcaggagcttgcccggctgatagatgttgagcacggaccggggcaggatgccgctggagtccagcatgagcacatagagcagatccgaagaggaatagagcgcaaagtccacgagcgtgccgtccgaaggggtgagggtctccacgctcttgcccgtgctgtcgatgacctcgatggtgtcgtccgcatactgcacggccacgcggctgtgcccagccgagacgcgcgcgatctccttctgcggcgagacggagaaggccacgttgcccgccgtgtcgtagacgtagagcgaattcgccttgtagagcgccagcagccaatcgctcgaggcgcaggaatagccgtccgactgatcgggggagcgctcccagaggagctcggccgtgcggccgtcataggcgcgggcataggttccgtcaaaggcgacaaaggcgtcgcccagggcgcagaaggtcatctgggcgctgacgccggtcacggccgtgccgcccccttccagcgaggccgcgcctggcgcgcacccgcgcaccgcgagcagcacgccgcccgccagggccgccaccaacagcgcgatgaccacatagcgcatcacgtgcggcatgttcagcagaaatcggaaccgtaaggacgaagcgcgcatccgacaacccccgtattctccatttttcccggccgcgcgtgaaagcagggccggagattacaatattcttcggccggggcgcattttcctgcaagccgcggcgcgcgccgccattttttcggcgctcccccgcctgcaaaatcctgcatggacgttacataaacggcgcacgcggcggctttgttgcagggcgggcgcggcgcggcgattgccggcgccgccgcccgcgcaaattctccgtcgccgctctgctttgctgtaacacacattccggctgcggcatatgatgcctgtgtcaaccgaatcccccacgaccggaaaatcttaaggaggcaagccgacatgtcgttctacagctataagaactgcaaccaggagaactgccctgggccgatcaagggcgacctcaagggtctgcgcgaaaaggtctgcgtccaggtcaagaaggtctatgattcgtgcatgcagcaggagcagctcgaaaaggtctgcgtaaccgtcacggacatgacgcccgtgtgcgactgcgactgcgcgcagcccttcaccccgcccatctgctttgagagctgccgctcctcgggctatgtgggcacgatccggaacctgatcatcgaccgcatctgcgaccgcccgggctttgcgcgcgtgcggtgcgcggtggacattcccatcgacatcctctttacggacggcaactgccgcgagggcatcggccacggctcggtcaccgtcaacaaggacgtcatgctctgcatcccggacgacagcatcgtccccttcacgatggagtccctggtcagcgcgatctgcgtctccggccgctactgcagcaacaacacgtttgagctgaccatctgcgtgaccgtgatcctgaaggtcatcgccgaggtggagatgctcatcccgtcctttgggttctgctccgtcccgccctgcgaagagttcgcggaaaatgtctgcgacgaattcttctccctgcccatcttcccgcagaacccctgcgccgaccccgcaaaccgcccggcctgcgcctgcaacacctgcaacacctgcggaacctgcaacacgtgcagcacctgccgcacctgctcgagcacgacctaagatctgccgtacataccgcgcaacccgttccatcccatctgttgttcctccatgcgctgcgggggaaggggaaatcgcccctttcccccgcttttttgcgcgcgggcaaaaaaagcgcggctgggactaggaaagcgggcccgggttttggtataatggaggcagagaaccacaagcatccatatacagcgcccaaggcgcatcagaaggaggagttccccatgctcgaccgaaccctggacacgccgctgtacctccagttggccgccctcctgcgggaggacatcgccgccggccgcctccggcccggggacaagctcccgagcgagtcggagctggtggaacgctacggcgtgggccgcgtcaccgtgcgcgaggcgctggccctgctggtcaacgaggggctgctgcgcaagctccagggccggggcacgttcgtgcgcgccgcgcacgcgggccagcccctgcgcatcgacgtgctgctggacctgcgggagcggaccttcgcgcccgactacctggagagcatcgagggcgtgctgcggcgctacggcgcgacctgcgtgctgcacaacacgcagggctgtgacgacgcggccgcttcctgcatcgacgaggcggcccaggccggcacctcgggcgtgatcctccggcccggccccgcgcaggactgcccctccccgcggcttgccgccgcgctgcggggcctggcggaccgccgcgtgccgctgatgctgctcgaccgcgcgctggacgacgtggacgcctccttcgccgtgttcgacgacaaggccgccgggtccctggccgcgcagcactttgccgagtgcggccacctgtacctggccatgatcggggacgacgcccggcacgacgccttcctgcgcgcgctggggtttgaggactacctcctgcagcacaactacgtcgccccggtgatcgaaaacgaggccgcggacctgggcgcgcagctgcagcgcatcctgcgcgaaaacccggagatcacgggcctgttctgctacagcgacgcggtggccgcgcgcgcggtggaggccttgcgggcgcggggcctctcggtgcccgcgcgcatctcggtcgtgggctgcgacgacgcggccctggcctccgccgtgcagcccaagctcaccacgatcgtccaccccaaggccgccctgggcgcgcaggcggccgaggccctgctcaagatcctgcacaaccccgcgctggccccctaccaccaggtcttcgccccgtcgctggtcatccgcgactcctgctccgagatctagcgccgctttggcagacaagcgccccatgcggatttctccgcatggggcgcttgcgctgcggccttgctcagcccgcctcctcgtgcagcacgccgtcgatgatgcgcacgatgcggtgcgcgtgctgcgcgacgttcaggtcgtgggtgatcatgacgatggtgttgcccatggcgttgagcttctcaaagagagccagcacctcggcgccggtcttggtgtccagcgcgccggtcggctcgtccgccagcaggagcttcggctcccccaccagggcccgggcgatcgccacgcgctgctgctggccgccggagagttcgttcggccggtggtggatgcgctccttcatctccagcaggtccagcttctccagggagcgctccatggcctcccggtgcgagaccccgcgcaccagcaggggcatcatgacgttctgcaggaccgaatacttgggcacgaggaagtatttctggaagatgaacccgatcagccggttgcggatgagggtgagctgcgcgtcgttcatgttctggatgggcaggcccatcaggtggtactcgcccttctgcacggtgtccatgcagccgatgacgttcatcagggtggacttgccgctgcccgaggggccgaggattcccagaaactccccctcgttcacggtcaggttcacgttcttgagtgcctggacctcgctctccccgatgcggaaggagcggctcaggttctcgatgtggatgacattcgttctatcctccacgccgctgcccccttatgcttccgcatccaggacccggacggacgcgatggcgccgtcctcgtccagcgtcagctgcaggatcgcgtcctcggcgctctcggccgcctcttcggtttccgcggacgcctctgcatcctcaggcaggtttgcgggctccagcagagccagcgtcaccgttccctccgtcacatcggtcacgcgcccgagcacgatgttctccatgcccaggccgggggcgccgcccgcgccgggttcgccgcccgcgccgggtccgccgcccgcgccgggagatgcctccgggtccgcgcttgccgccggggattcgctgggctccgcttcttcgctcgcggccggggattcggcggcggtctcggacgcttcgggggattcctctacgatggtcgtggtcgacgcgcatcccgccagcagcagggccagcgccaggaagatggagagaagtttcctatttttcatgcagagagcctcctttttggggtctttattttcagcggacgcttgcggcgacgacgtccccgtccgcatccagggagagttcaagcaccatgccggtgctcaccgtgctgtagtcgccggtgccgatgggcatgcccacgggcagaagataggtggccgtcgcctgcgcggaggattcggtttcctccgtctgcgcggcttccgcgtcctccgtctccgcgggggcttcggaggctgcgggcgttgcagcaggggtggcggccgcctcgggttccgcgggggcggcggttccgtccgtgagcaggagggtgacctcgttgccgacgatggactccacttcgcccgtcacggtttcagcgacctccacctgcagcgtctggctctgcgccccgccgccggctgtaccggtgccgccgactgtaccggtgccggtcccctccgggggttccatcccctccgggcgttccattccctcgggcatttcgccgccaaagtccgccgcgccgccctgggcgctttcgcagcccgcaaggcacgccgccgcgagcacaagggccagcgcaaggcacgctgtgcgcgccgcattcgatcgtttcattgcaaatctccctcctgcaatcagttgaggttgagcgcctgaatggggaccaggcgcgaggccttccaggccgggtagaagccgaacaccgtgccggtgagcatcgcaaacaggaaggcgagcaccgcgccccagaggctggcctcgcagcggacgccgagcatctcgaccacgggcatgacggcaaagctcagccccacgcccgcaaggccgcccagcaggctgacgaagttggcctccagcagaaattcgagcaggatcgtgccccgggcgcagccgatggcgcgcaggatgccgatctcctgcgtgcgctcctgcacggaggcaaagagcacgttcatgatgccgattccgcccacgacaaagacgatggacgccaccgccagcagcagcatggccagcgtatccgccgaggaggaggccgcctccatggccgagcccgcgtccgtcacttcaaagtaggcgttggggtagttttccgtcagcaccgcctcgatgtccgccatgcactgttcgacgtcctccacgtcctcggcgacggcggcgatggtcggctccaccgtggtcccgaagacgtacttttccgccgtggaatacggaatgtagaccgccgagtccggagagatgccggagcttacgctgcccatctgctcgagcacgcccacgatctcgtagttcttgtcctcgatctccaggtagtcgccgtaggcgtacatcgccgagccgaagatctcctccgcgaggtcgtagccgatgacggcgacgtagtccgtggcgctctcgtcctcatcggtcaggaaccggccgtagagcacggagaggttggaaacgtcctggtaggcttcctgcgcgccgacgacggtcgcggtcacggcctcctccagctccccgccgaagacctcgatgtccccgctcatgaggatcgtgacctcggcaaggttgggcacgagctccttgaggtcctcgacgtcctcctccgtcatgcgcgtgccggacagggagttggagccgccgggcatcccaccgccgccgggcattccgccacccccgccgcccccgccgccgaaggagggcattccgccgcccatcatgtccatcatctcgcccatgggcgcctcgtccgtggcggtgacttcgatggcgccggcgttgaggttcttgaactggtcggccacgtccgcctggccgccctggcccacggcgatgaccagcacgatcgtcgccgcgcccacgacgatgcccagcgacgtcatgagcatccggttccggttcccgatcaggttgatccagaccaggcgcagcacctcgccaaaccgcatcatgccgcgctcaccgcgctttccgccaggaccgtctccccttcggacaggccggagacgatctcgacgtacatgccgtccgtaaagccggtctcgaccacgcgctcctcggcctggccgtccgcgccctccacgagcacggtcgagatcccgccggagaaggtgacggcctgggcgttgacgtagagcacgtcccgcgccgcgcgctgcacgagggtgacctccgcgctcatgccctcgagcatgtcgagcgtgttctcctcggcaaagcggacgttgaccgtgtagctgacggtcgcagcacccgagcgggcggattcgacggtgatggtgtccacctcggctgcaaaggtctggttggggaaggcgttcatggtgacggtcgcctcctggccgatggacacgttcaggatgtcctcctcggagatggtgatgggcacgtacacggaggagatgtccgtcatggtcaggatcgtcgcgtaggagaggatgaggttggtgtcctcgtcgatgaagaccccgacgtcgtcgccctcctccacgctgatcgaggcgaccaggccgttgcagtcggcgtagacgatgccgtcgtcgctcaggagcgagcggacctcctcgatctggtcctcgagctcgtcgtacgtctcctgcgcagcctcaaccgcctgctcgagctccacctccgtcagctcgtattcgctcgtggcgatgtccgcgttggactgggcgctctcctcctgctgttcggcgttcaggcggccggtggtcaggttcagctgcgcctcctccagcgcgagccgggcctcctccagctcctcctccgtcagcgcgatctcctcctccagggcgtccatggagtcgatggtgccgtaggtctcctggtagtactcctggaagtcggagaggatggaggtccaggtgttgccctcggtgtccatctggtgctcttcggccatgtcctcgtagtattccagggtgaccaggtcctcctcgagcgtgtccaggcaggcggtccagtccgtaagctcctgctccttgtccgcgaggttctcctccgcctccgtcaccgcgcgctcgagctgggtgacggtgagcgccgcgttctccgcggccagctcgccgctctgctgcgtggactccatctgctgctgtgccgcgagcagctggctctgctggttgagcttggcctgctccagctccaggcccaccatgtcgagctgcaattcatagctggcaaggcccgtctcgatgtcctcgacgttcatgcggaccaggggatcgcccgcgcgcacgctggacccctcccgcacatagacctcctcgaccgtcgccgaaaccgggaaggtgacggtctcgcggtccagggagatggagctgctctcgctctggcccaccaccacgtccccgcgctcaaccgtgtagcgccggtaggtgacgctgcccgcctcgtcccctgcgccgaagtaggacgtcaccgcgaagtacccgcccgcgcccagcccggccgccgccaccgcgcacgccgtgacgatcgccgcgatgcgcttggggctgcgcggcttcttctccagccccagcagggcgttcaggtccttctgctggcccgtcttgttgtccttgtccattacctgcacctcttttgcccaagatttcggggtttgcagcgccttttttgctgcctaggagaagtatagagggcctacgtggtgcctgtatgaacgtcccatgaaccttctttttccagaatttgaacgacgtgccggttgcgtgaaggctgcgtgttctttgcgtgaaggcgcgcatttttctttcgccaaacaaaaaaagcgcccggcgagggaaggtttccctcgccgggcggctttgtttgccgtcactcggaaacgtgcaggagcccctgctcaaacatgtgggcgacgtggtcgtcgtccagcgcatagaacacggaccgcccctcgcgccgggcgcgcacgagccgcgcctgccgcagcacgcgcagctggtgggagatggccgactgcgtcatgcccagggtctcggcgatgtcgcagacgcaaaggcgcgtgtcgtgcagggcctgcaggatgcggatgcgcgtcgggtcgcccaggaccttgaacaggtccgccagggcggcgaccgtctccggatcggtcagggcctggcgcgcggtgcggatggcgtcctcgtgcagctcgacctgctcgcagcacaggtcgttttcgtccatgcccgtcacgccctcgtccccccttcggccttgccctcatccagcagcgcgagcaggtccgcctccgtgaagtcgtagaccttgttgcagaagtggcagctcacctgcgcgccgtgctgctcggcgatcatgccgcgcatctcggtttcgcccatggagagcagcgcgcgctcgatgcgctcgcggctgcagtcgcaggcaaagcggggctggcgcgcctcgagcgtctcacgcgaaaagtccgcaagcgccgccctggccagctcctgcgcgttccccgcggcgcgggccatggccgagaccttggcaaggtgcggggcgagcgcctcgagccgggcgagcgtctcctccgggcagccgggcaggggctgcacgagcacgccgcccgcgccgacgacctgcccgccctcgaccatgacgcccagggccagcagcgagggcgtctgctcggaggcggtcaggtaaaaggcgatgtcctcggcgatctcgccggagacgaggcgcgtctggccgacgtaggggtcgcgcaggcccaggtccttgacgacggtgacgcgcccgtcgcggccgaccgcgccgccgacgtcgagcttgccgtccggccgggggggcaggtccacctgcgggttgtcgcagtagcccttgaccacgccgtccggccgggcgacgcacacgatcgcgccgatgggcccgccgccgcggatggtcacggtgagggaatcgcccgcgcccttgagcatggccccgagcatggcggaggccgtcagcgtccggcccagggcggcgcaggccgtcgggctcaggtcgtgggtgcggcgcgccgcctccacaaggtccgtcgagcaggcgacaagcgcgcgcgcctggccgccctccagcgaaatgtgcagtatctgatccattctctatcctttccataaaaaagctgccgcgccgagcggcccggtctcacgcctcgggccgccgggcggtgaagtggatgcgctcgtcctgcgcgcccgcgggttccatcgtcatgccggacagcgcgcgcccctgcgcaaacccggcgcgcgcaagggcggcgagcagctccccgacctcgtgcgcgcgctggacgtgctcctcgtcaaagcggcggtagcgcccgtccgcctcccgcacgaagaaggccaggctcatgcgcagggtgcgcgcctcctcgctccactcgttcatccaaaggtaggtcacgtcctcccggtcctcgccgtacatctgcccggccatgcggcgcagctttgccgggccggagatgtcaaagacgaagacgccgcccggccgcagcgccgcaaagaccgccgcaaagcagcggtccacgtccgaaagcgtgcgcaggtagttgacgccgtcgcaggcgcagaccacggcctcggcccggcggggcagggcgaagtcgcgcatgtcctgcacggcgaaggccgccgggacgccccaggcgcgggccttctcctgcgcgcgggcgatcatctcgggcgcaaggtccacgccggtgacgcgcgcgcccatcttccccaggcgcagggcgatctcccccgtgccgcaggccatgtccgcaacgcgcatgttcggcgcaagatggatgagcgcggcgtagtgccgcgcccaggcctcgtagtccacgtcgtccatcagccggtcgtagagcgcggcgaacgcgccgtaggccgtcatttgtcgtcctcgtcgtcggggtcgatgtcctcccactcgtcgtcctcttcctcctcggggtcgggcttgcgcaggccctggttgacctccgcgccctcgatgcgggagttgaagaacttgtcaaacgccgcgttggtgtaggagcagttgacaaaggaggcaaacgcgtacccgatgaagaagtaccaggccaggaacggcatccagatggcggagatcaccagcggcagggccgtgagcagcccgaacagcacgctccagggcaggcgccccagcgccagcaccatggagttgcgcaggatctgcgtcagcttcaggtcgtaggtgaccatcatcggccagatgtagaggttcatcagcgcaaagaccaggcccatcatcaccagcaccacctgcatgaacaggtagaggtagctgcccgtgttctcgctcatggaggaatagaacgacaggccgaagaagaataggtacaggaacatggcgttgatcgtgctcatggccaggccctgcttccagttcgccttcatcgcgccgaggaagtcgctccagagccagacgtgctcgtcccgggcgtagttgcgcgtgatgtacttcatcgcggcctttgccgggcccgtgatgagcatgcacggcacgaggcccagcaggtagaccgacaggtagccgtcctgcacaaaggcggtgtagttctccgtgctcaggttcagcagcacctgcaggtgcagccacgtccacagccagaagggaatccagaacacgaagtacatcaggttcagcttcagcaggttgaagaggttcagcttcagcatctcaaagaacagctcgaggcggttcttgggcatcatgtcgggcgtgtagtcggggcggttgctcttgcccatgatgaatccggtaaacaggcccattgcgcgttcagtcctccttggcaaaagtctcgatgatgcgggtataccaatccaccgccggcagaagcgcgcgctcgtcaaagtcgaagcggtcgctgtgcaggggcgcgcggcgggcgtcgtcccccgcgccgacaaaggcgtagacgcccggccgcgccttggagaagaacgagaagtcctccgccgtcagcagcggctgctgcggcgcgtgcgcgtcgatcaggggcataacgcgcgcaaccagggccgcgtcgttgaagaccggcgggtagtagcagtgctgcgcaaagtcgacctccaccccgtagaccgaggccgccgcccgcgccacgcgctggaattcgccgacgagcttctcctgcatcgcgtcgtcgtaggagcgcaggattccctccaggattccctcgtccgcgacgatgttgcgcaggttgcccgccgccatgtgcccaaacgtcagcaccgcgggctcggtcggcggcacggcgcgcgtcatgaaggtctgcagcgccaggtaggcctgcgccacggccgcggccgcgtccgcgcccaaattcggcatggcgccgtgcgcgcgcgtgccgcggaaggtcaggtcgaactcggtgttggcggccatcacgcccccgggcgagagggcgatggtccccgcgtccacctgcggcatgaggtggaagccgaagaccgcgcacacgtgcgggtcctccagcgcgccctcctcgatcatgcgcgccgcgcccccggtggtctcctccgccggctggaagaggagcaccacgtccacccccagccgtccctcgtcccgcatccgtccggcgatgtgcgcgagcgccagcagcgcgctcatgtggccgtcgtgcccgcaggcgtgcatcatgcccgcgtgccgggaggggtagggatagatgctgttttccgtcaccggcaggccgtccatgtccgcgcggaaggccagcgccggcgcgccggcccggccgcagcggtagacgaacttcttccccgtgccggcgagcgtgcacgcgctgtcgggccgcgtctcccccaccgcgcgctcgatgtaggcgctggtctcccactcgctgttccccatctcggggatggcgtgcaggtcccttcgccaatggatgatgtgtgtcagcagctcctcatgcgtcataggcgaactcctcattgttccctgtcccaatgttcggacaaaatgatatgttgattatagcataaccgtcacgggccgacaatgctgtccgccgaattttccgcggcaacgcgcgcgggctgccaaacggcggggatgcggtccgctgtctccgaaccgcgcccccgccgtcactccgcctcctcgcgctcgacgacgagcgtttcgccctcccgccgcacgacgcgcacgactgcgcccttctcgaggaagcgctcggcccgcgcctcgtaccgctcgcccgcgatctccaccggcccgcggggcttgaggtcgccgcaggcgcgcccccgcgcgccgggctcgggcagggtccgggccgcgcggccggtgccggtctccagccgctcgtccagctggatcttggccatggcggcggagtgcggcaggcgcaggagcatcacgggcacggccgccgcgctgagcgccgccgcgccgcagagcgtgaagaggaactgctgcacggtcgccgcgcccaggcccagcgccgcgatcagcagcgccaggcccacccagccaaaggccccaaagcccgcggcgcgcgagtccagcagcatcagcgcgccgcccagcccggccaggaccaccgtcagccacggctcgctgccggccgcggcgtccggcaggaagctggccagcgcgcaccctgcgccgaggaatccgctggccccgaggcccggccccaccgcctcgaccagcagcagcatgacgcccactgcaaacagcgccccggcgatcggctcgatgcccgcgcccccgctcaaaaagttctcgatcacgctcgttccgccccgcttccctctgcgttttctggatcttcttagtatagcgcaaagcgccgcgccggggaaggcccttgcgcccgcagcgtcgtttttcgcgcgcgaacgatgcgtccggccgtcccaaagcgccgtgcccccgctcacgcttcaaaggccagcagatttcccaggtgcgtccgaaacccgatggcttggtacatctgcacatcgcaatccgcgcaccccaccgtgagcgcgcccacgccgctctgctcccgcgcgaaggcgaccagcttccgtgcgatgccccgatgccggtgcgccgggcagatgtaaaaatcctccaggattccggacttgccgtactggaacgtcgagtaggtgacgcagatcgaacagcacgcgacgagcgcgtccccgcaggcgcatccgtaaaactggatttgtccttcttcgatggccctttgcaggttcttaagttccgcatccgtgggctcgggctctccaatctccgccttatatgcccgctgcagctgcatcagctgcgcaaaccattccgcctggattttgcaaaaccgcatcctcgcatcctccttcgccgctgagcgcgggtccgtctttttgccggggcacaaaaaacgccccgtgtaaacggggcgtctgtttgcgaaagcgatatcagtacttgcgcttccttgctgcctcagccttcttcttgcgcttgacactgggcttctcgtaatgctcgcgcttgcggacctcggccagtacgccggaccgggcacacttgcgcttgaaacgcttgagagcgctttccagggattcgttttccccaacgcggatttcagacattgctttccctcccctcgcgcataccgtgatgccacaccgggcataaatgaatacatactattataccgtccaagaagggattctgtcaagggttggggcccttgctttacaaaaaacatacattaggcggctcagtcatgcattcagcgccccaatgggctgtgctttatcagtataacatagcggacgggagaaatccagtctcccgtccgcgatttccaaagaaattttctgtgaacgaagcgtttacgccatgcgctcggtgagcttgacgccgccgagcacgtgcaggtgcaggtgctgcacgctctgcgcgccgttgacgccgatgttcgtcacgacgcggtagccgtcctcgctcacgccctcgcgcttggcgacctcggtgcaggcgcgcatcagccggccgacgagcgccgggtccgccgcggcggcctcggtcaggttcgcgtagtgcgcgcgcgggatgaccagcacgtgggtgggggcctgggggttgatgtcgcggatggcgatgcagtccgcgtcctcatagacgatggtcgagggaatctcccccgcgatgatcttgcagaacaggcaatccatgtttctcttcctcctcgattgattttcctcaggcaaggggccggccgacggcggtctgtccctgcacgtcctcgacggcggcgcgcacgatctcgccctccctggcgccgggcacgcgcacgcgcacgtactcccgggagtacccggtctcctcctcctcgatcaggacctcgaccgcgcggcccaggaggctgcgcacataggcgccctccgtctcctttcccagggcgatgagccgccgcgcccgcgcctcccgctcggatacgggcaccgcgccgggaaagtccgccgcgggcgtgcccggccgctcggagtaggggaagacgtgcaggcgcgcaaagccgatctcgcggcaaaagtccatcgtctcctggaactccgcctcggtttccccggggaatccggtgatgacgtccgtcgtgatggcgcaaccggggaagctctcccgcaggctctgcaccgcgcggcggaactgcgccgtggtataccgccggcgcatggcgccgagcacccggtcgcacccggactgcagcgagaggtggaactgcgggcagagcttttcgctgcgcgccatgcgctgggcgtacgggccgtcgatccaggcgggctccagcgaccccagccgcacgcgctcgaccccctgggccgcgcagacggcctcgatggcgtccagcagcgtcgtgccgtcccggaagtcccggccgtagctggccaggtggatgcccgtgagcacgacctcgcggtagccggcccggcccagggcgcgcgcctcggccgcaacgtccgaaaggctccgcgagcggatcggcccgcgcacctccgggataatgcagtaggcgcagcggttgtcgcagccctcctggatcttcatcacggcgcgggtgtggccctcgttggccagcacgtccaggggctcaaagggcgcgctcgtcaggtcctccacggcgcagagcgcgcggccctcccgccgcgcccgctccagcagcggcacgacctcccgccgccgggcgttgcccacgatgagccgcacgcccggcagggcgagcttttccccctcgtgctgggccacgcacccggcgacgacaatgtccgcctgcgggttcctgcgcgcggcctggcgcacgtacttcagggacttcctctcccccgtggcggtcaccatgcaggtgttgaccacgtagacgtccgcgatctcgtcaaagtccaccggcgcgtagcccgcgcgcagaaactgctcgcgcatgtactcggcgtcgtattggttcgtcttgcaccccagcgtcataaaggcaacgcgctgcatctactcaccccccaggtcgcccgcgccgtgcagcgtgagcgtcagggccacaaggcccgcggtctccgtgcgcaggatgcggctgcccagcgtcatggcctggccgccgacggcgcgcacggcctcggcctcctccggcgcgatgccgccctccggcccgatcagcaggccgaccgagcgcgccgcgatgcgcccggcaaagggctggccgccctcctcatagggcatgagcagcagctcgtgctcccgcatgcgctctagcgcctgggcaaagtccagcgcgggcagcacctccggcacgcgcgcgcggccgcactgcttgaccgcctcccgcgcgatgcgcgccaggcgctccgtcttcttctgcgcgcggtcggcccgcgcgacgctgcgcgtcatctccaccgggaccacggcgtgcacgcccatctccgtgcacttctgcacgaggaaatccatcttttcgcccttgcacaggccctggtagagcgtcacgcggcagcgtggctcccggtccggcagctcctgccgcacggcaaaggccgccgcctgcgccgcgacctccgtcagctccgccagcaggcgcctgccgtcccagagcacctcgatctcgtcctcgggcgcgaggcgcagcacctgccgcaggtgcttgagctcctccccgcggatcgaggcgccgtcttccgaaaaaaatctgtgcatactcttcctccccaaatcttcgcttgtcattataccacggcggcgcgccgtttgtcgacaggcgcgcgctcgttcggtcttggcggggagaattgttaatttttctggaactttggaaagaaatcttgaatcaagccgaacatcctgctataatcgtcttcgttgcaaaggtgctgtttgttgagaattggctcagcgggcggcgcttttgattttattgttcggaaacagcggcccggggcgaatttccccgggccgctttttttgcgcgctatcccacggcgatggagagggccagaaggatctgcgcggcataataggtgatgaggttccaggtgggcagggatttttcgcgaatggggctgaagaagatcagcgccaggatcgcgtcggacacgaggaagaggatgccgcccaggcccaccagcgcgccgcgcgcgcccgcgccaaaggagaggacggcgaacgccgtcatcacgctgatcaccgcggcgtaggcgtagaccgggatcttctggcccttcaggtccatgcgcgcggggaactgcagcaggaacagcgccgcaaacagcacggccgccagcagcaccgcccagcccgtcacgcggccgagcagcgcaaaggccacgatgtagaacacgtgcccgatgaggaacgcgccaaggcccgcgcggaagaagggctcccggtccttcggccggcagtccatgaactgcagcagcacgtcccccgccgcgcccaggatcaggccgatccacaccagccacgcataggccccgcccgcgcgcgccgcgcccagcagacccaggcacacaaacgccaggctcgccagggtcttgagcaggagcttgaccggcggcgcgccgtattggtttacgcggatgtacagcgccgccagcagcaccgccagcaccccgacgatccaaagaacagccgtcatgaaaaacatccctcccattcgtgcgtttctttccttcaggataccacgaatgggagggtttttcaacaaattttgccgcgcgcgcttagcggttcatcacgggcgcaagatcgtagtttccgggcatctccagctcgtgcacgagcagcgcgcggatgtagccgcgggactcgtccgtggagtggatgaagtagccgtggccgtagtagaagcggatcaggccgaacatgcgcgaggaggtgtgcagggcgatggcgcgcacgctctgctcccggcagagcacctccacccggtcgatgagcatgccgccgatgccggacttggtgatcgcgctgcgcacgccgaagcgcgaaaggtacgccaggtcccccatgatctccacgcgcaccgagcccaccgcgaccccgtccacaaagccgacgagcacggtcttcttctcgatgtcgcggcggatgtcctccaccgtctcctgcagggccttgacgtgcccggtcatccccaggtcccgctcgtacttgtggaaggcgtcctgcatgatctcctggatcgcctccgcgtccgcgggcgtcgcctccttgatgtccacgaccatgttctcctctccccctctcttgcgcggcgcgggcgcgctaccttgcgcccatcagcagggccaggacggccttctgcgcgtgcaggcggttctccgcctcgtcaaacaccacggactgcgggccgtccatgacctcgtccgtgacctcgctgccgcggtgcgcgggcaggcagtgcaggaagatcgcgtccggctttgccagcttcaggaccgcggaattgacctggtagtccgcaaagtcgcgggcgcgcttttcggtctccgcctccatgcccatggaggcccacacgtccgtgtacaccgcgtccgcgccgcggagcgcctcggcgatgtccgtggtgatggtcacgctagagccggccgccttggcgttttcctttgcccaggagacgtaggccgcctgcggcgcgtaggccgcgggcgttgcgatggccacgtccacgccgagcttggagcagatgatcatcaggctgttggccatgttgttgccgtcgccgacgaaggcgagcttcttgcccgcgagcgcgcccttgtgctcgtagagcgtgagcaggtccgccagcacctggcaggggtggtagtcgtccgtcaggccgttgatgaccgggatctgcccgtacttggccaggccctcgacgtcgctctggtggaaggtgcggatcatgatgccgtcgacaaagcggctgagcacgttggccacgtcgtagacggactcgcgcgtgcccaggccgatctccggtccgctgatgtagagcgcgtgcccgccgagctgctggacgcccacctcaaaggagacgcgcgtgcgcatggagggcttggtgaagatcagcgcgacgttcttgccgcgcaggatgtgcgtctggtccatgccgagcttgcgctgcagcttgagcttggccgcaagggacagcacctgcaggatctcgtccggcgtgtagtcctgcagggtcagcaggtgccgctgcgcaaactgcgccttgggcttgtattgcaaaagatccatgggatgatctctccttcctttattcgccgaggacttcgtccagcgcgcggcagagcgcgccgcagtccgcctcttccaggatcaggggcggcaggagccggagcacgttgcccgcggccgtgccggtgacaaagcccttctccagaagctttgcgaccacgtccccggcggcaacgtcctgcgcgagcgctatgcccagcagcaggccctcgccgcgcacgtcggtgatggccgcggggtgcttctctgcgaccgcctgcagctgcgccttcagataggcgcccgtcttcttggcctttgcgggcaggtcctcggaaagcagggtctgcaccaccgccagcgccgccgcgcaggccagggggttgccgccgaaggtcgatccgtggtccccggggtggaaggccgcggcgacctccgccttggccagcaccgcgccgatgggcacgccgccgcccagggccttggccagcgtcatgatgtccggcacgatgccgtagagctcgtgggcaaagagcgcgccgcagcggcccatgccggtctgcacctcgtcgacgatcaggagcaggcccagctcgtcgcagagcgcgcgcacgccctggatgtagtccgcttcgcccacgatcacgccgccctcggcctggatgacttccagcatcacggccgcggtgtgcggcgttgcggccgcgcgcagcgccgcaaggtcgccaaagggcacgttgcgcacgcaggccggcaggagcttggcatagggcttctgatacttttcctggccggttgcggcgatggtggccagcgtccgcccgtggaaggagttgcgcgccgtcaggatctcgtagcggtcctcgcccttttcatagaagtacttgacggccagcttcatcgcgccctcgttggcctcggcgccgctgttgccgaggaagaccttgtctgcaaagctgttctcgcaaaggagcttggccagctttgcctgcggctcgatgtagtagaggttggaggtgtggcagaccttgcccgcctgctcgacgatggcctttgtcaccgccgggtggttgtagcccagggcgttgaccgcgatgcccgcgaagaagtcggtgtaggcgcggccctccgtgtcgtagagcgtcacgccctgtccgtggtcaaaggccacgggcaggcgcttgccgaaggtgttcatgtaatactgttcgtccagcgcccggatttcgttgaggttcacgccttggtccccctttctgcgtcgtcgtcggcatggaccatggtcccgatgcccttgtcggtgaagatctccaggatgatggggtggggaatggttccgttgaggatgtgcacgcgggagacgcccttctcgatggcgcgcgcgcagccctggaccttggggatcatgccgccggtgatgacgccagaagcgatgagccttcccacctcgctgacggacacggccgagatcagggaggccgggtcgtccgcctgcatgcggatgccgtccacgtccgtcaggaacacgagcttttccgccttcagggccgcggcgatctcgcttgcggcggtgtcggcgttgatgttgtagctctcgccctgcgcgtccacgcccacgggcgcgatgaccgggatgtactcgtcgtgcgccaggagctccaggagcttgacgttgaccgagacgatgttgcccacgtaccccaggtccacgccgtcctttgcgggcttcttttcgacggtgagcagcccggcgtccttgccgcacaggccgatggccttgccgcccaggcttcctaaggccgagacgatgttcttgttgagcttgccggccagcaccatctgcacgacctccatggtcgccttgtccgtgatgcgcaggccgttgtggaacttggactccacgcccatcttggcaagcgcggcgttgatgtccggcccgccgccgtggaccaggatcgggttgacgcccacgtacttgagcagcgtcacgtcctgcaggatcttggtcgtcagctcctcgtccaccatggcgttgccgccgtacttgatgaccacggtcttgcccgaaagggtctggatgtagggcagcgcctcgatcaggatattcgccttttccacgagaatgtcactgtatagggggctccccccgttctttttctccactggtttcccctccttcttctcacgggcacagggccgccgtcggcaggcccatcgtctccggcaggccgaagagcaggttcatgttctgcacggcctggcccgccgcgcccttgagcaggttgtccagcaccgcgcacacgaccacgcggtgcagccgctcatccaccacaaagccgatcgcgcagcggttggagccggtgacgtgcttgacctcgggcagctggccctcgggcatgagggtgacgaagggctcgccggcgtaggccgcctcgaacgaggcgcggacctgctccgcgccgacgcccggcgcaaggttcaggtacaccgtggcgaagatgccgcgcttgatgggcacaaggtgcggcgtaaacgagacgagcacctcgcccccggccgccttggtcagctcctgctcgatctcggaggtgtggcggtggcgggcgacgttgtaggccttcaggctctcgtccacctcgcagaagtgggagttcgcgctgggcttggcccccgcgcccgtcacgccggacttggcgtcgatgatgacgttctcccgggaggcgaggccgtcgcgcagcagcggcgcggccgcaaggatcgagcaggtcgtgtagcacccggggttgcccacaaggcgcgccgcgcggatctcctcccggtgcagctccggcaggccgtagaccgaaacgtccagcaggtccggccgcgcgtgcgtcacgccgtaccacgcctcgtaggtcttgacgtcgtcatagcggaagtcgccggacatgtcgatgacgcgcgtgcccgcctcgtagagcttggggatcacttccccggaggccccgtgcggcagggacgtgaacaccacgtccgactccgctgcgaacttctccgcgtccagcgcgaccagctccttgcgcaccgtgcccagcagcgacggatacagcgccgcgatgtcctttccctcataggactgagaggataaatatacaagctcaacctgcgggtgctggctgagcagacgcacaagctccgcgccgacatacccggttgccccgacaatcgatgccttcaccatggcgagtcccccttctccgatcaagatgatgtgcgtaattatacgcttttctgcataaacattcaatagactccttcgccgttttctgttaataaaatgtaaatttgcaggactgcttgcaattttcaaggaaatgtgtacaatggggagggattcggtgcaaattcgcgccggattctcactatctttgggaagggaaaggatggagtcattcgtccatgaacagagcagaactgaaggatcgtgtctgccgcgcgcaccacgaactcaaggaccggggcctgatgatctacacctggggcaacgtcagcgccatcgaccgggacagcggggagatcgccatcaagcccagcggcatcccctgcgaaaccctccggccggaggacatcgtggtgatcgaccttgcgggcaaggttgtggaggggcactacaagccctcctccgacacgccgacgcaccttaggctctacagcgcctttgcgcgggtgggcgccattgtacacacgcattcgctcttcgccagcgcgtgggcgcaggcgggccgctcgctgccgtgcctgggcgccacgcacgcggactgcttcctgggctccgtgccctgcacgcgcgccctctccctgcacgagatcaccggcgattacgagacggagatcggcaacgtgatcgtggagacctttgagaccaagcgccgcgaccccctgcgcacgcccgcggtgctggtcaactgccacggccccttcacctggggcgagacggtcgaggacgcggtctacaacgccgtggtcctggaggagatcgcgcgcatgtcccacgtcaccatgcagatcaacccccagtgcccgggcgcgggccggccgctgatggagcgccactacttccgcaagcacggggaggacgcctactacggccaggaccccgaggacctctgagccgcaacaaaaaaaacgggcgcccggcgcttcgcgtttgcagcgaagcgccgggcgcctcttttttcgccggttcttgtttttgtttagaagggattgcccgcgcccttttcgtccaggccgaagaagtccagcgcgcgctggatcgtcagatcccagaagcgccactcgtgcttgtagccgtcgaactcctcgaacgtggcgtcaaagccgatctccttggcgtgggccttgaaggtcttgtaggactcgtagaggaagtcgtccttgccgatggcgaagtagaaccggggcaggtccttggacccggcgagcttgtccacaaggccccaggtgttctcgtagctggcctggaaggccgcaaggccgccgcggttctcgaccatgccgcgggagcggtcgtccaggttggcgtcgttggtgaagcccatctggaaggggcagcaggagagcaccgcggccgcggcaaagcgctcggggtggttgagcgcgtagacgagcgtgcccgttccgcccatggaaaggccggcgatgaagttgtcctcccgcttgtccgaggccgggaaccagccgtagatcaggggcatgagctccttgaggaagtagtcgtacatgttgtagccgatggagaagtgctcccagttggcgtagttggcgttcaggccgctgggcatgacgacgatgaggtccttttcgcaggcgtagagctcgatgttgctcttgcggatccagtcgctgtggtcgccgaaggtgccgtgcagcagccagaggaccttgtatttctttccgctgccgtagaaggcggcgggctcgacctcgcggggcttgtcgggcaggatgacggagatctcatggttgttgttgaggtactggctctcaaagttgaacgtaagcagggccatggtcgtgtctctcctctcgtgaatcgtttttcttctctattttagcgcaggcgcgcgctgggcgcaaggtccctgcgtgcggcagaggaagtccggcgcgcgcccaaggtcgaactgcgccatctctgtgagatttttcagcgcggacagctccacgaactgcacgcgcgggttctcatagctcgtccagtagtaccgcccggactccgcgcagaagacggcggtgtagatcgtgtagtcccagggcacgacgccctcgtcgctctcgatcggctcgcccggctccccgacctcggccgcgcccagggggaaggccgcgctcgcgaacaggtggagcaggcgcgtcacaccctccgcctcgcccgcggcccgcggcgtcagcgcgcgcaggaagcacaggcgcacaaagcgcgacggcgagctgaagtccccgggcaggccctgcaggccgctgccggaaaagcagggcgcgatctcctcgcgggagaggcggaccggcccgtggtcccgggcgcgcaggcccgcgtagttgagcaggttcgtccggtgccaggggaaggaggggctgttcgccagcacgcccagcccgttttcgtagacgtggaggccgtccgcgtcgggctcgaggaccgcgcaggcgccggtgcggtcggcgaacatccagtgcaggggcggcgtcgcgcccagcagcggccagtccacgagcgtgtggtcgcgctgcaggcacgccaccgcctcgcgcacgctcgcgcagctcgacagcaggtgcgtcaccagcgccggcggctgcaagggctccgtcccctcccgcgccaccttggcgtactgcgcgtgctcccggtagtagagctgcgcgcccatgagcccggcgtcgttgcccccgtcgtagaagaggggccccaggcccggcatgtgcaggcccatgcccaccaccgcgtgggcggagcggcgcatcgcgccgcgctcgtgtgtgcggtacgcgcaccccgcgggcgcgaaggtgacgcgcgtgggctcggccatgcggttgaagtcgaagttccggccgaagaggtgcttgccgtcctgggtctcccagctcatggcgctgcatccggcggcaaagggattgttgggattcatctgcgttccgtcctttcccgcgggcgcccggcccgcgcttatccttagggttgccgcgccggcgcgttttcttgcgcgggcgcttcgtcttttgcgcgcgccgcctccggcgcggccagcccctcgagaaacgaccagaaggcctgcgccgcgggcgtaagctccgcgcgggcgcggcgcacggcggtgacggtggtgcggatcgccccgccctcgatgcggcagacggccaggccctccccgacaaaggactgcgccgcgctctgcggcagcagccccacgcccagcccctgcgccgcaagggccgcgatcgtgttcgcgccgtcgcccttgagcagcaggcgcgacgtcaggccccgctccgcgaagaggcgcagggcgatgtgctcccaccggcggtagagcagcagcggccgctgggcgaggtcctccagcgcgacctccccgccggggggcaggtgctcccgccggccggccgcgaccagctcctccacctgcagggggagcgcctccaggccctcggccgcaaagggcgtgcgcaccagcgccacctccagcaggccgctgcggagcatgtccagcaggtgataggtgttttcctcgctcagctcgtagaccacgcgcggcttttcccggtggaacgcggcgagccaaccgggcagcagcgtgcccgcgaccgaggacaccacccccagccgcagcgtgcccccgcccgagcgcacgcggcccgcgatctcctcggcggcgctctcccgcagggcgagcatggccttggcccggtcgtagagcaggcggccctcctccgtcatgcgcaccgcgcgcgccccgcgcaccagcagcgtacagcccaactcctcctccagggccttgatctgcgcggtcaccggcggctgggagaggaagagcttgcgcgccgccgcgctgatgctcccctcctccacggcggtgacaaaatagagcagctgccgaaagtccatcctgcgcacccctcccttcccataggattatactatggatggcatgcgaaatccattcttttcgtattccgccggctgtgctatactgaggaaacggaatgcggggccgccggccccggttgggaggatgtgcatgaagaagcttctcgtctacatgaagacctatgtgctcgagagcatcctggggccgctgttcaagctcctggaggcgacgttcgagctgttcgtgccgctggtgatggcggcgatcatcgacaccggcatcgcaaacggcgaccggggctacatcctgcgcatgtgcggggtgctggtgctgctggcggtggtgggcctcgtgtgctcgatcacggcgcagtactttgcggccaaggcctccgtgggctttgcgtgcaaggtgcgctcggtgctctttgcgcacattcagcgcctgagcttcacccagcaggaccagcagggcacgggcacgctcatcacgcgcatgaccagcgacatcaaccaggtgcagtccggcgtgaacctggcgctgcgcctgctgctgcgctcgccgtttgtggtcttcggcgcgatggtcatggcctttacgattgattggcaggcagcgatggtctttgtcgtgacgatcccgctgctgagcatcgtggtcttcggcatcatgctctggagcatccccatgtacaagaaggtgcagcagaagctggacaaggtcctctccgccacgcgggagaacctgaccggcgtgcgcgtgctgcgcgccttctgcaaggaggaggaagaggagcgcgccttcaacgagaagaacgacgacctgaccgccctgcagaagctggtgggcaaggtctccggcctgatgaatcccttgacgtacgtgctgatcaacctggggatcgtggcgctgatctacgtcggcgcgctgcgcgtggacgcggggatcctgacgcagggccaggtggtcgcgctgtacaactacatgtcccagattctggtggagctggtgaagatggcctcgctcatcatctccatcaccaaggccgtggcctgcgcgggccgcgtcagcgcggtgctcgacatcgcgccggacatgcgcggcgcctcctgcgcgcccaagaccccgcagccgggcggcgcggtccggtttgaggacgtggccctcacctacgccaaggcgggcgcgccgtcgctcgcgggcgtggactttgccgttttgccggggcagaccgtgggcgtcatcggcggcacgggtgcgggcaagacgagccttgtgaacctcatcccccgcttctacgacgcgacgcaggggcgcgtgctggtggacggcgcggacgtgcgcgactacccgctggaggtcctgcgccagaaggtcggcgtcgttccgcagaaggccgtgctcttccagggcacgatccgggagaacctgcgctggggcgcgccggaggccacggacgaagaactctatgcggcgctggacgcggcccaggcgcgcgagatcgtcgcgggcaagcccgaggggctggacttcccggtggcccagggcgggcgcaacctctccggcggccagcgccagcggctgaccatcgcccgggccctggtcaagcgcccggagatcctgatcctggacgacagcgcctcggccctggactacgcgacggaccttgcgctgcgccaggcgctgcgcggcctgccggacaagcccacggtcttcatcgtctcccagcgcacctcctccatccgccacgcggacaagatcgtggtcctggacgagggccgggtcgcgggcatcggcacgcacgaggagctgctcaagacctgcccggtctaccaggagatctactattcccagtacgaaaaggaggcgaagtgacatggcggacaagaagcggagcgcgcagatggacaccctgaaaaaggtcctgcgctacatcgcgcgctatcgcctgctggtggcggtgagcctgctgctggcggcgctttcggtggcgctgacgctgtacgtgcccatcgtcgtgggcgacgccatcgacttcatcgtcgaggccgggcgcgtggactttgcgcagatccttcgctgcctggtggtgatcggggtggtcgtggccatcaccgcggtcgcgcagtgggcgatgaacatcatcaacaacaagatcacctaccaggtcatccgcgacatccgcaaggaggccttccacaagctgacgatcctgccgctgaagtacatcgacagccatcccacgggcgaggtcgtcagccgcgtcatcgcggacgtggaccagttcgccgacggcctgctgctgggctttacgcagctgttcacgggcgccgtcacgatcctgggcacgctgatcttcatgctgacggtgaacgtgggcatcacgtttgtcgtggtgctgctgacgccgctctcgctctttgtggcgaacttcatcgcgcgcaggacgtacaccatgttcaagaagcagtccgaggcgcgcgcggaccagaccgccctgatcgacgagatgatcggcaacgaaaaggtcgtgcaggccttcacgcacgaggaggcggcccagcgcgactttgacgagatcaacgagcgcctgcgccagagctccctgcgggcgacgttctactcctccatcaccaacccggccacgcgcttcatcaacagcctggtctacgcgggcgtgggccttgcgggcgcgtttgccgcgctgacgggcggcatcacggtgggcggcctttccgcgttcctgagctatgccaaccagtacacaaagcccttcaacgagatctccggcgtcatcacggagctgcaaaacgcgctggtgtgcgcggggcgcatcttcgccctcatcgaggaggagccgcagacgccggacgacgcggatgcgcgggtgctgacggacgtgcgcgggcgcgtggatctgaaagacgtctccttctcctacgcgccggaaaagccgctcatcggggacttcaacctctccgtggagccgggcatgcgcgtggccatcgtcgggccgaccggctgcggcaagaccacgctgatcaacctgctgatgcgcttctacgacgtggacggcggcgcggtcctggtcgagggaacggacatccgccgcgtcacgcgcaagagcctgcgccggaacttcggcatggtcctgcaggacacgtggctcaaggccggcaccatct

SEQ ID NO: 1624 - DNA, 5869 bp, Unknown
  16S sequences of unknown bacteria
ttcctgtggaacaagggcgcctggattcagaaccgcgcctacacgctcgcgatctggtgcatgttcgcgcaggtcttcccgcagttccagacgagctacccgcagctcgggttcgagagcgtctttgccgtgcagtccacgctcaactacacgacgaacctgaccgtctcgctcatcgcgctcgtcgccaacgtcgccggcctggcatacgtcatctaccgtgccaagaaactcggcgtcaacccgtacaagcacgaggtcttcacggggacgcgcgattgggagcaggcacgcgcccgcatcgcggaaggcgagatctccgcatagccgcttggcaaggtcacagcaagacgtctcatcaatcgaagagggggctcgggcaaaggtccgggctccttcgcgttacgcaggattcaagaagatggcgcttgcaggtgagaagagctcagagaaaagaaaaaaagccagctgaaaaagctggcttaaaattttggtagcccgtacgagattcgaactcgtgatctccgccttgagagggcggcgtcctaaaccgctagacgaacgggccatatgtcaagtgcatcacttggctggggtggaaggagtcgaaccctcactgacggaaccagaatccgctgtcctaccattagacgacaccccagtgctctctcaggtatcgaacccttgtgtgacgcgagtaggtatattacggaagacccccatttgagtcaagctttttctcaaacttttttaatccaatgattcccgccccgctcaaagggctattatgggcactatgcagataccaaacgaccccatacaacaagcactcggtcctgcgactgcggcactcggcatcgaaaacgcctggattgccgtcgcattcatccttctcgtgctgctcgttctgtttgtcgtgctgtatctgcgcaagtgccgcacgctgcgccggtcgctcgagcgcatcgacgacctcgagcagcaggttctcggcctgactgctatgacgcacctgagcgaggggtcgctttccgcagatggggattccgtcgtgtaccaaagcgagggcgtaccccagcagattgcctacgacgagtttcccgatgacgtggccccggtcgtcaaacaccccgaggacatcgaggacgttaccaccgaagaggaaattgaagacgtggtggcgaccattcacgacactatctaccagcgggtcagcacggcacatctgatcgacgaggagcttgaaggccggttcgtcgcaccctcgagggaaaacgtcgagagcattcccgatgctgcgttcgagcccggggacgaggtggctgagctagtgggtttcgatgagcccgtgaatgcacccgctccaacgggggcgacagctgagctgaagcccctgagtgccgacgagatacgtgaatcgcgcgagagcgcacgcaccgccgccgctcaagaggaagatcgtgagaaacggcgtgggcgcttttcacgtgcccgtgagtcgcgccacgagaagcatctcgtcaagcaggagcgcaaggcgcgtcgccgttttgcccgtgctgccgccgaatccgagatggcggcacagttcgagcgggaagacgacacgctccggtagcgagcgtttctgcacctcccgtaccaattgcatcgagcggccccgctagctggggaaatcctggttggctcgcatctggctcttgaacggctcttggtttgctctgagttcgctctgggcactgctcaggccttgctctacaaacgagcggtggagcgctcggattcgctgactagccttatcactgcgcacgatgtgggtgaaaggctggtgcacgcgtggactgggaaaacgtatccgtaaagctgaagtcgctgtcgaggcgtgcgggccttgcccgtgtcccgctgccagtgctggcatgcatcgtcgtcgcctgcatcgtgctcgtcgtgcttgcgttggtccggttcgttccgacggagacgtctgcgagccaggatttcgaagcgcccgcacaggcagaagagcaggcggcaggcgagcaggactccgacgtgcggcaggtcggcgtggatgtggagggggcggttgcgtctcccggcctctacctcgtctctgcggatgcgcgggtcaacgacgcggttgccgcggcaggtggcatgacctcagatgccgataggcaacgtgtcaatctcgctcagaaagtcgaggatggcatgcaggtgtacgttccctcgcgcgaagaggcccctgcggctactggcaccaccacaacgggggcgggacaggcgtcgtcttctggcgcgtcgaagggcaaggtgaacttgaacacggcgagcgcggaggagctgcagacgctctcgggcatcggcccctctctttcgcagcgcatcatcgactaccggcaggcaaacggacccttcaaatccgtggacgaccttcgcaaggtatccggaatcggcgacacgcgcttcaagagcctgaaggacctggtatgcgtgtgagcgggcaagaaccatgcgcgccgaagcggccgaccttgggaccgctgggcgttttggcgctttccgcctgcggtggcgtggcggtagctgaagagctggcctggcgtgcctacaacgaggagcgggcaattgactgttgcctcgtcgtggaggttttgctcgcgctgcttgcggcggtcttcatcgtctgcctgcttgccagacggcgcggcgtccgcgtgagaggccatgtgccgaacgcgttgctggtgtgtgccgtcggggcctgcgcggcgctttcctgcgggacgctctactggagcgcctggtcaagcgatgtggaacaggtcgagggcgccgtatctgaagggcttgtcgtccatctcgtctccgatccgtctcagcaggggtacggcaccgtgtccgtggcaaccgcgcatgccgggcggcacgaggcgagcgtgaggatcaagtggcccgagcaagtacaggccctgccggcgggccatgcggtgctcgtcacgggaagcctgctggccccgggaactgacgatggtggcaggtggaaccaccgcaacggctactgcgggatgctcgcggcatcgtctgtgaaagacaggggctttgcaccggggctgggaggaatcgtcgcaccgtttcgcgacgcctcgtttgacgccgtctccgaagttgggggagaggcggctggccttcttgcgggcgtgctgctcggcaacaggaccctgtatgcgggcacggagctcgagcaggattttcgcacgacgggccttgcgcatctcatggccgtctcggggacgcacctcgcggtcgtgacggcgctcgcgggctggctcgtcgcacgcatccgcgcgccccgcgtcgcacggtgcgccgtgctgacagtgctgctcgtgtgctacgtctcgctcacgtgctttgccgcatcggccgtgcgcgcctgcatcatgtgcgtcgtcgccctgctcgcgggagtcgcgctccgacgtgcccacgtcctctcggcgctgttcgcctgcgttttcgtgatggcgctcgtctcgccgcaggtcgtcttctcgctcgggttccagctatccgtcctggcggtcttcggcctcgtcatgttcacgccgctcatctcctcgtggctggagttcgtgacgggtgggcgcctgcgcaagctctgcgagttgcttgcggcgacgcttgcggcaacgctggcgacgcttccggcgtccatcggtgcttttgcgcagtttccgctcatcgcgccgctgtcgagcgtgctcgtgtcgccgttcgtgaccttcgtgctgggtcttggcctcgcgggcatactcgttcacgcggttgcggcgccccttggcatggcgttgctttatgcggcgggcgtggtggcatcgtttgcggcggccctcgtccatgcgctcgccgatatgccgggggcatgcgtgcccgtttctgccgaggcaaatgtgctcggggcggggtttctgctgtgcgcggttgccctgtgggcattctggccgctgccgcctctcgtgaaggggaaagcgcggcaggcagccctgggactgcccgacggcagacggattgcgtttcctagcgggcttcctgcgcgcgcaatcgcagctcttgcgatcgcgctgccgccgcttctcgtcatggcggtggggatgggaagcgccggcctcgctcgcttcgcctttcccttcttcgagagtcccgccgaggtcgtgatggtggatgtgggccagggcgactgcatgctgatcagggacggaggggcatcggtgctcgtcgacacgggaaaggaccggcaggtgctcgagcggggcctcgcgcgcaacggggtcacacatctggacgcggtgtatatcacgcacaaggacgcggaccattgcggcgccttgccagctctgaccggcgtcgtcagcgtcgaccacgtgtacgtgcatgcggacctgctgtcgaatcccgtgatggagcaggtcttggaagatgcgcgctgggtgacgggcggcaggggcgccgaaggcgtgcgcatcggggacgtgacgcgcatcgggtcgtttgcgctcacgctggtcgcccccgagcggggaggcgagagcgagaacgcggacagcctcgtcaacctgctcgaatacgatgcgcagggtgatggggttcccgagttcagggggcttctgacgggagacgccgaggcggaggcgacgactggcgtagtcgagaaggtgggcgatgtcgacttcctcaaggtcgcgcaccacggcagcagaaaaggcgagacggcagaggagctctccgtgctcaggcccgaggtcgccctgataggggtaggtgctgacaacgagtacgggcatcccaccaagcaggcgctcgacatgctcgaaaggtgcggcgcccgggtctatcgcaccgatctgcaaggcgatatcaccttgagcttttccgcgcaggcgatgggggtgaaaacgcagaaatagtgcgcttgagacgacgcgcttgtgacaacgggtgaaatgcgggtatcgtaggggagctgtaaaacaccaaacgccccaagggaggcaacgtggcatcaccggcattcctgcccgcctacctcgtcgtcggagccgacgagttcaagcgacagttcgtcatcgagcgcctcaacaagcagatagcgaagctcggggacctcgacttcaaccgcgaggtattccaaggcgcctcaaccgacgccgacgcgcttgtcacatcgtgcaacacgctgccgttcagctgcgattaccgcctggtgatggtgcgcgatgcggacaagatgcccaaggcgacgagcgaagcggtcgtgtcgtacctggccgcgccgagcgagacgacgatcctgtgcctcgaggccaccaaactcgcaaagaacacgcgcctgtacaaggcggtcgcgaaggtgggaaagaaggcggtcatcgactgcgcccccaagagcaggaaagacctgcccgcccaggtgcgcgacttcgccttgagcaacggggtcaccatcacccagcgcggcgccgaagagctgatcgacctcgtcggagagtcgaccgtgcacctcgatgccgagttgaagaagatggccgcggtgctcgggaaggggacaaccatcgacgtcgggcaggtcgacgagctcgtgacgcgaacctccgaggtcaagccctggaccttgagcgatgccctcgcgaagcgcgatgccaaggaggcggcgctgctgctgtcgcgcatgcaggaccagtcgcgcttcgggttgctcaccatgtgcctcaaccgcatacgcgagctcctcgtcgccaaggacctgcattcgggttcggcgcgtgcgcttgcccaggagctcggcaagcaggagtggcagggg

SEQ ID NO: 1625 - DNA, 2098 bp, Unknown
  16S sequences of unknown bacteria
tttgggcacttttggcgagtcaaaagtgccaccccggcggtagccgtacaaatcaagttttctaaaagacttgcccccgccgtcaggcgactgcaatcttttcccttaaatacccaccccccaaaaaatctctcaccaaaagaaggtaccacccatgatgaaaccctaccccgccggctcctacgatatcgccgtcatcggcgcgggccacgccggcatcgaagccgccctcgccgccgcccgtctgggctgccgcaccatcatcttcaccatctcgctggatgccatcggcaatatgccctgcaatcccagcatcggcggcaccgccaagggccaccttgtccgggagctggatgccctgggcggcgagatggccaaggcggccgatgccaccatgctgcaaagccggatgctgaatctcggcaagggccccgctgtgcacagcctgcgcctgcagtgcgaccgcaagcgctaccatatgtatatgaaggccgcactggaaaaccagcccaacctctcggtccgccaggcggagatcatctccattgataccgatggggcaggggagatcacctccgtcaccaccgccatgggcggggtctattcggtccgggcggtcattctggccaccggcaccttcttaaagggcaaaatttttgtcggagagtattccgaagaatcgggaccggacggcatgcaccccgccgcccgcctcagcgatagcctgcgggctttgggcatcaccctccgccggttcaaaaccggcacccccgcccgcgtccacggcaatagtgtcgatttcaccaggctggaggagcagcacggcgatgaaccgccggttgccgcttctttcgccaccgatcccgccaccctgcaaaataagctgccctgctacatcggctacaccaatgaggagacccacgaggtcatccggcagaatatcggccgcagtcccttgtatggcggcgccatcgagggcatcggcccccgctactgccccagcatcgaggataaggtcatgcgctttgccgaaaagccccgccaccagtttttcctggagccgatgggggagaacacccgggagatgtacctctccggcctgtccagctccctcccggaggaggtgcagaccgccttttaccgtaccatccccgggctggagcaggtggagctcatgcgcaccgcctacgccatcgaatacgattgcatcgaccccaccaatctcaaaaatactttggagtttaaagcggtgccccatctttatggtgccggccagttcaatggcaccagcggctatgaggaagccgcggtacagggctttgtggctggtgccaatgccgcccttaaattacagggtaagccgccctttctcaccgaccgttccacctcctatatcggcacgctggtggatgaccttgtcaccaagggctgcatggacccctaccgtatgatgaccagccgcagcgagtatcgcctgctgctccgacaggataatgccgatgcccgcctgatgccccagggctatgcccttggtctcatcccggaggaacgctggcagcggttcctcacccagcagcagcaaaaggagcaggaaaagaaacggctggaaaaatattctatcgctcccacccctgccctcaatgcctatctcgaatcggtgggcagtaccccacttacccagccggttcgtgccgcggagctgctccgtcgcccgcaggtcagctatgccgccctcgccccgttcgatcccgaccgccccgcgatccatccccatgccgccgagcaggccgagattgagctcaagtacgaaggctacctcaaaaagcaggaagcccaggtgcgggaaatgcgccggctggaagaaatgcctattcctgagggcttcgattacaccgcccaccgcggcctcagattggaagccatcgaaaagctccagcgcatccgcccggccagcatcggccaggccagccgcatcagcggcgtctccccggcggatatcagcgtgcttgttattctgctgcggcagcagtagctcctgccatgcagtttccgccttcggcgggacaaatcgcagtcccgcacccgcgcgccgcgaccc

SEQ ID NO: 1626 - DNA, 4263 bp, Unknown
  16S sequences of unknown bacteria
tggggatggggtcgccccagtagcgctggcggctgaccagccagtcgcgcaggcggaagttgaccgtgccctcgccgcatccgtgctcttcgagccaggaaatcacggcggcggcgccttcggaacccttgccgcccttcatgccggtgaactcgccggattgcaccatgatgccgggctcggcgtttgcctggtcccagtcgaccatgctcacgacgcgctctttctcgtctttcagctgctcgtagagcgggtcgttctcctcgacgatgacgggcgggatgtccaggccgtacttcttggcgaactcgaagtcgcgctggtcgcccgaggggacggccatgacagcaccggtgccgtagtcggtcaagacgtagtctgcgatccagaccgggaccttcatcccattgactgggttgacgacgtagcggccggtaaaggccccgtgcttctcgtagtcgcccatcgtgcgctcgacggcggtcgtcttctcggcgatgcggatgacctcgttgcacgcttcctcgtagggagtgcccgtaatcaggctcttgaccagctcgtgctcgggcgcgagcaggaagaacgagcagccgaacagcgtgtcggcgcgggtcgtgaacacggtgatcttggtatcggtgggctcaccttgctcgtcgcacagcgtgaagtcgacgtacgcgccctcggaacggccgatccagttggcctgcatctgcttgacgcgctcgggccagccgtcgagctggtcgaggtcgtcgaggagctcctgggcgtagtcggttatcttgaggtaccactggtcgagctccttgcgctcgacgacgctgtggcagcgccagcacgtgccctgctcgacctgctcgttggcgagcacggtcttgcagctcgggcaccagttgaccgggttgctcttgcggtaggcgaggcccttctcgtacatcttgaggaagaaccactggccccaacggtagtagtcctccttgcaagtgatgacggtgcggtcccaatcgtaggaaaggcccatgcgcttgaagctggccttttgggtctcgatgttcttgaacgtccacttggcgggctgcgtgttgtgcttgatggcggcgttctctgccggcaggccgaaggcgtcccacccgatggggtgcaagacgtcgtagccgttcatatgcaggtagcgcgcgtacacatcgccgatcgtgtagttgcggacatgccccatgtggatgtcgcccgacgggtacgggaacatctcgaggacgtacttcgcgggcctcgtgctcgcgggcgggatcttgaacagggagtctttctcccactgctcctgccattttggctctattgcgtgcggatcgtatgcctggggcattgcagctacctccgtgaaatcagtgcgttttggcccgtggtctgggctgcgtagataatagcgcaataaccgcgcgcgagccgacgcggtcgcgccaaaggtgcaagagacgagccgcccgcggaaaagcggcttccccgcacgaagcgccactgtcgccgggcatggggcgtatcggcaaaccggcatcgcacacaaccgccattgtgtgcagtcagcactatccggtgcctgcggcgcatccctatccttatcgacagcgcaaaccagcgcaacaaagcgcaagcacgaagaagggacatcacatgggacagcttgacggcaaggtcgccctcgtcacgggcgccaactcgggcatcggacgcgcaacggcagtgctgtttgcaaaagagggcgcgaaggtattctgcgtttcgcgtcgcatcgatgcaaaccaagaggtcgtggatcagattgtcgaggaaggcggcatcgcggcaagcgtctctgccgacctctccgtgcaggaggactgcagaaaggccgtcgacgcctgcatcgcagaatacggcagggtcgacgtgctcgtgaactccgcgggcatcgccgacaagcacaagcccatcaacaagtgcgaagaggactggtacgactatgtcgtcaagatcgaccagtacggcaccttctggatgtgcaagtacgtgctcgaggacatggagaagcgcggcgagggctcgatcgtcaacgtctcgtccatcggcagccgcggcgtcgccggcatcgcgtattccgctgcgaaggcggccgtcaacggcatgaccaagaacatcgcgtgctactacgccgacaccgacatccgctgcaatgccatcgccccgggcccgacgccgaccgcgctcaacacacccgacaagcttgccaccttcgacccgttcgccgaggtctgcgcccgtcatatggaccagtctctccccgaggcacagccggaggaccaggcgcaggcggccttgttctttgcaagcgatgcctcgaaggccatcacggcacagatcctcttcatcgaccacggcaccacgctctactaggcgccccggtacatactggtaccatgtttgcggccctcacgtcattccggcgcgcagggccgcttggttttcatgcccccaccgcagcgcgcaggttctcggggacgatgtccgtcaggtacgtgcagaagctgcgtatggtcatcgcgccaaagtccccgcgaatgaacttgtccgtcatcacctgctcggcagacgcgagtgcgagtgcctcgaacgcgaggccttcggtgacctcggccccgtgctcgcgcatcgtcgcgacgagcgtcgcgctccggtggcgccggtagctgttcgccgcgccatcatagccctgcgcacccgccgccgcgatgatcaggctgcggtaggggtacaggatgcgcgtcgtcgtgtagtgcccctcgaaccacgtgagcccgtggccaatgcggtcgatgccctgcgcaaacgcgaagcgcgagaggtagcgcacgacgtcgttgcggctcgagaagtggtagtagaagctcgagcgactgatgcccgcccgcttggcgatgtcgacgacgccgacgcgctcgaagctgcgcgtgttgcacagctcgtcaagcgcctggatgaccgcgagctttgtcgcgggaatcaattccgatagaaacgtctcttccatcgcaccctgctcccctcagcgtcgaagaatcgagaaaggcaactttgcttctcgagtatacgagttgagtatgcagcaatgccctgtccgtcgtgcggtgcaacgggcagtacgagcagcccgtccgcacccggcaaataaaaaaggggcccgaaggcccctgatgctgcgcgatggtggagatgaagggattcgaaccctcggcccccacgttgcgaacgtgatgctctcccagctgagctacatccccatcggtgagaacggattatagcgcatttgcaccggaaaatggcaaattgattttgcaaacatattcccgctacaaattgccgtccccttggccgttgccctcgcgctctagctttcccgcgggttttggcagcggcttgccgcacgtggcgcacacggccgcatcgccgggattatgcgtttgacaaaacgggcagtacccgagtggattgagctttcccccgccgccggagccagggccgcacctgccgcaatgacagcaatagaagcaacgtgccatttgaaattacctcatctacacaaatagattatctacttgtcctataattagaaatctatatatatgcagcgcagcacgccggcaaccacgaggagatgcagtgagctctaccccaggacgcatacaggaacccaacagcatcaccctcttctccaacgtggacacgaagatcgccgtcgccaaggcgctcgagcatctcatggaaggccaactcctcgacaagatcccggtctctgccatctgcaaacgcgccggtatctcgcgcgcgacgttctaccgctacttcacggacaagttcagcatcgtccagtggtacgtgagctatatccaccacaccggtgccaacgaaatcgggcggacgatgtcgtggtacgagggctactactcgtccgagctgacggtttcgcgccatatctcgtttttccgcaacgccgccaagtcaaacgactacaactcgctcgaccagtacgcgccgcgcctgcgcatcgccgccctcgagcgcacgatcaccgagttccacggcgtcgaactgaccgagaaactgcgcttcatggtcaacgcgacggtgcagtccgaagtccacctcttcccggactggcactacggcaactacgactgcacgctcgaagaggcgtgcgcgtggatggtcgagtgcgtgcccgcc

SEQ ID NO: 1627 - DNA, 6158 bp, Unknown
  16S sequences of unknown bacteria
tcattgggcttactacggcctgtttcgcgcaccgcgcgcggccttcgtgcgcccccaccagtttccgctaaaatcctgcggattttcgggcgcggaaactgcaaggaaacgatttttgctctggaaaatgggattttccggcgcaaaaattgccccgtccccgccgtacacgccgccggggacgattgaagcgcgaaagggctttgtccctctctttggtttttcgacagtctctggcgcgaggggcaaaagcgccccgcgcgccagagtgcagccaatatggcggtttacttcaccgtggcgtaccactcgttcttttcgcgcacgatgtcctcgccgcccagggcgtaccagttttcgatgaactcatcgaaagcgtccaccggctgctcgcccgtgatgatctgcacgatgatctcgtcgcgcagctgatcgagcgtggagccgcgggcggcctcggtttccgtggtggggccgaagttcaaatcgttcacgatagcgcccgccgcgtcggtctcttccgccacatagccggaatggtgcggcagctgcgcgtggttccagtagtggtcgaaatacacgctggaagaataatcgccgctttcaaagctctggatgttcgcccagatgctctgcacctcgctggtgcaatcctccagcgtcagcgtgccatcctgcaggccgcggatctgctcgggccgcacggacttgccccagatctggctgacgaagggatagttctgcggggtatattcttcattcaccacgtaggtggcgtaatcctccggggaaacgtccacggacatcatttcgaaccacaagttgatcatctcaaacagcttttccgggtgctcgcaattcttgttcaccacatagaaagtgctggggatggcgccggtgctctgcagcatggcgggctgaccgtcgctggagagcgggctcaggcaccaccagcgatccggcaccttctccggatcgttcatgaaggactggcagatcgcgctgctcatgttccaccacatgccgtagaacgcgccggacttgagcgaagccacgctctcgcccaccttggcgctgtccttcacgatgaattcgggatcgatggcgcccgccgcgtacagtttctgcaaatccgccagcgcagccttcatcggctcggcctgcaccgtgccatagaccaggttgccctcttcatcctcgtaccagatgttgggataggcgtggtaggcgttgaagaagccttccaggccgtactgcgcgccccacagctcccgcaccagcgccaggccgtaggtatcgtccacgccgttgccgtcgggatcctgtgtggcgaaggcgatcatcgcatccaccatttcctgctggttcgtgggctcttccaggcccagcgcctccagccagtcgtggcggatgaaggtgtagctcgcgccataggcggcctcgcccgtgtaggggatggccatcaggcggccgcccaccgtggccgcgcggaacgaagcgtcaaacggctccaactcttccttggcctggtcggagaggtattcttccgccagatcggtcagatccatcagcatatcgccttccagcgccagggcgaaattggccttatccgtgcgccacatatcgggcatatcgccggaagcgatggtcagcgccagcttttgcgaatactggctgtcggccgtcagcacgaaatccagcttgatgcccagccgctcctcataaagcttggtccaggcgttgttgtcaaagctttcgccgggcgcgtatttttccgaggaattcacgcccatgcccacggtgattacgatcggttccgcttcttccgccccggcgggcagcgcgagcacgcacagcagcagcgccagaagcaagctcaggctctttttcatccagatcattccttcctaaaaaccgtccaaatcccatccatgcattctacgaatattgcgcaatatccatctatgaggattgtatcacaagggcgctttttcgtaaattccaatatttttcaaatgcctccattatctattgaacttttgattggcggcgggtctgcctttctttgccgcggctgcggccaaaagaggggatgttcccggccaaaaatttttcccataccccttgacaaatatatcgcggtgcgatataatcaatacatcgaagtgcgatatatcgcactgaaaggggtgaagtcgcgatgaatgcgcacattcacaaagtgtatgtgccaatgacggaaacgggcttttacatcctgctatgcctacgaaaagagatgcacggatacagcatcgtgcagcgcgtggcggaaatgacgggcggagaagtccggctcagcccgggcaccatgtacggcagcctttccaagatggaaaaggatgggctgatccgcttcgtccgcgaagaagaaaagcgcaagatttacaccatagccccgctaggcgaggaagtgctggggctggaaatgcaccggatcgagcggctataccgcaacatgatggaggcgcgccaatgaaaacgcacaaaacggtctttcgctatttcacgatcatggaatacgaaaaggagcaagagtggctttcacgccagcaccgccagggctggaagctcaccgccgccgcggcctgcttttaccgctttgagcgctgcgcgccggaagacgtggtctaccagctagattataacccggaaggccgggcccatcaggaagaatacgtgcagttgttccgcgattgcggctgggagcacgtgttggacaacgtgggatacagctatttccgcaaaccggccgcgcagatgcaggggcgcgaggaaatcttttgcgacgaggcgtcgcgcatggagatgttccgccgcatcctctaccggcgcatgctgccactgctgattctgattgtgggcgcgtttttgccgctatcgctcatggaactgctggacgccgccagtgcggcggacgcgctggccattgggatccccgcgggcctggtggtggtgctgtatatcgcagtgttcgcgcaatgcgtgctacaatacattcacctgcacaaagggcgttagcgcgggggcgctccaaccccgccttccgcgcgcggatagggcttgcgctcttctgtgcgctccatgatgtaatccatgctagtgtggaaaaaatccgccagcagcatcaaagtttccgtgggtggcacgcgctcgccactctcgtatttggaaatgagcgattgctcaatgcccgtttgcatttgcagggaaagttgcgtgagccccttttccaggcgcagtttctttaaatgattcatgccatcgcctccatttttattatggtaggcaaaggcgctgcaaatatgacaaattgtcatatgcaaaggggagaatcgcgcaatgcaacttctcttgcaggggaaatgggattgtgctatagtaaacctcaccaaaaagaaaggactgacggtatggacgccattttgcaggcaacggacctgaaaaagcgctttaagctctccgccaagcagcagaagctggaaaacagccgccgcaaattcgtggacgcggtgggcgggctgagcttctcggtgaaccggggggaaatttacggcctgctcggccccaacggcgcgggcaaaaccaccacgctgcgcatgctggccacgctgatccgccccgacgcgggcgacgcgctgctggagggcaggagcattgtgaaggagccggaggaagtgcggcggcgcatcggctttttgaccagcgaactgaagctggaggactacttttcgccctcgtacctgttcgattttttcgcccagctgcacgggctttccccgcaggcgcgcgccgcgcgcaaggcggaactgttcgatacatttggcattggcgaattcgccggcgtgaaggtggcgaacctttccaccggcatgaagcaaaaggccgccctggccatttcgctggcgcacgacccggacatcgtgatcttcgatgagccgaccaacgggctggacgtgctcaccgccaaagtggtgacggactatctgctcgcgctgcggcggcagggcaaaacgctgatcgtttccacgcacatcttcagcctgattgaaaaaatctgcgaccgggtgggcgtgatcatcggcggcaagatggccgcggacggcacgctgcaggaggtgtgcgccgggcaatcgctggaggatcgtttctttgccatatacgcgcagactgtgggggaagaagcatgaaaaagagcaacattggcgccatcattcgcaaggaattcaaccgctttttcaccgaccggcggctggtgatgacggccatcatcctgccggggctgatgatctacctgctgtattcgttcatgggcagcgcgatgagcgatatgtattccgtggaggacgatttcgcgcccacggtgtacgcggtgaacgcgccggcctccatcgccgcgctggcgcaggaagccggtatgacgcttacggacgtttcgccgcaggaggcggagggcgtgcgcgcgcagatcgtggataagcaggccgaactgctggccgtgttccccgcggatttcgacgcgcaggtggccgcctacgcgccgggcgcgggcgaagcgcccaacatcgagctgtactacaattccaccgacgcggacagcagccaggcgcacgcgatgtttgccgcgctgctggacggctatgagagctcgctcgtcaacaaattcgatgtgaaccgcggcgtcgacgccgacctggcctcggagcgcgacaccgccgggcagatcttctcctccatgctgccgcttttgatgatggtgttcctgttcagcggctgcatggccgtggcgcccgaatccatcgcgggcgaaaaggagcgcggttccatcgccacgctgctggtcaccccgctgggccggggcgaactcgccatgggcaaggtgatcagcctaggctgcatatcgctgctcagcggtgcttctagcttcctgggcaccatgctctcgctgcccaagctgatgggcgcgggcgatgtggcgctggaggcggccgcctatggcgcgggcgattacgcggcgctgttcgcggtgatcgcctccaccgtgctgcttctcacgggcatgatcgccgtgctctccgcctttgccaagaccgtgaaggaggcttccatgctggtgatgccgctgatgatcgtcagcatgctggtgggcgtgacctccatgttcggcgatgtgcacgcgcaactgggctggtactgcatcccgctgtacaattccgtgcagtgcatgagcggcgtgctcgccttctcggccagcgccgcggccgtgggcgttaccgtggccgtgaacctggcattggccgcctgcatgacgctgattttgcgcaggctctttaacagcgaaagcgtgatgttctcccgctgacggcgcggaaaaaaatctttgcgcgggggattgattttctccgcgcaagcggttataatatcctcggatcgggcaattcccgcttcgatctaatacagtcagaaaggagcgtgatgggatggatgaagaactggatctcgtcaccttttcggacgaggacggcaatgaattcaccatggaggtgctcgattatttcttttatgaaggcaaggagtacgcgctgctggcagaggtagaagacgattgcgaatgcgacgcgtgcgatcacgacgacgattgcgactgcggctgtgaggaacgcgaagcgtatatcatggaagtggtgcccgtcggcgatgatgaggaagaattcgtcccggtagacgaagagctcgctgaacggctgattgaaatggtcgaaaaccagctctacgacgatgaggacgaggacgacgaagaggaataatcgctcgctccgcagaggtggcgagattcatttgaggggctgtggaagaacgtttgccgttcttccacggcccttcatcataattgtacaccgtttcgtttgcttcgactgcagggaagcggaaattgtcttgccagaaaagccattgcccacatcgccaataaaatcttgactttgtgaatactctgaagttttgcgatttcaaaccgcaaaactcgaaaacggcgggcagtttgggagcgatggattaggttgcgtctacacgagtcaagtgatataatggcactatcacagtaaagagggtgtcatcat

SEQ ID NO: 1628 - DNA, 6590 bp, Unknown
  16S sequences of unknown bacteria
aatctgaaagacggagtctttctactttctcttcactttaacccaaagtgaaaaaaacagagcgcagctctttcttccttaccctacgtttcccaaagggataatgtagtctaaggtagaaacgagcttgcgctctttcttttatttctctacttcttccatgatgaaggcttcaaatatgtctcctacctgaatgtcgagacacttctcaagtcctatgccgcattcgtagcctgccgctacttccttcacgtcgtccttgaatcttctcagtgaagatatcttgtcttccatgataacaatgccgtcgcggactattcttatctgggactgacgcgttaccttgccgtcgagcacgtacgaacccgctatgattcctacgttcggtaccttaatagtctgacgaacctctatgtgtccctggagaacttccttgaacgtcggagcaagcatacccttcatggcagccttaatctcttctatgcattcgtaaatgatgcggtacgtgcggatgtctacgttctgtctttcagcggagtcaagcgcgctcttgtcgggtcgaacattgaagcctacgataatagcattcgacgccgccgcgaacattacatcggattccgtgattccgccgacgcccgcatggattactcttacctttacctcgtcgttcgatatcttctcgagggactgctttaccgcctccgcagaaccgcctacgtccgcctttactatgatgttcagctccttgacgccggctgcgatctgcgagaacaggtcgtcgaggtttacctttgcgctctgcttgaatacctcttccttcgccttctcgcgtctctggtcggcaagctcacgagccattctctcgtcctcgactgcgttgaattcgtcgcctgcgagaggcacttccgaaagtcctattatctcaacgggaacggacgggccggcttcggtgagctgctctccgcggtcgtttaccatagcgcgaacacgtcctaccgatgtgcctgcaattacgatgtcgccgtttctcagcgtaccgtcctgtacaagaaccgtcgcaacaggtcctctgcccttgtcaagctttgcttcgattacaacgcccttcgctctcttgtgcgggttagccttgtattccttaacgtccgctatgagaagaatgtcttcaagcaggtcgtttatacccatctttgtcagcgcggatacgggaacgcacattacgtctccgccccattcctcgggaacaaggtcgtattttgtaagctcgttctttacgttgtctgcgttagcgtggggcttatccatcttgttaatcgctacgatgatgtcaacgcccgccgccttcgcgtggttgatagcttcgactgtctgcggcatgataccgtcgtctccggctacaacaaggattgcgatatcggtacactgcgcgcctcttgctctcattgcggtgaacgcctcgtgtccgggggtgtcgaggaacgtgatgtctcgtccgtttacatgaactctgtacgcgccgatgtgctgtgtaatgccgccggcttctcctgccgttacgctcgtgtggcggatagcgtcgagaatggaggtcttgccgtggtcaacgtgtcccattacgcatacaacgggcgcgcgggttacgagatcctcttcgttttcgggttcttccgagaagagtttgtcttcgattgttaccttgacttcctttgtgacgaccgcgcccatttcgtcggcgatgaggtaagcggtgtcgtagtcgatgacctggtttaccgtagccataacgcccatgagcatgagcttcttgacgcattccgccgcggtgactttaagtctctgtgcaagctcgcctacggtgatttcgtcggggatggttatcttgagcggctgtttcttcgctttttcgaggttagccttcttgagcttttccatagcgaagcgttctttgtcgtttttcttgcctgtaccgcggttttcggggcgctggttctgcttcttcaccttctgcttggtggagtgagcgtcgtcaacctcaggggagaagttttcgagtctctcgtcatacttggagaggtcgacggaggaggttctggtatcgactattcttgtgttgccggtacgctttttctccacgccggattctattttcggcttcggtttgggtgcaatgggagctctgtcgcgtccggagtccttgtcgctgccgcggaagctgttgccgtcgcggttattgttcggcttgaatccgttgccgttacgattattatcgtttcgattgtcgttctggcggttgttattgtcgcggttattgtcgtttctgggagcggagggtctttgattatttccggagttatcgcggttaaagggttttctctctccgttctggttattctgtgagccgaagggttttctctcgccgcggttatcgttgcgctggttctgctgacggttctgtgaagctgaattattatcgttcatatatttgtcctgtgtgtttgtagtcgattttgtttcattagcggcttttgcttcttctgcggctttagcctgagcttccgcttctgctttggctttagcttctgcctcagctttagcctgagcttccgcttctgccttggccttagcttccgcttctgccttagctttagcttccgcttctgctttagccttagcttcagcctctgccttggctttagcttctgcttctgccttggcttttgcttctgcctctgccttggctttagcttctgcttctgccttagccttagcttcagcttctgctttagccttagcttccgcttccgctttttcctgtttcagccgtgttgcgctttcctcgggagactcaggcagcgtgataactgtctttccgcgcagatatccgtcaatatctttgatctcagagtccttggaaaggctttcaaacaaaagatttacttcatccggctcaagggatgcggacgtattcttcgtggaaactcccagctcgttcagcttttcggtaagctccttcgttttcagtccgaggtcctttgccaactggcttatcctgaacatcgaatttgacttcgttgccattaacgatcatcctttctgattagcacatatctgggtgggtattcgtatctattggtgggggattatcttgaatgaatattgttggtacaagttgttagttcttcttttttctcctttagcgaggaagaaaaaagtagcaaaaaagaggaacttttttggaagtcttgggtgtttcgagttctgcggaactcgccttaggacgttgtcctaagaacctatgaccttttgaaaaaggtcaatcaaaactttcgactgggcaaggtgcatcctgtcattttcagtttgacgaaattcttactgattgggtgagtcctgtttttcttctttcgcgtaataatcgcggatcttattaaagcagccttttccgccgaacgagactgcgaccgtgctatctcttccaatcgcgtgtccgatctcttccgacgaaaatccgcactccacgcactttactccgtggaactcgcacttatccttgatctgttttctcgttctctcggacgcgtcggaggctatcatgacgagcttagacttgccgcatctcacctcgccgaggacggaatcgaagccggacgtaacaccgcccgcagccttacagagccccatccatccgagaattgcgcttgcgttactcatttgccgcctccgcttcgtacgcgcgaatctctttttcaagctcgtcgtatatttccggcgctatctcgcagctcagggcacgggacacggctccggattttctggcttttttaaggcacgactcgtttttgcagagatacgcgcctctgccggattttttacccgtgaagtctattgatatctccccctcgggcgagcgcacaactctgataaggtcacgcttttcgcgggtttccatgcagccgatgcagcgtctttcggggacttttttcgcgggtttttgctgttttttaggtttggtcagtgccataattctcctgctttacgctttaacgccctttatatctatcttacatcccgtgagctttgcggcaaggcggacgttctgaccttccttaccgatagcaagtgagagctggtcgctgcttacgtgaacgagcgcgcttctttcaccgtcgaactcaacgtcctgcacctctgcgggggagagggctgcggcgatatattcctcgggcttatcggagtacgcgattacgtcgattttttcaccgcggagctcttcgacaatggcggcgattctcatacctctgttaccgatgcacgcgcctacggggtcaacctcggggtcacgggaggagacggagattttggttctggagcctgcctctcttgctacgcctttgacgaggactgtgccgtctgcgatttcggggatatccgtctcgaacatacgctttaccatctgtggagcggtacgggagagcattacgacgggggcgttttcgctgtctcttgcgacctcggtgacgaatactcttattctgtcgcctacgaacagctcttctccggggatttgttcgtttttctggagaagtacgtccgacgcgccggtatcgacccaaacgtcgcctgtggagtcgtctctttttgtgacctgcgcggagatgacttcctctttcttcttctcgtactcgcggtttaggttattcttttctgcctcgcggatgccctgcactattacctgcttgccggtgagtgcggagattctgccgaagtttttgcccttgatttcgtcctcgatgacggagccgagctcatatctgcggctgatttcctgcgccttttcgagggagatttcggttttggggtctgtcacttcctctacaactgtgcggcggcggaaaacgcgtacttcttttttatctttatttatgtccactctgacagacgcgctgccgtattcctttttaaaagcggaaacgagcgctgcttcgattttctcgagcatatagtctacgggaataccctttgttttttcgagcagctcaagtgcgtcaaaaagctctgagttcattgctaaaattccatacctttcgtgttatgtttgtggattttcttcatttattatatatcagtcccagttgaaaacggtcacgcatttagcgacggtctttatggggaacttcttctcttcgccgtcgggcagttttattacgacgttatcctcgttctctccctcttccagaccgacaagctcaccgcggaacacctttgaaccgtcgagagcggcgtatagtctgacttcaacctcactgcccttcattttttcgtagtgcatgggtttagtgagttctctctcgacgccgggagacgaaacggaaagcatatacgactcctcgatggggtcaagctcgtcaagaagcgggtcgatggcgcggtgcattttttcgcagtcgtcgatggtgatgccgccctccgcgtcggtgtctattgtgatacgcaggatcatatccgcaccttccttaacgtactccacgtcccagaggtcatagccgaattcctttgcgaggggcaatgcgatttcgctgacgagtcccgcaatgttttttttctgcttcataatttccgccttatcataaacaagagagtggacgttatcttgcccactctccattacttcttatcattcttacgataatattataccacacattcgttattcttgcaacaagattatttatgtgaagctgcacaatttttccggcatcggatttgcgcggtattatgctgatgcgacaaaccgccgagggatgaggttcactttggtttaaagtgaagaaaaaaagaaagcgcgaagtgattttcttttccttagacaacttgagttttctaagagacttcccctgatgtaagtttcacttaaactttaagtgagaaaaaagaagaaagacttacgtctttcagatttcattatatactcctacgcggagggcgcacagagatgctcaaacgccgcacctctgtgagttccggctcgcggtggagttcagtttagcaataaacttcatcatcgcccccgtgaacagctcagtcgcgcggctacgcgtaagccttagtagtggagcttaaaatgttcgcgcggtagagtgagacgcgggtagacttactcaatcgctgctttgactttcgcgcggggtcgagaataccaaattataactgaattggagtaggctaaccgcggattgtcgggaatttgtgcgcccacatggagcgaacgtccgattccgtttagcttccgtcagcgaacgttgaatcaatccagtgcggcagcagatatcgaactacacttcaagtttcaacttcacaagattggtgatggtgcagaaatttaggctttctcaaggctataagctacagaatacccttgttataaaaccggcggctagccataatctaagaagaccctttcgccagtataaacagggtgcgacagcaaaagctcattgctaagccaaacgtgaccggtaagccggaactccgcacttacatagtaagtgcaaggggcaggcgcctgagcctctctgtgcgccctccgcgta

SEQ ID NO: 1629 - DNA, 18296 bp, Unknown
  16S sequences of unknown bacteria
ctcctccactaatcatcactgaagaagaaatcgttgaaaacatgaagattatggacaaggtattaactgaagttgacaagtggatctaatcgagagtaatttaatagagtggcaatcgccactctatttttttatctctttgattatctctttaaatcgaggtatggactttttaatgacatcaggtgagatgcagtatgcaagtctgacatatcccggtccaccgaaggaggagcccggcacaacaaccatcatatgctccttgcatatatttataaactctgcttcttcaaccggagttttaacccacagataaaatgctccgtcaggcttgacacattcatagcctgcatctgtaagaccattgtaaagcaggtctctgttacgtccataaaattcaatatcggcctgttcgtcaaggcattttttaacagcaagctgcacaagcgaaggtgcatttacaaagcctgaaattcttgtggctgtaacaatgccgtcaaacagatctttgtaatcatcagcttcgtcaggtatcaccacataccctattctctctcccggaagtgataaagacttgctgaatgaatatcctacaatagtattcttataatacttggtcaggtaaggaactactatgtcgctgtcatatacaagctctctgtaaggttcatctgctataaggtagatggaggtgccgtattcagcttctttattccttagtgtatctgctatggcaattacagactcctcagtgtaaacaacacctgtaggattgttaggggtattgactataacagctttggttcttggtgagagagccttctcaagacctgctatgtcaggctggaaggtcggaggattagccggaacttcaacaagaactccatcatagtttgcagtatatgctctgtattctccgaagaaaggtgcaaataccacaacctcatcaccgggatccagcagagttttaagtgtcgcattgattcctcccgcagcgcctacggacataattatgtttttaactccaaaagccgtaccgaatcttttgtttattgaggccgctattgctgccctcacgctctcatatccgccgttattcatatatccatggacatataccggctcttcctcgttcaaaacgcttataacggcgtttttgaagctctcaggcggtggcagattgggattaccgaggctgaaatcacatacattctccgcaccgtatttgtctgccattattttaccttcttcaaacagtgcccttatcgctgagccgccttctatctgcgctttcattttttttgaaatcataaactgtaccctgcttcaaaagctttaatgttaagctcctcgaagcctttcttaacgttctttgttataacttctttccagtcaatgccgcttacattcatagccttaaccagcgctcccagaagcacaatattcattgccttgccgttgcccagttcacctgctatatccgcagccttaactgtaagggtatcgcattttgatgacagttcctctattattccctccggatacttggcggcacccataaggataggaactgacggtatttcaaaatcatttattaccattttgccatcaggtttaagatattcaagccatctcagcgcttccatcttttcgaaagcaacgacaacatcggcctgtcccctgcctactatcggagaataaaccctgctgccgaatcttacctgagttgaaacatctccgcctctctggctcattccgtggatttcactcatcttaacatcataacctgcactcatcagaccctctgataaaatcttgctggcgagtatggttccctgaccgcctacgcctacaagtataatacttctaacatcattcatagcctacacctccttaattgcatcaaacgggcatacctgactgcacacgctgcagcctgtacagcttgccgcatcaatagttacagtttcgcctgtatatattgcagggcagcctgttttagcgcacatgccgcattttttgcatttgtcctgatccactgcgcatttcttaggagcaaggtcgtattcagccttgtcctgcgccgagaactttttgagaacgcaaggccattttgtaattataaccgtaggctctgtctttgctatagcctcatcaagagccttgttaacctcatcaagcttaagaggatttacaatgtatatattgtcgtctttaacgcctatagccctgcacagtgccggaatatcaacctctgtggtttcatcccccataagcgtatatcctgtgcccggattctgctggtggcctgtcatacctgtaattctgttatctaagattacagacacactatcagatttgttgtatacggcgtctataaggcttgtaattcccgaatggaagaaagttgagtctccgagacacgcaacaaccttggtatctgcatgagccattttgtaggcctgcgctgctccgtgacctgtactgatggagcctcccatgcagaaagtcgtatctatagcgttgagaggcgctgcggagcctaaagtgtagcagcctatatctcctgttatcattacgttctttttctttgaaagagcgtagaagaagcctctgtgagggcagcctgcgcaaagtgtaggaggtcttacaatcgcctccatttctgttgacagggtttctgccttggtgccaaagaatgattctctgacgatgtcaggattaagctcaccgtatttaggaaccttgtccttgcctatgcagtcaatgcctgctgccttgaggctgttttcaaggtaaggatccatttcctctataacgtatacggtatctacctttgaggcaaattctctgacaagctccataggcatagggaatgtcattcccagcttcagatatgacacattgtcaccgaaaacctcttttgcgtactgatatgaaataccgcttgtaacaatacctatcttagtatcattgtactccgccctgtttatatcgcagttgtttgcgtacttgctcatagctgcaagcctgtcctcaaggtcaactcttctaaccttggcgttggcaggtgttgaaacgaattttttgatgttcttctgatatggtatgtacgctgcctcgtgtctgtctgcaagctctactatgcccttgctgtgacagactcttgttgtcatatgcagaagtacgggtatatcgaatttctctgacagctcaagaccaagctttgtaaattccttggcttcctgactgtctgacggattgagcatcagaagtctggctgccgccgcatagtttctgttatcctgctcgttctgtgagctgtgcattcccggatcgtcggcggatactatcaccataccgcctgttactcctgtgtatgcgaatgtgaatatagggtctgcggccacgttaactccaacgtgcttcatagctgcaagagatctgactcctgcaacggaagcccctattgcagcctctacggcaactttctcgtttggagcccactccgaatatatatcctgtttatactgaggcatattctcaagtatttctgtgctgggtgttccaggataagctgaagcaaatacaaggccgccttcccatgcgcctcttgcaaccgcttcgtttcctgtcataattgctttcattgtaatccctccagtccttgttttacaactaattatatactaaaaaaggccttctgacaagaaggcctgaaactgctgtccttaaaagtatctgaatacacctttaaccttgcccagtattgtaacatcgtttacaataatagggctcattgaagggttctcaggctgcagcctgatgtgatctccctcgttgtagaaagttttcactgtagcttcgctttcaaagccgtcaatcatggcaacaactatatctccgtttttgacatcgtggttctcctcaaccagtatatagtcgccgtcaaatattcctgcctcaatcatactgtcacctctgacagtaagcataaagttggtgcccttgcccataaatctggcaggaagcgggaatgtatcctccacattctcctctgcaagaataggtgtgcctgcagctactctgcctaccataggaatatcaactatgtcggttctctctgcatactgactcttctccttagggtctgcaacaaccataagagctctcggttttgaaggatccttaatcagaaacccctgtctgacaaggctctcaatgtccttgtgtactgtagaggtggatttaatctcaaggttgtcacaaatctcacgtacagtcggcggatagcctttggtacggatctgagtcttcatatattcaagaatcttctgttcgcgttctttgatgtttgccattgttcaccctccttactgatgttagatatatattatcacataacaccggcaaagtaaacagatgttcagaactttttaatttatttgtttacaagaagttttttgatgccctgttcaagtcccgacagcgtaagtgggaacatcgggaatacctctcctatctgagcaagggtcgtgcgtccgtaaacatattcccagtctccctttggaacaggattaagccatatctgttttttgtatcttctcttgaatttgttgagccatactatgcccggctcatcattgtaaagacctattactgaattgccgccctttcttgacagttcggacggtgccatacacgcatctccgacgaatataaccttgtagtcactgtcaagatttcgcagtacccagtcggtgtcaacccattcgtttctcttgcacttaggggttgtatacagctgatcgtatatgcagttgtggaaataatataccttgagatccttgaaatgatttgcctttcttattgcctggaacagcttgttgcacagtctgctgtacataagcattgatccgtcggagtcaataagcagcagcacctttacggtgttttttctcggtctttcaaataccagcttgagtctgcccgcattgtctgaggtttcatcaatagtcgcatctatatcaagctctgtcttaggcgcatcgatttttgatgaatactgacgcagctttctgaatgccatctggaactgacgtatatctaaaatagtgtcatctctgaagtcagagaagtgtctgtcgcctgcaatctgaactgcgtttttgtgtctgctctctccgccggttctaatacctctttcgtgatatccgctgttacccatagtggacgtaccgcctgtacctatccagtagttaccgccgtcgtgtctttctttctgctcctcgatacgctcgtggaatattcttacgagctcatcaaagtcacggaggaagtcatcaagcatagtcttgtcattgatatccttgaccttgacatcctcgctgagccacttccagaattcctccggcagatcctcctgcgcagccacgtctttgaaatattctgcaaagaccatatcaaatttatcgtattctgtttcggatttaatcagaacacttctgcacagctgatagaatttcataagcgagccctgcgcaagacccttgtccagagcctcaatcagcagcatccattcgtttatggtaacatcgacacctcttgcccttaacaggtaaaaaaagtctaaaaacacattaccacctctttaatgaataacctttctctttgatttcacgcattacttctatatcttcgtttttcttgagaagcacgcctacatacggaatttcatctactatcttcttgatgtcaactccgcttataatcagggcctgtatccagtctaacagctctgatgttgacggttttttctgaagctcgttcatatctcttaatgagtagaaagcttccattgcctgctcaacaagcttcttgtctatatcgccgtagtgagcgtgaacgatttctgtcatcttgtccttgtccgggaattcgatatagtggaatatgcatcttcttaaaaacgcatcaggaagttctttctctgcatttgatgtgataataactataggtcttgtctttgtcttgattgtttcttttgtttcgttgatgtagaattccatcttgtcaagctcccagagcaggtcgttagggaattcaaggtcagccttgtcgatttcgtctatcagaagtacacactgtttttctgatgtgaaagcttcgcccagcttgcctaatctgatgtactgcttgatatctcctacattaccctcgccaaactggctgtcgtaaagtctctgtactgtgtcatacagatacagaccgtcctgagccttggttgttgacttgatgctccagataataagctccataccaagtgactctgctattgcttctgcaagcattgttttgcctgtacccggctctcccttgataagcaaaggcttctgcagtgccattgcaacgtttactgaatttaaaagttcttctccagctatatatttgctgcttccctcaaatttgttcatatgtcctcctaaaatcatatctgaagtgctgcttatcgtatgtcagatcagcacttaaaaatcactaatgcactattaatctgttgaatatatatttgcacactaatctgtatagtataccacattatcaaagaaaacaccacagctttcagtaaagtaatcgtctacattacattcagcgcacgctctctcagtatgcgttcttcttcattttcaggttcgtcaagcactataccgtgcgctctttttttcttggtatcaggttccacgcatacgaaagtaatgaagccttcaacattctgtccctcatctatttcacagcaggctttaacatgtaccatcatgcttgttgtcccggcctttactatacgtccgtatatagtcagaatatcacctttctgtaccggttttttgaatgtgaagccgtgaacgttgacacacagaatatcctgaggtctgccgtgctctgcagcggctgtaacaaatcctgcctctacaagccactctgcggttctgcctgcaaacagtgtaccgtggtggttaagatcctctgatttaattaaatgtgaaatcttgaattctttcatttgtgagcctccttttaattcatatatatttatttgattttaaacatcatttgttaagaaattttagtgcatttctacccataattcaatgagaaattgataagtatacaatatatttaagcactgtaaagggaagccctgtttgatgacttccctctattgtttaaatccttttgtctatcccagagcagcggtaattttaatttctctgacagtctctttatatggttcgactgtagaggaaacagcatatctgatactgtattctcccgcctgttcaaacacatatgctttggcctgttcatatgtaagctctgtgtattctgtgctttcaggcgcctttatgtacactctgattgccgcagttatgtctgtacctgcctgctttgcggtaacgttcttaacagcatccgtctcacctgccgcaacagttctgtcctctgctcccgagataacagccctgctgctgtctacaaccttgattttaattgtcttgtaggtcgtgccgctgtatttgtcctttaccttatactgtaccttgtaggtgccctctgattttgttgaaaatccgctaacctttacatatttaccgcttgtctttgaatatctggtaaccttgtttaccttgattaagtccgtcagatccatatatgtattagggtccttggcagtcacatattttttgagactgtatttgctgcccacttcaactgtaagctgtttcttgcttcttacggttattacaggttttttaattatatagtacgggttgttagggttagggtctgtaggatcccagtattccttgcggtctgtggataccttgatgccctcaggcttgcctaaaggtcccggcttgctgcttctgtatattgtaaccttggttcctgccttgcacttgtcatatatccatttggcgtccattaccgacagtctgacgcagccgtgagatgcgtgctttcccagcttgttaaattcatctgtaggctgtgatttgtagtttctctgctggttgtactgtactgaatggaaaagatagtcgcctgatattgtcgtgcagtactgcgcatatactccaaagaacataacgccccactgtcttctgccgcccagatagtatgtgcctctcggtgtctccttgcccggtttcttaaggcctgtagagcacagcattgctcttatcggcttccatttggaaccggatttctcgtaaactgttacgacattgcactgttcgttgactctaacccagtatttgcctctgtatgaggctgcgtccactgtaatgctgcctgaaacgacaagggttattataagcactgatacgataattgttctgattgtttttctgactttgctcacttcgttctcctgtaggtttaatctgtactatattattttagcatattacgacttcatatccaatggtttatgctgccaattttaaaaaaagcctgctcacatatttaatgtgaacagactttatataattgcagcttatctttgtcccttgtcgtaaggaataccctccgcctttggcgctcttgatttctttgatgtaaatgcaagcaccagcagtgatataacatacggcatcatattgtatactccgctaggcagattgagtgccaccataaatgaaaatccggtatatacgtttgaaagcgctctgaaaaatccgaacagcagtgcagccagcgcaattcttgtcggcttccactgaccgaatatcattactgcaagagccaggaaaccaaagcccgcaacgccgtactcaaatttccattcgcttacgcctgctgtaatatatacgataccgccaagaccgccaagcgctcctgaaatcattacgcctatatatctcatcttgtatacactgattccaacgctgtccgcagcctgcggatgttctccgcacgccataagtctcagacccagtcttgtcttgtaaagcgtaatatatgctgctacaagtatcagcgcggttattatcataaaccagtttagctgcatgccccctgcattgatgataaatgcttttttggcatttatatattcgacaaccgaagatacattgttagggtctgccgctgtatttatagctttaactattacagttgcaagagctactcccagtatattaagagcagtacctatgattgtctggtcggcattgaagttgacgcaggcaaccgcaagcagcagcgaatatattattccgaagataacagccaccagcactaccgatataattaccgaaaatgccgaagcatccggaaagcttttctggatcacactcattgtaagtgctccgccaagcgctcctataaccataataccttcaagtcccaggttgataacgcccgagtgctccgagaaacagcctccaagggctaccagtataagtacggaagcataaagtaatgtgtattgaatgagtaattccattaagcttcgcctcctttcttatcttcagcctcagcttttttctcctcttttttagctatacgcgagttcataacgtatttcataaacaatacgaagccgcacaggtaaataattatagctgaaatcagatctgaaatctgcgtacagtagatagccttatcaagatatgcaccgcctactgtaatatgctgtatgaaaaacgatgagaaaatacttcctataggattcagacagccaagaaatgctgccgaaattccgttaaagcccattgcaggaacagatgataatgagcagttccactgttcatatcctgtcagatacagcattgatgctccaaggcctgcaagcgctccgcctattatcagtgtcagtattatgtttcttttttctgccataccgcagtatctggcagcatttttgttaaagcctgtcgctttaagctcatatcccagctttgtcttgccgaggattacccagattactattgcaaatataactgcaagcggtattgctatcgtaacataactgttgttaaacagcttgtcaagtcctatggaaggtataatcgctcccttgttgtagcttgccacattgagcgtataagggcttgcgtcctcttttacctttgtaagtagcatattcattgcatatagaataatccagttgagcataatgcccgaaataacctcgttaacattgcagtatgccttgagtattccgctgatgcagccaagtatactgccgcctatcattgcaagcagcatgcatatccaccagggcattccccatgccagagccgcaaacagcgcaagtcccgcgcctgcggcatactgacctgatgctccgatattgaaaagtcccaccttgtagcagaaaagtatcgacagcgagcacataacaagaggcgctgtctttaccagcgtgcttccgaaatatttgaatgcaactgccggattaggataattccagaagttcttgattatgtctaaaataccttcaagagctcctgccggattgataatcaaaagcgctataaatccgataataaggcctcccagtatgcacagaagcgatgatattaccgactgggcagcgtcgtttttaactaatgtgtgtaatttttctttcattacgctctgccctccttctttgctcccgccatataaaggccgagttcttcaactgttgtctttttagggtcaagctctcctacaatctcaccctcgtacattacgagaattctgtcggaaacgctcattacctcatcaagctccagagaaacaagaagcactgcagcgcctgcatctctctgctcaacgatacgcttgtgtataaattctatggcacctacgtcaagtcctcttgtcggctgaaccgcaacaagcagtgacggtttcttgtccatttctcttgcaacgatagccttctgctgattaccgcccgacatacttcttgccttggtgacagggccctgtcccgaacgcacgtcgtattcgtcaatcagcctctccgcatacgctctcatattatcttttttgatgaagcctgcttttgatacaaactccggttcaaaatatctttcgaggatcatattctcctcaagagtatagtcaagcacaagaccgtgtttgtgtctgtcctcaggaatatgactcatcttctgattgcgcttccttatggaaagatcggttatatcctctccgcaaagtgtgattttaccgcctgaaacgctttcaagccctgtaactccgtatacaaattctgtctgaccgttgccgtcaatacctgcaatgcagactatctctccggctctgacttcaagggatacgtttttgaccgcatcgtttttgtgaagcttgcttgcaacgctcatattttcaatttcaagaacaacatctcccggctgcgcaggttttttgtccaccgcaaactgaacatctctgcctaccatcattcttgaaagttcttccttgtttgtgttttcgatatctacagttcctacatatctgccttttctgagaactgtacatctgtcggcaacctccataatctcattaagcttgtgtgatatgaacagaatggatttgccctctgccgcaaggtttttcattatctgcataagctcctctatttcctgcggtgtaagtacagctgtaggctcgtcaaatatcagtatttcattgtccctgtaaagcatcttgagaatttctgttctctgctgcatgccgactgtaatgtcctctatatatgcatcagggtcaacgagaagaccgtacctctctgaaatttccattactttctttctggcctctgccttttgcaaaaagccttttttgcacggctcaactccgagtatgatattgtccagtaccgtaaagcactcaaccagtttgaagtgctggtgtaccatacctatgccaagatcattggcatcattagggtcatttatctcgactttcacgccgtccttgtgaatttcgccctcctcaggctgataaagtccgaagagcacgctcataagtgttgattttcctgcaccgttttctccaagcagtgcgtggatctcgccttttttgagctgcagtgtgatatcatcatttgcgataattcccgggaatcgcttggttatatgcagcatctcaatcgcatactgctgatccaaaggctccacctcctcaaataaaattagaaaaaaatatataaattattgcgtctgtctgctgaaacaaaaatcagggatgccgtatgacatccctgttgctggcaatcaattaacccttaatctgtccctggtaatcaaccttagtcttttcaccctggaattcttttgtagtgtcgttgtcaactttgatttcgcctgagtttaacttagcaactaatgccttgtaatcatctgctgtgaagtcatcgttaaactgagttgagtcaggaagctgaacgtagttttctgacggttcatctgaaatgatacccagtgttgcaatctgtcctgcatatttgtcccagttgccgtttattacaacgtccttgagagtgtcataagttgcaggataaaggcccttcatagctgatgtaactgtgataccgtcgccgtatttcttatcgattacaggcttctggtctgtgtcaacaccgatgatcttgccgtcaactttaactgcagcttctgctgctgatgtgtagattccgccgccgcatgcaaatacaatttctgtacctgctttgtaccatgtgtccattacggatgtgatgtctgcatccccctggaactgtccgccgtatacgtatttaacgtttacgtctttgcctgattctacagcagcagcgtcaacgccctgtacgaagccctgtccgtaacgaacaactgcaggaacagccattccgccaaggaatcctaagtcagtgtatccaagcttaactgcagcatagcctgccatataacctgcaagctcttcctgatatactacgcagtatacgtttgacatgtcaaagtattccgcaagatcccagttgtcaggattatagtcgtattcttcgccctttgcagcaacagcagcctcaagcaggtcgccttttgcaacgtcaagcgcgatgaatttaacgtcaggatagtttggagcagcgtctacgatagctccgccaaatgcgtaacccggcattacgataacattatagccctctgatacagcagaatcaatcattgatactctgtcagcagtgttgtcacctgcaggcttgaagtagttgaactcaagatcgttctcttcacagaaagccttgcaagcctcataagttgtctggttgaatgattcgtcagtgatatcaccgtagtcagtaatcattgcaactttgtagtctgtagtatctgcatcgttgccgccacaggcagtgaaagcaaacagcattgctacgcataataatactgcaagtaattttttcatattgttcctcctcaatagaataataaatttaatactctttgaattataaaccatatagcaatattgttaaagccttttttgtaaatatatgatattgtctgacaaaataagcatagtaataacttgcctaccgcaactgtacgctagtaaagctccggtcttctgtgctttaacagaggcagctggtctctgatgctgtcctcatattcaaagtcaatatcggcatatataatggtttcttctgtttcggctcttgccgcaaattctgcccatggagttgtcacacagctgtacccgtaggcctgatagacaccctccatacatcttgcaggggatattgccgcaaaatatatctggttgtcaagagcccttgccctcattgtaagatcccagtgcgcgggacctgtggtaagattgaatgcggcaggcaagaataccattcgcgcaccgtcaagggtcatttttctgaaaagctcaggaaatctcacgtcatagcatatggctatccctattttgccgtactcggtacctattacggtagcggcatctcccgcagtcagcgtatcggactccataaatctgatgccgcccttgacgtctatgtcaaacagatgcgccttgcggtgcttccctataacctgtccctctctgtcaaaggcaaagcaggtgttgtaaactctgtcatcgtcaagctcaggtattgagcctccgataaggtaaaccgaaagctcctttgcaagctctgacattctgcctacggtttctccgttctcactttcagagtatgctctgaaaaagtcatttgaatacggacagttccacatttcaggaagagctattatctgagccccgtttgaagctgcttctcttatcatctgctccgcttttgcccaagtttcttttttgttctccgatatatcgtctttcagagagcctgccatctggcacaaaccgattttaaatgtcataatcacgcctcctgtctattattgaaaacacttcctctataattctcacagccgcccagcttgtaatatcatttatatcaagcggcggtgcaacctcaactatatccatatgctttaccggcagctccgaaactatataccttacaagctcaatcagctctcttgaggtgatgccgcccgagcacggcgtacctgtgcccggcgcaaatgcgggatccagcacgtctatatcaagtgtgaaatatatactgtcatagtctctgaatttatcatatatttcattccagcaatccatatagcctctgcggaacacatctgttgccgatattacggaaattccgtttcctgaggtcataatgtcaacctcctccggctctgctgctctgatgcctaaaagaagcatgtcctccggcgatactatatcatctaaagctcttttttccgtgttggcgtgtgaccatatattaccctcatagcagtcacataaatccgggtgtgcgtcaaaatgtataattcctgtttttttgccggcttcatattttttaaaagccttgtggagcggtatagttacggaatgatcccctccgataaacagattgaaattgccatgtttcatcacttcaagggcctgcttctcaactcttgcaaagctttcctcccagctccccgacatattcacatctccgaaatcatatacaagattttcggaaagcacatgccagtcatcagttgcacatggcatataaagctctgcaaactcgcgtattctggccggagcctccgctgctcccgcctcctgcgtagtgccgccgtcaaaaggtatgcccagcaccgaaactgcagcctcagcaggttcttttgccgtaatatcaagccatttatacatcatctccacctcctatgtttacatcaagaccatttatctcgacaccgtctcctgccggtataagtatgtatttcctgccgtccagaattctggtttcaaccatatgactgaactccggagctacggatatttttatctcaggcgttgttatctcgaattttctgctttcgatcacattacccggattaagtacggcgccgtctccgaactgcttctcacattctctgtgaaaggcttctgttttttctttgtccacaccgctgcttctcagtatatcctctacatcatcaatatacatttcgggaagctccggctccttgctttccttgtgtattgcaagcttttctcttatctgctcgtgtaccgcctgaaccacatcaaaactgcagtccgtttcaagcgcctcgcaaagcgccataccaaaggctccccgctgcgctcctgccgacataggtttcttttcgacattgaataccgcatctataaattcactgtgaatatcgttgacgtcctttgtataataaagtgcattatatatgttcacagttcgatcatcgaaggcaggaaacataaatcctatttcgggagccgccacaatatgacctgtagaagtgcttctgaattctttttcgtctgcaaagtatctcagagccattgacgcatccttgacaggatatacaccgcagataaaatatctgaacacctcgtctgacccctctgaccatacctctccgtcgccgcctctaaacggcacgtcataggtatctgacgccagcagtatgacatagcttttgtcgcccatatctgccgactctattatcttcgtataaaaggactctctggcagcttcatctttgagttccgagtctctcagtttcatcagaagtccatgttcttcgcttcctgaaacctgtgaggttgaaaactctatatcaaggagatttcttcccagagtccccgatattgattttttgagcagcttaatatacatctctgcttcttcttcgggcatcagtcccacagacatatctatgtatgatacaatttctcctgccgcattgacatagcagccgtatatgtgagttatgctgtccttgtcaagcttaaaccgcctgcgtatttcgtttaattctttctggttcattttaatgcctctctatctcaaaacttatattcatattatcaaaaatgcggtaattcttcaacagaatatagcataatcggattagcgtatttcgacaggccgggcacataaagtgacaaaatcatttctccactaaaaaagctgccgcattaattatgtaattaacacaacagcccacttaactaggtgaattgcctgctgcaggtattattaactttcagttctcgtcaacatagtattatcaataacatctgttcaagtattcttaaatccttaaagaactctattgtctaaattttttattctccttaatattatctggtcctccataaatttttttaaacaaaaagtatgtaataggcgctgccggtccaaatattaccgctcccagcatagcggctttactacaaaatattatgcagtaaaaacaaattataactacaggtattgcataagctataagtccttttgttccaagaggcactctatatggtcttggcatctctggatattttattctgagcgcaattacaccaatcatcagcataatatatgttgcaaagaaaacaaaagtctgaaattcaataagaacatcaaaatgtccaaaacatataacggcataagcaagtatacatgtaaatattattgaatatgtaggtgttccatattttttgtttaatttttggaaaaacttaggggccaagccgtcttgtgatataattgctggaattcttgttgttgccgccatattatcatttacctgaataatattggagcacatcgctgaaataagcatagctacacctaatgcatgtccaccaacagtttggcatataacaactatgtcaatgctgccatctcctccggaactccattcctgccaatttccaaccgatgccaggcctactatcataggaagaaaatatgttaatgtcatagcaagtactgtgattcctaatgcctttgggaaaatttttttaaagttacttatttctcctgcgtaactggctggaccttcaaaagcaccgtacatccatacacctagaacaatagcataagctatattattcgttgtgctgttatatggattaaaaaagggttctaccgggttatactgcatctgaaatattccaaatataacaagcaaaccaaaaggaaccattatgagcacaagaaagcctacggaaacccatcctacggcttcaagccctataatattaactatcgctatagctatcattatcaaggcaacaactatgagatatgcaggtcttgataaattgaaaaatgatgaaatataatccatggccagcacaagcagtattccttcattaaggtaccatatccaggttctccaaaatgctgcgcaatatccccagaatggtcctagcgctttttttatccatacataatagcctccctgttccggaatagccgaaccgatttctgcacagctaagtgcaattggtgctgcccatattaatggtataactataattatcagtaatgtaagacctggcccagaagcacctaccatatcttccatcccaaagcatccggcacaaacactggcaaaaagaatagtaaacaaggttctcactttcatcttgcgttgttttaaattgttgtccatatcctgtccctcctataattcttgatttcttttactgcgaaagacaagcagtctcaggaagtatacatcctccatcgattacaattgtagcgccagtaataaaccctgcttcatcactggcgagataggctgcaagacctcctatatcctctggagtccccaacctgttgattggcagtcctgcaccaagctgccttaaaaattcttcaggattct

SEQ ID NO: 1630 - DNA, 15534 bp, Unknown
  16S sequences of unknown bacteria
atccttcgtcttgattgttgcaaatgtgcccatatacacgtttcgccgatcaaattgaccggcgaaaccaagtatcccgaaaaggcccgggcgctcgtcagaggccccttatggctgcttcctcccggacctgaccaggttcgggacatgatgccgcccaagcccatgcgacgcactcgcacagtcaacacgaaaacggatacggaagcgcgctagttgcccgcatcctccgatgcggattcggccacgccgtccacggagggttccgcatcgccgttgctggacactttatcgaaaacggtcgtctttgtcccgccgtttccgtcatcttcatttaatgtcaacgtttgcttgtcgtcgctgaagctgtagttggcaagcccggtgaagctcccgttggtggtggtgatggtcttcgcgttggtgtcgatcgtgtagtcgaacgtggtcccatacgtcttgaactgcttgtcgttgtagacgaccgtgacgtcggtgccctgcaccttccactcgccgatcaggtccttctggtcgctcgagccgcagccggcaagggcaaacagacaggcgcacagggcgaccgttaccgctgcaagggcacagatgcgcttcttcatgacttcggcagctcctttccttacatatatgtgcacgcgcgtgcactcacttgctgttgtcttcatcgtcttcgtcgccgaagtcgaagaagctctcgtcgtccgacttcttctgacgttcgggaaacagtatgcgcgtcctgcgttcgagaatgatggcaatgagcaggaacaggacgagcccaacgccaacgatgatgagtatgccggcggtgatgccgaaggtgtcgaaatactggtcgatcatgttgcaggccgctcctttgcgcgttgtaccgtagtcggaatactaccgcaaacaagacattattgaaccgcataaccccgcgcgcggtatacttgctggcattaatcaccaaaagcacggtttttcgctctggaggaaagatgctcgacattcgctttatccgcgagaaccccgatgtcatcgaggccgctctcgcacaccgccacgcaaagtgggactacgacggattcaaagaactcgactccttccggcgcgacctgatccaaaagaccgaatccctcaaggcggagcgcaacacggcgtccaagcagatcggcgccatgatgaaggaggggcagaaggacgaggcggaagccgccaaggcccgcatgcgcgaggtcggcgacgaaatcgagagcctcgactcccagctcaaggacgttgaggagaagctcaaggcgctcacctactccatccccaacatcccgggcgagaactgcccgatcggcgacgacgagaacgacaaccccgaggtgcgccgctggggcaccccgcgcgagttcgacttcgagatgaagccccactgggacctcggccccgagctcggcatcatcgacttcaagcgcggcgtcaaacttgcagagagccgcttctacgtgctgcgcggcgcaggcgcccgcctcgagcgcgcgctcatctcgttcatgctcaacacgcacaccgaaaagggcatgcaggagtactgggtccccgccatcgccaaccgcgacacgctcatcggcaccggccagctacccaagttcgaagacgacctgtacaagacgacgcagggcttctacctcatcccgacggccgaggtgcagctcaccaacctgcaccgtgacgagtgcctcgacggcgacacgctgccgcgccgctactgcgcgttcaccccgtgcttccgcgaagaggcgggctctgcgggccgcgacacgcgtggcatcatccgcgtgcaccagttcagcaaggtcgagatggtccgcttcgcgacgcccgaagagtccgacaacgagctcgaggacatgacgcgctgcgccgaggacatcctgcagaagctcgagctgccgtaccgcgtcatcaacctgtgcacgggcgacatcgggttttctgcccgccagacctacgacctcgaggtgtggctgccgagctacaacagctacaaggagatctcgagctgctcgaactgcggcgacttccaggcgcgtcgcgccaacatcaagtacaccgacaaggacggcaagcgcaggttcctgcacacgctcaacggctctggcctggcggtcggacgcacgatggcggctgtaatcgagaactaccagaacgccgacggcacggtaaccgtccccgaggtgctgcgtccctacatgggctgcgacgtcatcaagcccgagtagcgcgcgccgcctctccccacgcgggggacgtgggatgtgtggcagtgccacggttcccgcgcagaaagcaccggatgtgtggcagtgccacgcttctcgcgcaggacgcgtgggatttgtggcagtgccacgcttctcgcgcaaggcgcggggtccacgcggggaatgcgaaaactgcgcagaaaattcttgtcgacaactcgcgcaagtatgctagtattcgtttccgcacctagtagtgttcatgcgggcgtggcggaacggcagacgcgctggcttcaggtgccagtgggggttacccccgtggaggttcaaatcctctcgcccgcaccattcgacatgcaaaggccaattcaatcgaattggccttttttgttgcactgattcaacattcgcctgcagctaatgcgtataattccaccagcatctttgcaaaacgcacacgaaacgaagaaagagacaagatgcagggcccgctcatactgaaccgctaccggcgtctcgagtacaaaggcaccggcgcaagcggcatggtcgagatttgctgggacacgcgtatccagcgccgcgtggccataaagcgcatgcccgcatccatcaccgagcacgaaggcaccctgcccgccggcctcaaagaggcgcgcaccggggcgatgctttcccatccgtccatcgtgaacgtgctcgactttgacgtcgagggcgactacgcctacctcatcatggaggcgatcgacggcccaagcttaggcgagctcatcgacaagacgcccgcgggcgacatggacctcgacgtcgcggcctcggttgcgacctccataggccaggcgctcgattttgcccacgaaaaccaagtgctccacctcgacatcaagcccgacaacatcttgatcacccgcactggcgtcacgaaggtgagcgacttcggcatcgccgagctcgccgacgcacaggggttcggcgaggcgagcggcggcacgatcggctacatgccgcccgagcagatgcgcggcgagccgctcgatcagcgctgcgacgagtttgcctatgccgccgtcgtctacgagacgctcaccggccgcaaccccttcgtcgcgcccacgatcgacgcgagcatcaagctcatcgagcaagggggctttgccaccccctcggaactccgcgacgacgtggaccccgagctcgacgaggtgctgctcaccgccctctcgacacagcgcgaggatcgctacgagaccatctatgacttcatgaacgctctgctgcccctgctgggagacgccgcgcgcggcacggcaaagctccgcgccgccctgaaggtcgccgacgacgagcctgcccgggagcaggcctcttcgcgcagggacctctggaatacgatccctccccgcgtgcgcctcatcgcgagccgtgccctcaccgcagcactctgctgggtgccctgtgccctcggcctgtccgccttcgacgccctcgacacgccgacggcgcttgtcgcctcgctgctcgctgcggcggcgggagcggcaaaacccgtctttggcggagtgctcgcgcttgtcgtgttgtcgatcggcatgatctgcagcccgcacgccggccccgccgcagggatcgcattgctggccgtgaccgcagcgtggaccgtgtttcttgcccgcgagggcataggcaacgacgagcaggacgccaacgtgaactgcactctgctcgcgctgccgctcagcatggcgggattcacgccgcttgcctggctcgtcgcgggcttttgcctgcccgcgcggcgcgcggtggtcgcctctgcagtcgcttcgctctgttgcctgctgctttccattgccactggcacgggcacgctcgcgcgcagcggtctttcgttcgccggaaacggcccgtccgcggcaccgatgagcctgctcgcgtccgctggcacttgggttatgatagtgggttgtgttttgtcgacatttttgatgtccgcgctctgttcgcgagcgacacgggtatcatcaatcattggctccatcgcagcttctgctgtgctggtgacgacgcaagtgatagcacaatggctcgcgtctggcagctgggcagctccagacccgacgtggctcattggagatatagccgcggtcatcgtcatgatcgtggccggggcgctcggtgctccctatcgtgacaaaggagaagagtaagagatgggatttttctctcgattcgaagacagggccgagggcatgatcgaaggcagctccggacgtggcggcatcgagcccgtcaagctcgcgaagcgcgccgcaaaggagatggagcgcgagaagatggtcggcgtcggccacgagtacgcgcccaccctctacaacgtcctcgtctcccccgatgacgacgagcgcatgagcggctactacccctcgctcgccggcgaagtcgagacctacctcaccagcgccgccgaccgcggcggcctcgtgttcgactgcccgccgctcgtccgcttcatcgtggacgacggcctcaagcgcggcaagttcgacatcatcgccgagagcgtgagccccgccatcatcagcgagctccgccacgaggagatggtgcactacggcatcgaggaagacatcccgatggccaactcctacggctacgaggacagcgcccgcggctatgaggagcccgccgcgtacgagcagccctcctacgagcaggacccctacgggcagcccgcatacgacgcgcgcccgcttacgcccgagcccgaacccgagccctaccgccgcgaagagcccgccgcatacgagccgcaccccgctgccgagcccgcacgcgtctacccgcccaccaacgcgcccgagcccgagccgtacacgcccccgcaggcagcccaggacatcaactccgagcgcacgacggtcatcgcgacgccgcagctgcacgccgcgctgttcaactacacgacgcagcagcacacggtgctcaccaaggagcgcacgatcatcggccgcgagaagagctgcgacgtggtcatccccgatccgagcgtctcgaggcgccacgccgagattctccacaacgaatccggctggctcatccgcgacaccggctccacgaacggcctctccgtcaacggggtcgccactgcccaggcgcgcgtctacaacggcgacgtgatcaacctcggcagaaccaagcttgagttccaggaggactagcggtggtcgatcagctcctgctcataggccgactcgtctttgtcgcgctgctctacctgttcctgttcttcgtggtcaagacgggagtcggcctggtcaagggccagaacaagaaaatcaagtcgtggactgccaccgtcgagaagggcccgcaggccctgcgcggcgtgcggctcaccatcgccgggccggtcgtcatcgggcgcgcgcccggtgccgacatcgtgatcccgaccgattacgtatccgcgcgccacgcgcgcttcaccctcatgggcacgagcctcatgatcgaggacctcggctcaaccaacggcaccctgctcaacgggcgccccgtcacgcaacccaccgcatgctcgcccggtgacatcatcacggtcggcaatgtggacatcaagattggtcgttcatgagcgaaacagaacagaagttcaagattcccgaagtctacggctcgctgacagacgtcggcaacgtgcgcgagcataacgaggacagcatgctcgtcgcgcctccgctgttcgtggtcgccgacggcatgggcgggcacgaggcaggcgaggtggcaagcgccatcgccgtcgagacgatgcgcgagctcgccccgcatacgcccgacgccgacgcgctcgcagaagccgtcaggcaggcaaacgccgccgtgctcaaaggcgccgaagacggccgtggccgcccgggcatgggcacgaccatgaccgcagccctcgtcttcgacgacgaggtaatcgtcgcccaggtgggcgattcgcgcgcctacctgctgcacaacgggtcgctcaagcaggtcacgcgcgaccactcgctcgtggcagacctcatcgagcagggccgcatcaccgaggaagaagcccgctaccatccacagcgctccgtgatcacgcgtgcgctcggctccgacgcaaacatggatcccgacatctacacgttccgcgcggagaagggcgacgtgctgatgctgtgctccgacggcctgtcgagcatgatcaccgacgacgtcatcaaagagacgatgctcgagcatcccctgcccgacgagatgtgcaacgcgctcgtgcgcgaggcacttgccgccggcggcctggacaacgtcaccgtcgtcgtggtggagccgcttttggcaagcgacgaagaggcgggcgattccgagccgacttccgactttgcccccatcgagcatgaggagcacgttgcccccaaggtcaacaccgtcaacgtggccgcccccgtgcccaaggcgtccatgcgcccgcgcgagatcgtcgtcggggcccccgaagtagacaccgaggcatccgccgacgccgtgaagagcgcggcacgcaagcgccgaaagggacgcaaggcccccatcatctgggccatcgtgttcgtggcgatcatcgtcggcgcttgcgcgggcttctactcgtatgcccagaactcctactacctcatctccgaaaacgaccacgtgagcatctaccgcggcctgccgggcaatatcggcggcctgtcgttctcgtggctcgaggagcagaccgacatcgacacgtacaagctcgcgcccaccaccgcaagccgtctcgagcacggcatctcggtgaactcgctcgaggaggcgcagtcgaccatcgaggactaccgcaagaccatcgcggggaccacgactcctgccgcacctacgacgacaaccgattccaacacggcacccgacagcgcgaccacgtccgacgcgggcacgtcggatgcccagtaggagattcccttgaggtccagacgcgccacagaactctggctcttgatagcggcggcgcccgtgttgctgctgctgttcttgatgctgctcgtcaactccaacaccacgctcacgttcaactcgtttgccgtgccgatcggcctggtcgtgagctttttcgtggcgcatgtcgcgctgcgcaagtttgcccccaacgccgacccggcgctgcttcccatcgccttcctgctgtgcggcataggcatctgctttgtcctgcgcctgtcacccgacacagcgggcaagcagatcatctggctgttcgccggcatcgcgctcatggtcgcgaccatcatcctcgtgccctcgatcgagcgcatcggccgctggaagtacacgtgcctgctgttcggcctcatcctgctcatcctgccgatcctccccttcatcggcgccgagtacaacggctcgcgcatctggctgtccatcgccggcatctccttccagccgggcgagatcgcgaagatcttgatcgtcttgttcttggccgcctacctggcagacaaccgcgagctgctctcgacgctcaaccgcagcaggatcggcatcaagtaccccaacttcagggcgctgctgccgctgctcgtcatgtgggtcatcgccctgctcgtcgtcatcttcgagcgcgacctcggctcggcactgctgctgttcggcgtctttcttgtcatgctctacgcctgcacggggcgcgtgttctacgtcatcgtcggcgtcttgctcgtcgcggtcggcggcacgggcctctactacgtgttcagccacgtgcagacgcgcatcgccatctggcgcgacccctttgccgatccgggcggttcgggctaccagctcgtgcagtccctctactcgctggctgacggtggcctgtttggcgtcggcatcggccgcggcatgcccaccaccatccccgaggtctcgagcgacttcatcttcagcgccatcggcgaggagatgggcctgctcggcgcatcgggcgtcatcatcttgttcatgctcttcgccgtacgtggcttcctcatcgccgcccgcgcgaaaagcgacatggcagccttcacggccgttggcctgacgacgtccatcagcttccaggcgttcatcatcatcggcggcgtgacggggttcatccccctcacgggtttgaccttgccgttcatgagccaaggtggttcgtcgctgctgtcgagcttcatcatcgtcggcctgctcttgtgcgccggcaacgagggcaccggcctcgagaccgagatgacctcgacctcgcgctggaacaggctcgagaacaccggcgttctcggccgcaccgcgctcggacgccgcctcaccttcatcatcgccttctttgccatcctgttcgccctgctcatcgccaacctgacctacatccaggtcttcagggccgacgagctccagaacatgggtggcaacaaccacacgctgcaaaagatctcggagcaggaacgcggtgcgatcctgacatcggacaacgtcgtgctggccaagtcggaagagcagcccgacggcacctacacccgtgtgtacccgcagggctcgctcgcggcgcaggcggtcggctacaactcgcagcagtacggcagcgcaggcgtcgagtccaccatgggcgcgacactcgccggcaacgagcagttcgagtcgatccaagacgccatccgctactactcgggcgccaaggtcgacggcaacgacgtcaccctgaccctcgactcgaaggtgcagaaggccgccgagtcggcgctgtccggcaagacgggtgcctgcgtcgtgctcgacaccgccaccggcgccgtcctcgcccaggcatcgtcacccacctacaacctcaatgacatcgcgagcgtcatgaaggggtcgggcgaaagcggcgcactcgtcaaccgcgcgacgcagtcgctgtacgcgccgggctccacgttcaaagtcgtcaccttgggcgcggcactcgacaccgacacggtcagcgcgtccgacgtctaccgcgcccccagctcgatagagatcggcaacgccaagatcaccaactaccacaacgagtcctttggcgacatcacggtcgaagacgcgacggcgcactccgtcaacacggtgttcgcgcagatcgccgacaaactcggctcgcagacgctcgtcagctactccgagaagttcggcttcaacgacgccaacctcgcgcaggacttcagcgtgaagacctccctcatgcccgacccgaacgagatgaccgaatgggagaccgcgtgggcaggtgtcggccagcccgtcggcgagcacgcaagccccgccggcccgcagaccaccgtcaccgagatggccgtcacaatggccgccatctccaacggaggcgtcgccatgcacccctacatcgtgagcaaggtctcgtcgtcttcgggcgccaccatctcgcagaccgcgccctccatcctcggccaggccatctcgagctccaccgccgcgcgcgagcaggagatcttgaagagcgtcgtcgactacggcagcggcacggcagccaacatcgacggggccaccgtcatcggcaagaccggcaccgccgagaccgacaagcagaaatccgacgcctggttcgtgggcaccgccacggcaggcggcaagagcgtgaccatcgcggttctggtcgagcagggcgacagcggcggcggcgtcgcggcgccgctcgcgcacgacatcctcaagaccgcgcttgagcggctcgggggcctgtaggtgaaggcaaggagttcaatttcgttttttatcgataatgttgaacacggggaacacgacattggtagaattgctcaatagatgtaaccacagagcaaacgcagaacatacatcgggtaagcgacaggagtagcagcgtgacaaatcgaacattcggaaaccggtatcaggttaccgagaaaatcggcatgggcggaatggctgaggttttcaaagccaccgattcgacgcttggaagaacggtcgcggtaaaggtcatgctgccgcaatacgctgcagacgccaacttcgcggcccggttcaggcaggaggcccaggcggcggccaacctgagcagcccctacatcgtcaacatctacgactggggcaaagaccgcgactcctactacatcgtcatggaatacgtccgcggcaccgacctcaagaccgccatccagcaacgcggcaaaatccacccgcgcaaggtggccgagatcggctcgcaggtgtgctctgccctgtccgtcgcgcacggctacgacatcatccaccgcgacatcaagtccgcgaacatcatggtccaggccgacggcaatgtgaaggtcatggacttcggcatcgcgcaggccggccgccccggcatgacgaccgattcctccgtgctcggaacggcgcactacgtgagccccgagcaggcgcagggcaagaagctcacgcccgcgagcgacctgtactcgctgggcgtcgtcatgtacgaggccgcaaccggccagttgcccttcgacgggcccgacgtcgtctccgttgccatgaagcaggtcaacgaggcacccgtcccgccccgccagatcaaccccgatatcgacccgcagctcgagcgcatcatcatgcgcgctctcgagaagaaccccgagcagcgctatgcaaccgcaaacgagatgaagcgcgcaatcgacgactacctgcatggccgcgtgagccccgcagctgccgcagcagccgccccaacgcaggtgctcaacggcgctgccccctaccccgcggcgggcgcgaccacggtcatgaacccctccaacggcgtccgcacggcgggcatgcccgcagcacagggcaagaacgccgtgggcaagccgggcaagaagggccaccgcggcctcatcgccctcgtcgtcatcgtgctgctggtagcggcgggtatcggcatcgcgttcgcatcgggcgcgttctcgtcgcacgtgaccgtacccgacgtcacgggcaagacgcttgccgaggccacctccaccctcgagaagagcaacctgcagcagggcaacctgcgctacgagacaagcgactcggtcgagaaagaccacgtcatcagtcaggatcccgcgggcaactcgtctgcgcccagcggttccaaggtcaacctcgtcatctccacgggcaagaccagcgaaaacctcgtctcggtgcccaacctgatgggactcacgccgtccgaggcagagcgcgccctgtccgaggcaggcctggtcggctcgtccgagcaggaaagctccgacagctacgaggcgggcaagatcttcaagcagaacccgagttccggcacacaggtcgcctccggctccaccatcacctacacagtgtcctccggcaaagcgaccacgacggttaccgtcccgaacgtgatcggcctgagcgagagcagcgcgaaaaagacgctcgaggctgcgggcctcgtcgtcaagtcgacagtcggctccggctccgcgtcggtcggcgaaggccaggtcaacgcacagagcatcgcaagcggcacttccgtggtctcgggcaccaccatcgagatcaccatcgagcccaagaagagctcgagctcgaattctggctccagctccaactctggctcggggtctggctcgaactccggttctagctccggctcgagctcgggcagctcgtccggaagcggttcgggcagcggctcttcgtcgagcagcagctcgagcgacgataactagccagcacagcacaagacccccggcgcaatcgcccgggggtcttccttttgcccacgtctccaccctggaagtacgacagacacaatgcgaagggcggcgaccctttcggatcgccgccccatatcgtgctggctatcttcaaaacctgcgcgcgctagagctcctggaagacctcttcgaaggcttccttggcgtacgcctcgaccttctcatcgtagcggtcgtacagctccaggaacttcttgccctcttcggtgagcttggagccacgtgcgccgtagcgctcgatgagcgtgaagcccaacccctcttcgaccttcttgatcatgctccacgccttgctgtatgccatgtggaggtcttttgccgtcttgttgagggaaccgttttcctcgatgccatggagcagagtcgccgcccctttgccaaagcttggtcctttgcggtcggctgatgacgcgatcatcagtttgacctgcgggtgcaggtcctgcttctttaccatgacgagcccctatctatatgagagtattatcagccacgagtattatagtgcggtcgaataaacaacaccgcaacgaatagtgctaatcacaaaagcttaacaaagtaaccggtgtaggcagtatctttgccttatttgtcatctgaccaatgttaagatagtccgcctccacgcgcatggagacgggccactttcagcatatgtccgagctaggcgagaaacgccttgaccgcgccttccacaccggcggtatcgccgtcgataacctcggtgaagcggatcggcttgtcgtcgaggacatcgagccccgcggggatgggcgacacgcccgttgcctcgaagacgacgcggttgagctgcacgtccgaaaggcccgcgacctcctgcggcagcggctcgccggctttgatgccgttgagcgcgcggtacacgttggagccgaacttggcccagttggccgtcgacgcgacgagcatcgggtttgcgcccttgtgcgcggcagcgacgttccacgccactgccgagtgcgggtcgagtaggtacccatgcacctcgtagactgccttgatggtctcgaggcaggcctcgttgtcgacagagccgcactcgtagttctcccgcagcgcggcgaaggtctgggcgtcgacctcgaagcggcgcttctcgttgaggtcggccatccactgcgcgatttttgcctcgtcgcggcccgtgagctcgtagagctggcgctccaggttgctcgagacgaggatgtccatagaggggctcggcgtgaggatgaactcgcggtcgacgatgtcgtagacgcccgtctcgatgaagtccgtcaggacgcggttggtgttgctcgcgcagacaatcttgtcgatgggcgtgccgatctgcttggcgtaccagcacgcgaggatgttgccaaagttgcctgtggggacggtgacgtcgatggggtcgcccgccttgacctcgccgcttttgaccatgctcgcgtagctgctgatgtagtagacgacctgcgggagcaggcgcccccagttgatggagttggcggacgagagtgcgacgttgtcctgctcgaggagctggcggttgaactcgtcgtcgccgaacatacgcttgacactcgtctggcagtcgtcgaagttgccgcgcgcggcgtacacgcagacgttgtcgccttcctgcgtggccatctgcttgtactggatgtcgctcacgccgccatcggggtagaagacgacgatggaggtgtgcgcgcggttggcaaacccctgcagcgcggccttgcccgtgtcgccgctcgtcgcgacggcgatgaggtagtcgttggccgggccgcccgcggcacggagcttgtcgacgcttgccgagaagaacaccggcagacattggagcgccatgtccttgaacgcgctcgtggggccgtgccacagctcgagcacgtacatgccgtcggtcaccttcttgatgggggcgatctcgggcgtgtcgaagttgtcggcgtagatggtgcccatgagggagtcgagctcctcgtcggagaagtccacgccaaagcggcggtagaccgccgccgcgcgctgcgcgtagggcagctcgccaagcgagacgatctcgtcgagcgtcatcgtgggaaccgtctcggggacgagcaggcctccaccgggcgcgatgcccttgatcacagcctcgctgaacttgagcggttcggtcacgttgccacgcgtatctatatagcggatttccattgcagctccaagaatagacggacgagacgccatgcggcgcgtcgggtagatggtaccatttgcgtcacacttcgagcatgcgcatgaggaagaaggaagggcaaagatgccagtcaaattattgatgggcaacgaggcgatcggcctgggcgccatccacgccggcgtgaactttgtcagcggctatcccgggaccccctcgacggagattctcgagacggtggccaagaacaacggcgacggatcgatttacgtcgagtggtccacaaacgagaaggccgccctcgaggcggcggcgggagccgcctattcgggcgcgcgcgcaatggtcacgatgaagcaggtcggcctcaacgtcgcgtccgacccgctcatgacgctgtcgtatctgggcgtcgaaggcgggctcgtcatcgtggttgccgacgaccccggccccatctcgagccagaccgagcaggacacccgcgccttcgcgcgtttctccaaagtccccgtgctcgacccctcgtcgccaggcgaggcctacggcatggtgcaagacgccttcgagttgtcggagacgtaccacacgcccgtcttcctgcgcccgaccacacgcgtgtgccatgcctgcggcacggtcaagacacgtggcggcattgccgattgcggggcacagttcgcacatgccgacaagtcggacgacgacgcgatctggggcgcgcacaagccggccggcttcgtgaaggacacccagcgctgggtcgtcttcccgcgcacgagctatctcaaccacggcaaggtcgagcgccgtgcggcagagattgaaaggcacctggcagagacgggctatcgccacaaccgcatcgagatgagcggcgccggccacaagcaggcagtcaacgcctggaaggagcgcagcggcaagctacccctcggcatcgcctgcggcggcgtgagctactgctacgtcatggaagccctcgacatggcggggctttcgctgccggtcatgaaggtggcaaccccctaccccttcccagagcagcttgccgcagagttcttcgagggcgttgacgaggtcctcgtcgtcgaggagctcgaccccgtcatcgaacgcgagctcgtctttctgtgcggcaagaccggcgagcgccacgccatccacggcaagctcgacggcaccttcgcctacgccggcgagcagagcgtcgaggcgattcgcgccgcgctcgagccgctagccggccgcatgggccttgcggcgcagccgttcgagacgcccgcgtttgccg

SEQ ID NO: 1631 - DNA, 24140 bp, Unknown
  16S sequences of unknown bacteria
ccgcgggctgcaggcggctgcgcccgccgctcgcggctgccgcaaggccgggcgcgatgcccaacagcgcgcccggcgccagcagcgcccagcgcgtgccgtacagaagccccgccgcgctcacggcgcaggccagcagcgcgcaaagcgccaatgccccgcacgtccagatcgaagcgtgtctcttcacgttcctctcccctctccgatttagttttttcttctgtaagttcagtataccatgtttcgtcccggcttgacaagcctcggcgcgcggagtatactttgtatcaaatttcatacgacaggggagcttgtgcggcaggctgagaggaagtacacaacttcgacccttacacctgatttgggtaatgccaacgtaggaagacgattcgaccagccctcgcggcggagattgcctttttgcgcgcattctccgccgcgcctctgcattttccccggaaagggagaccatgctcgaaagcatgctgcaaaacgtgcgcgagcgcgcgccgctcgttcacaacatcaccaattacgtcaccgtaaacgactgcgccaacatccttctggcctgcggcgcttcgcccatcatggcggacgacccggacgacgccgaggagatcaccgcggtctgcgccgcgctgaacctgaacatcggcaccctgaatgcgcgcaccatccccgccatggagcgcgcgggccggcgcgcaaacgccctgggccaccccgttctgctggaccccgtgggcgcgggcgcctcgagcctgcgcacgaacaccgccgcgcgcctgctggacgagctgaccatcgccgcggtgcggggcaacgtctccgagatccgcgcgctgcagctgggcgcgcgggccacgcgcggcgtggacgccgccctggaggatcgcgtgaccgaggagaacctgcccgaggccatcgcctttgcgcaggccttctcccagcggacgggcgcggtggtggccatgaccggcgccatcgacgtcgtcgcggacgcggagcgcgcctacgtcatccgcaacggctgcgcgatgatggggcgcatcacgggcgcgggctgcatgctctcggccatgacggcggcctaccttgcggcgaacccggggaacttcctggaggcctgcgccgccgcggtgtgcgccatgggcgtgtgcggcgagatcgcccgggacaagacggccgcgctcggcgcgggcaacgcgaccttccgcacccagctcatcgacgcgatctgcaacctcacccccgaaggacttcaggagcgtgcacgctatgaattgcgataagaacagccttctcctctacgcggtgacggaccgcgcctggctccagccgggcgagacgctccttggccgcgtgcgcgacgccatcgagggcggcgcgacgttcgtgcagctgcgcgaaaaggacctggaccccgccgccttcctcgccgagggccgggagatcggcgcgctctgccgcgaaatgggcgttccctttgtcgtggacgacgacgtggacctggcgctcgcctgcggcgcggacggcgcgcacgtgggccagagcgacctcgccgcgggcgaggcccgcaagaagctcggcccggacaagatcctgggcgtctcggcgcagaccgtggagcaggccctggccgccgagcgcgcgggcgcggactacctgggcgtgggcgcggtgttttccacctccacgaagctggacgcctgcgaggtcccgctcgagacgctgcgcgcgatctgcgccgcggtgcacatccccgtcgtggccatcggcggcatcggcgcgcagaacgtcgccgcgctcgccggcacggggatcgcgggcatcgcggtggtctcggcgctgtttgcagccaaggacacgcgccgggcggctgaggagctctccgccctggcgcgcaaggcggtgaacgcatgagcctgcccgcccccttccgctgctcgatcttcgacatggacgggacggtcctggactccatgcccgtctgggacaccctgggcgaggactacctccgcagcctgggccggcccgtgccgcccgggctgcgcggggtccttgcgcccctctccatgcagcagaccgcgagctacctgatggaccgctgcggcgtccccggcccggccgagcggatcatcgacgacatcaacgcgctcgtggcggacttctaccggaacaccgcgcccgcaaagcccggcgcggcggagctgctctcctgcctgcgggcgcgcggcgtgcgcctggcgctcgccacggccacggaccggccccttgccgaggcggccctgcggcgcacgggccttctgccctacttctcgtgcctgctgacctgttcggaggtcggcgcgggcaaggaccggccggacatctacttcgcggcccttgcggcgctttccgccaagcgggaggagacgctggtctttgaggacgcggtgcacgccatcgagacggccaaggccgcgggctttgccgtggcggccgtgcgcgacgcgagcatggcggcgcaggcgccccgcatccgggccctcgcggacctgtatctggacgcgctgagcgactttcccctgcgctaggcggcgctttccctgcaaaaaacgcgggtttcccttgcgttcccggcggcgcaatggtatgatgtagatactggaatcgtgcgccggcggggcggatgcgccgcaatacacttgggccggccgcgtggaggacatcgtgaaagccaacaacaccgacaaggaaacccgattcgataccctgacggacctgggcctgcgcccggtctcgcaggtcttcaaccaaatccgctactggagcgcgctggacgaccccgacgaggagaagtgggactacctctcccactacacccggaccgagcgccgggagatgggcctgggcgtgggcgggttcaacgcgcggccgctgatcgtctgcgcgctgatcctgctgctgctcatcggcgtgggcacgggcggctacctggcctggccgtacctgagccagcagttcagcgcccttggcgcggccagcggcgcgcagatggaggtcgtcaccggctacatggtccgcctcggctcgcgcgacctgggcgtggtggaggaccgcgcgggcatggagaacttcgtcagctcctggctggcgcagaagaacgccgccgcccaggagggcatcgtctaccgcatcgcgcaggacatcacctacgaagaggtccgcatcgacgcggcctactgcgcaaccctcgaagaggtcgaaaacgccttcgtcaagcacgccacgctggacctggcctgattccggcaagcgcaaaaacccccaatggaagggaagtcctcttccattgggggttttcttttccgtttcgtccgccggggcgggagcgctcaaccccgcagcgcgcgctcgagcacgcggtggaccttttcctttgtggccacgccctcgtggaccttgtcccggccgacgtagtaggtggggacgtagtagtaatcgtagcggtcggcgatgtccgggtgttccgtctcgtcgatgatctccagctcgatgtcgttgtactccgggtactcctgcatcaactcttccatccaccggtgcgcggcgcggcaataggggcaacccgccatggtgaacattgtgaccttctgcatccggccctctcctttctgtacaaatcgcatgccttctacttgtgccggcggcggcagagcgcaaggccgccaaagccgctgatgaccgccatgtagaagcccagctcgtaggtaaagcccgtgttgaccggcgcaaacatggtgacctccatgcccacgagctccaggatcagcgagatcggggcaaaccagccgtgcacgacgccgttgaggaacccggccgggtcctcgggcgtgtagacggcgatgcccggcaggcatccgctcagcaccagcggcagcagcagcacgagcagcgccgccagcgcgatcttccgcgcccgtttcatggggaaactcccccctttccactcaaaagaggtgggtaaagtccagcgtggcgaagtaatccgccggggtctcggccctgcggatcagctccacctcgccgttggcgtgcaggagcagctccgccgagcgcagcttgccgttgtagttatagcccatggaaaagccgtgcgcgcccgtgtcgtggatggccaccaggtcgccgatctcgaccttgggcagcgcgcggtccacggcgaacttgtcgttgttctcgcacagggagcccgtgacgtcgtagacgtggtcgcagggcgcgtcctccttgcccaggaccgtgatgtggtggtacgcgccgtacatggccgggcgcatgaggttggccgcgcaggcgtccagtcccacgtactgcttgtacgtgttcttgatgtgcagcacgcgggagacgagggagccgtaggggccggtcatgtagcggccaagctcggtcttgatggccacgtggtcgaggcccgcgggcacgaggatcttctcgtactgcgcgcgcacgccgcggccgatggccaggatgtccgccggctcctcctccgggcggtaggggatgcccacgccgccggacaggttcacaaacgcgatctccacgcccagctcccggtgcaggtccgccgccagctggaacagctccgcggcaaggctcgggtagtaggcgttgtccgtcgtgttggaggcgaggaacgcgtgcaggccgaagcgctttgcgccgtaggcgcgcaggagcttcaccccttcgaagatctgcggccgggtcatgccgtacttggcgtcgccggggttgcccatgatcgtgttgcccaggcggaactcgccgccggggttgtagcgcaggcagaccgtctcggggatgccgccgttgtccttcaggaagtcgatgtgggaaaagtcgtccaggttgatgagcgcgcccaggcggcgggcgtacgcgaactcctcggccggcgtgtcgttggaggagaacatgatgtcctcgcccacgatcccgagccgctcgcagagcatgagctcggtcaggctcgagcagtccatgccgcagccctggtcgtgcagcaggcggagaatggccgggttcgggcaggccttgaccgcataatattccttataccccgcgttccactggaaggcgcgctgcaggcgctgcgccgcggcgacgatgcccgcctcgtcgtagatgtggaagggcgtgggatgcgtctttgcgatctcctcgatcttagctttgtcatagggaagcgtcttcatcgctggaaattcctccttgcgcgcgcgagtcttgtcgtcccctattttacacgaaatcgaggcgcacgggcgcatttttaccgtcttttaatacaagatatgcaaaaactgtgcatacgcgcttcccgctcagaaggcccaaaccccgtcctcaaacacgggcgcgcggctgccgtccttccggattccctcgatgcgcaggtcgcgcgtgccgaccatgaagtccacgtgcacgagggactggttcacgcccgcctccagcagcgcggcctcctccatcgcctcgcccccgcgcacgcactcggaatacccgcgccccagcgcaaagtggcaggccgcgttctcgtcaaagagcgtgttgtaaaagagcaggttcatccccgcgatgggcgaatccgcgggcaggagcgcgatctcgcccaggcggcgcgcgccggcgtccgtgttcaggatggaggcgagcgtctccttccccgcgcgggcgtcaaagtccacgacctgcccgtctgcaaacgtgagcgcaatgccctcgacgcggctgccgccgtgggacagggggagcgaggcgaccagccggccctcggcccggtcgcggtgcggcgcgcagaagacctcctcggtgggcatgttcgggatgaaggcgcggccgtccgtcgtccaggacctgcccccggcccagttctgcccctcgggcatgcccacggtgaagtccgtgcccaggccgctctcgtagtggaaggccgcaaactgctgcgcgttgagccattcggcgcggcgggcgaggttctgctggtgggcctgccaggctgcatccgggtccggcgcgtccgcgcgcgtggccgcgaggatcgcccgccagagggcggcctgcgcttcctcccccgcaaggttcgggaacacgcgctgcgcccaggccctgcccgggtaggccgccgccagccagggggaaacgcccgtcatccggcagcgctgcgcctccttcgtcgcggcggagaccgcgttgcgccgcagcgcgatgcgcgccgggtccgcgcccgccatgccgaaggggtcctcgctgaacaggcgcagatacgcgcagcccgcgcgcgagggcgcgttgtaccgctccgcctcccagggcggcagcttcccgaggttctcctcgtcctggtagagcaggcgcgcgcggtcgcaggcctcgttcgaccagttgcactgcacgtcggccgcgcccatctggtaggcctgcgccgcgagcaccgccaccagcggcgcggcctccgtgtcggcgttgaggagcagcgtctgccccttttgcaggtccagcccggtcttgagcagcaggcgcgcatacgtttccattcgttccatctcgctctctcctttgcaaaaaacgctcttccaagagtatagcacaggccggggaatctgcgctgcaaaaaaattttggaaaagcgcttgacaaatccggccgcaaggtgtaagataaatatcgtcgtcgagagatcggcagacagaagtatcgcggggtagagcagtttggcagctcgtcgggctcataacccggaggtcgtgaggttcaaatcccacccccgcaaccatttggcggcgtagctcagttggccagagcattcggttcatacccgaagtgtcagcagttcaaatctgttcgccgctaccaggaaaagcccgagcacgttcgggcttttgtcgtattcattctttgttttgccaattcggacgtccgcagcacaaaaacctgttgactttccggccgcaacttggtatactatccaagtcgcaggtcgcggcgatggggatggaccaaagtcctacacgcggagagatgttcgagtggtttatggagctggtcttgaaaaccagtgatgccgcaaggcaccgggggttcgaatccctctctctccgccattttctgcgaagcagacggcgatctggagaagtacccaagaggccgaaggggctcccctgctaagggagtaggacgggataccgtcgcccgggttcaaatcccggcttctccgccagatctcccgagaatccccggattctcgggagaatttttttcctctctccatttccctgcccttgcaggggtgatccgttaaattgtgagagttccgagaggggattcatttttttccccgcagaagcgggggttgcgcggcgcacgcggatttccgggagcgccgcgctttttttgcgccctcctccgttgcagacgcccgcgcttctgcacccatttcccgtcccgcgcataggataaagggcgggagatttcctttccctgacatcccccgcgcataggagggggcaaccatgggtgtaaccagcacaagcaagcaggtcaacctggagcgcatcggctgcgacggcacgctgcaagtgaccctcgcgctctcggcctctctggatatcgtcagcaaccccacggacatcgtcctgaccctggaccggtccgacagcctcgagggcgcgccggacgccatcggctccggcagccggctcggcatcgtcagcttcaaccagaccgccaccgcggacacgcagctgatcacctccgttgcggcgcgcaaggacgcggccgacgcgctggatgcctccggctcgaccaaccacgcggccgccttttccgcggcgatgcagctctttgacccgcagtccgcgaacgccaaggtgatcgtcctgttcaccgacggcaagaccacggccggcccgccccctgcgcccgttgccgcggcggcgcgcgccgaggggatcatcctctactgcatcggcctgatcggctccgacggcatcgacgtcagcgtgctcaacgactaggccaccgatccggacgcctcgcacgtggccgtcaccccggacgccgcggacccggaggacctgttccgcgacctggcggccaacatctccaagaccggcgcgacggacatcgtcatcgacgaggtggtcagcgacgacttccagatcgccagcatgtcgccgcccaccaagggcacggcggagatgcagagttccaccgcgctgcagtggaagatccccgagctgggcgtcaccgccaacgagggcgcatctttcagttcgtcatccagcacacggccaacacctcgggcctgaagctcgtcaacgagtccctgacctattccgacaacgagggcaacctcgtggccttccccacgccctcggtggaggtggactgcggaacggccctgccccgtgccggtggacttctcgatcgagggccgcgacgactttgcggtctttgacgcgggcgacgtgcgcctggagtccctgggccgcatcctggagctgaacttcacggtcaagcgcgtctgcccgggcaagcgcgtggccctgggcgttctgctctccgaggtcggcgagaacggcaccgagtatccccgcggcataaaggccctcaccctgcccgcgcacaacgccccctcttgccgggacatccgggtcaagtgcgtgcgcttcgtgctgccggaggacctgagcgctgtcgaggaggagccgggctgcatgtgccgggagcgctccttccgcgtgcgcacgatcgcgcatcctgtggactacggcttccgctgctgcgaggccgaccccacgtaagcaaaacagccgcttcccccttttccccggagggccgcccccctccggggctttttgtgcgaaaaaaacgatttgcgcgccgaacgatgctggtcaagcgccgcaaaatccgctaagatggaggggaaaagccgcggcgcagcgccgcggggaaaggagtcccccctcaaaatgtgcgcagcagaatccacccccttttcctcggccacgcgccgcatcgcggggtttgccgtgcggccgggcctgttccgcgtgcccggcgccacgcccgtgcccggcggcgtcagcttcaccatccagtccctgtacgcgacgggctgcgagctctgcctcttccgccggcgcgaggcggagccctatgccgtcctccccttcccggaggactgccgcatcggccacaccttctccatgatcgtcttcgggctggacatcgaggacacggagtacgcctaccggatggacgggccgcgcgacccggcccgcggcatgctcttcgacaagacccgctgcctcctggacccctacgcccgggccgtcacgggccagagcgtctggggcgcccagcgcatccccggctcctaccgcgcgcgcgtggtgcgcgacgcttttgactgggcgggcttccgcgaccggcatgtgccgtttcaggacctggtgatctacgagctgcacgtgcgcggcttcacgcagcacgcaagctccggcgtgcgcagccccggcaccttcgcgggcctgatggagaagatcccgtacctggtggacctgggggtcaacgccgtggagctgatgcccatcttcgagttcgacgagatggccgaccgccgggaaatcgacgggcgcgagctgctcaactactggggctacaacacggtctgcttctttgcgcccaacacgagctataccgccgcggccgagcccgggcgcgagggcagcgagctcaaggccctcatccgggagctgaacgcccacggcatcgacgtgatcctggacgtggtgctcaaccacacggccgagggcgacgagcgcggccccttcttctgcttcaagggcctggacaacaacatctactacatgctcacgcccgacggaaagtactacaacttctcgggcgtgggcaacaccctgaactgcaaccacccccttgtgcggtccttcatcctggactgcctgcgccactgggtggtggagtaccgcgtggacgggttccggttcgacctggcctccatcctcggccgggacgaggacggccggcccctctccgagccgccgctgctggagagcctggcctttgacccgatcctcggccacgtcaagctcatcgccgaggcctgggacgcgggcgggctctaccaggtcggctccttccccgcctggaaccgctgggccgagtggaacggcaagtaccgcgacgacatgcgccgcttcctcaagggcgacgcgggcctgtccgaggcggcgctgctgcgcctgagcggctcgcccgacctctacccgccggaccggcggcagaacgcctccgtcaacttcctgacctgccacgacggcttcacgctccacgacctgtacgcctacaacgagaagcacaaccaggccaacggctggggcaacaccgacggcgcgaacgacaacaacagctggaactgcggcgcagagggggagacggacgacccgaacgtcctcaccctgcgcgagcggatgcagcgcaacgcctttgcggtcctgctgtgcagccgcggcgcggcgatgttcctggccggggacgagttcgggaactcccagtttggcaacaacaacgcctactgccaggacaacgagatctcctggctgaactgggaggaccttgcgcgcaaccgcggcctgcacgactttgtgcggtcgatgatcgccctgcgcaaggcgcaccccgtgctgcgcggccggaccgcgccggcgcactgcggctggccggacgtctccttccacaacgggacggcctggaacgcccgcacggagtttgacgcgcggcagatcggcgtgctcttttgcggccgcaacgcgcaggacagcgcggacgacctggtcctgctcgcggtcaacgcccactgggaggcgcacgaccagcacctgcccccgccgcccgccggccaccggtggcgcctggcgatgcacacggcctgcgccgatccctttcgcccggacacgccctttgacggcgcggttctgcgcgtggacgcgcgctccgtcgcggtcttcgtctgcgaaccggcgcgttgacgcgcgctgccggggctggtagaatcgaggaaaacgcgcaggccgccgcgcaaaggggccttgcgcgagaggaggcggagcccattggctgtgctcatcatcctgcgcgggaactccggcagcggaaagaccgcgctctccaagcgcctgcaggaggcgttcggcccgaacaccatgcggatttcgcacgacacggtgcgcatggagatcctcaacgtccggggcgaggaaggggtccggcgctcgacgcccctgctgatcgagctgctgcggtatggccgcgcgcactcggcggtgacgatcctggagggaatcctcccctcctccgcctacgcgcccctgttcgcggcggcggccgatctcttcggcgcggagaacctcttcgcctactactacgaccttccctttgccgagacgctggcccgccacgcgaccaagccgaaccgcgcggacttcggcgaggcggagatgcggcgctggtggcaggggcgggacctggccgcctccctgcgggaaacggtcttcggcccggaactcagcctggaggaggcggccgcgcaggtgctgcgcgacgtgcgcggcgaataaaaaacgcgcccgaagaatccctcggattcttcgggcgcgttttggcggcatcgggtgggggaagcggcttacgcctcctgggacttgaggtagtcgatgcagatcttggcctcggtcaggccgtcgggctgcagggtctcgctctccacgaccatggggatgcccatctccacggccttcttgtagaccgcggcgaccggcgcggtgcccaggcccaggggcttgccctcgcggttggccaggccgtccttgatgtggatgaccgggacgcgggccttgagggtctccatcatctgcacgggatccttgcccgcggcgtaggcccagtaggtgtcgatctccagggccacattcgtgcgggcgacgatctcgtcgtagatgatctggccgtcctcgttgggcttgaactcgtggtcgtggttgtggtagccgagcgtgatgccctcggccgcgagcttgggctggaactcgttcatcatgtcgatgaaggcgtcgagcttggccttggtggtcaggtccgcgccgggcacgatgatgcgggtgttgccgatggccttgtggtaggcgagggtctcctcgtagtgctcggcgatctcctgccagcccgtgtgcgtgccggagaccttcagtccgtacttgtcgagcatggccttgatctcgtctgcggggataccgaagaacccggcgaactccacgaacttatatcccatctccgccagcgccttgagcgcgccgtccatgttcttttcggtgatatcgcgcacgctgtacatctggattccgtattccatgaaaaggtcctcctttttttgcaggtagagacggggccggggcagcgggcacaaagcgcccgcgctccgaccccgcgaatgcggcagattgtctgcttacttgttgaagtagaagggctcgccggtcttggcggaggtgtagatggcctccaggatctcggacacgacgcaggcctgctcgggcaggacgaccgggtcggtgtcgttgtagagggcctcgtaccagcggcgctgctcggtgatgggcgcggtctcggccacgccgtcgtagaacgcgacgccgccggccttcatgtcgggatggatgtcgaccaggcggccgaactcgtccttgttgatggtcacgccgttcttaatctgcgcgcccgccttggaaccgcagatcatgacgcttccctcgggaacgggctcgcaggtgttgagggcccaggtcgccttgaggatgatggtcgcgccgttctccatgacgatgaagccgaaggccgcatcctccatggtgtgctgcttctcgtcccaggggccccaggggttggcctggtcgggattggtcagcttcttgtaggtggtgccgaccgccatgcgcggcttgtagttgttgagcaggtagagcgtcaggtccagggagtgggtgccgatgtcgatcaggggaccgccgccctgctcgtactcgttgaggaacacgccccagttcggcgtgccgcggcggcgaaccgcaaaggcctcggcgtagtacatgtcgcccaggtccccgcgctcgatgaccttcttgacgtactgggcctccgccttgtggcggtgctggtagccgattgtcagttttttgccggtctccttggcggcggcgaccatgcggcgggcgtcggccgcgctcttggccatgggcttttcgcacatgacgtgcttgccggcgtgcatggcgtcgatggagatgtccgcgtgggagcggttgggcgtgcagacgtgcacgacgtcgatctccggatcggcgagcagctccttgtagtcggtgtagaccttggcgccgggcacgccatattccttggcggccttgacggcgcgctcctcgatcaggtcgcagaaggcgaccatgtcggccatgttgacggccttgatggagggcatgtgcttgccgttggcgatgccgccgcagccgatgatgccgaccttgagtctcttcttgtccatttttttcaaccatcctttccaaaggagttgtgttggtaaattcatgatagcatatcgcgaaaaaaagtgctatcatattctcgcagcaaaatgtcaattttttgcgcggaggggaagagcatggaggtttatcgcgaggcgcgccggccgcccgaggacgtcgagaatctgttcgaatgccagctgcagtccacctttgggtgcgagacggtcgtgcacccgcacgtgcacgagcagttcgaggtgctctactgccgcaagggcgggttcgagctgttctccggcggggcgctgacgcccttcggcccgggggacatggtgctcatcgaccccaacgaggtccaccacacgcgttcctgcaccccgggggaaaacgagtaccaggtcgtcaagttcgcgccggaggccctgctctatgccgagcacccggtctacgagatgaagctgctgctgccctacctctggctcggggcgggggcgcaggcgggcgcgcagcgccgcaagcgctttgagcgcgcgctgctcgccgcccagggcgtcgaccgcctgctggacgacatcctgcgcgagttcacggcccgcgacccggggtacgagatggccgtgcgcgcggacctgtgccggctgttcctgttcgtggcgcgggtcctgcgccgggcggacggcgacgcgagcctgacgaacctggacggccgcgccctgctcacgctgcaaaaggcctttgcctacatcgaccggcggctggcgctctcccccaccatggaggaggtggcggcgcactgcgggatgaagtactcctccttctcgcgcttcttccagcgctatgcgcgcaagagctttcccgagtacctgaccgaggcgcggctcaagcgcgcctgcatcctgctggccacgacggaccagacggtgacggacatcgccatgcgcgtgggcttcaccagcaccagctacttcatccagtgcttccgccgcgcccacggccagacgcccggcgccttccgccgcagcttccagagcgcgccctgaaaaaaagagggcgggccgccggggggatttcccggttgcccgccctctttgccgcgcccgcaggctgcttgcccgtcagccggaggctcagccgatgtacgcggcggagacgtacgcctcgccgccgaggtattcgatcttgtaccagccgttcagcacgtcgaggatctcgacctccgtgccgcgggacagggtgccgaggatctcgaagttcgtgcccgcgcccgcgcgcacgttcagcgtgcggcaggtgacgtgcatgtccgtcaggtccccgtcgatcttggccaggtagtccgcgctgcagtaagcggtctgatcgttgtaggtgaacttcagccagccgttctccagctcgccggagacgaccgtgccgcgggagagcgtgccgatcttagcgtagcccgtgctgccgcccaggcgcacgttcagcgtgcggcaggtgaccatgtagaggtcctcggtctcctcgggttcctcctcgtcaacggggggcaggtagtccacgtcctcgtcgtagtccgggtagtactccggctcggtgaaggacggagtcgagggcttggagggctgctcgggttcggggatggtggtctctttgccaccctcaaccgtcgtaccatcgttgacggtgatcggggcatccgttttgttgattacggtgatacccgcgggaacatccgtgatcgccgtgccgttgtgaacggtaacagtgtccttagcattcttgacggcttcttccgccgtttcgcctacagtatacgctccgccatctgcctgcacaacaagcaggtccgcatccttgatgtatttctcgggaatgtctttcgagaaactgccgccctcgacagtggccttggaaccatcggttgtatcattggtaatctcgatatccgactcaccatttacgccagactgcaacaccgcattttcgctaacgccaatggatacaagctcattatcagagccgacttcgcggacggccgggctggtttcgctcgaaatggtgccgcccgtgatgttgattttcacctggccagcgtaagcaccattggagtcgatcgtgatcgcagaaccgctggggttgattccgtttccataggtctcgacaacctcttgatatgtaccagtcgcctgaatcgaaccgccggaaatgttgagcgcaccggacttgataccgatgggattgtctgcggtaatggtgcctcccgtgatattgagcgtgccggactgcggctggtagatggcaaaaccatcctcattcgtcgcagacacagagccgccagcaattgtaaccgtcgtgccgccccaaccctcagagccattgccagcaatcgcaaacgttgccaagcttgtcagattgccagatgtcgtgagcgtagacccttcaccacggatgaagacacagcactggttcgccgtaacagttacgccttccccgatggtcagagcaccaccttcggcaacgcggaacgcatgatagttcgcagtagtattgttattgacgatggaacccgaaccattcacggtgagattgccatttcccgttaccttaaaaatggcattcgtagcatccggatctgcggcggtaatggtatgcgtgccgatgttcaggatgattgtcttatcggtcacgttaattccggttgcttctacgttcgaaagaagctcaataactgcgccattctctgcttcttcaaaagcagccgccagtgtttcgtactgtacgtcgccgatctgtgcgacgtgcggagttctttcctccggcgtctcgttggtcgtcgtagtctcttcttccgccggggccgtctcggtcggggcaggcgtctcggtcggggcaggcgtttcgccgccttcggtggggtccgcccacgccgtcggcgacagcgcgaggaccagcagcaggctcaggcacagggccaggagcttgcgcgccatgggttgttgtttcatggactttgcacctctctttggttgtccgcgcgggtggccgcgcggcaggaaatttacgaaaatcagtatgacacatttctgaaatattttcaactcatacatatatacgcaataaataaaccgaaattttaatttcatttgtttttcctatatttttcgcctttttgaatgtgtttccattttattgcacatatgtgctcgcctttccttgataagtaaattttttctttttattttttcataaaagtaacagaataaaattaacccaggataagaaattgaatgagatcttttatcctgggtcaattttttgggggaaacgcggctagcgcacttccagcgcgaacaggtgcgcgtccggcgcgccccaggtcgccgtgggcacaaagcgcagctcccgcaccaccgcgtccagctctgcgcggtacaggcgctgccagttgttctccacctgcaggagcacgcggccgctctcgtcctccacgcggaaggcgcgcaccatggacggcggcacgaaggcgtccggcaggcccaggcggcggttgcagatcatgttccgcccgagctcgtgcggataggcggcgcggttcaggtcgctgtcaaagaccgcgcgcagctcccgcacgcgcgtgggcccggcaaaggcgaaggtcacggcctggcccagggccgcgtgcgcgccgttgtccgccccgccgatgggccgatcccagccgttgcgcaggacctcccagtccgcggccaggctgccgagccggctcgcccgccggggcaggccgggcaggtagcagtcgtcctcctgcaagaggtcctgcagcaggcggatgtgctccgcgtacacgccgcggggcgtggttccgcgctggatggccacggccgcggccgtgcccaccgcctggcccagcagcgcgcaggtcgccatgacgcgcgaggcgctcatcgccgtgtgcgtgacggagatgttccgcccggcgaagaagaggttctccacgttgcgggagtacaggcaccggtacgggatgccgaacggcgagggcgcgggatggaagatgttgggcgcgcccttggaggcaaagcccgcggggtcgtgatcgtccatggtccagccgccgtaggccacgatgtccgcaaaggcgccgccggcgcgcacctcgttctgggtgaggatgtggtcgccgacgtagcggcggctctcgcgcttgcccggcaggatgccgaggaagtccaggcgccagttggcgttcttttcgcggttctcgggcgcgttcttgacgtagtcccagacgccgtaggccacgcgcagcagctcgtcgcgcaccgcctccgcgtcgcggatggcgtcgccctcgccgcccagctcgatataccagaagttctccgtctcgtcctccatgttgggcaggcggtagggcagcaggtcctcccggctgtagcgatgggcccaagccggcggggtgaaggtcgagggatggtcctcctgccgcgcctggatgagcacgctcatgcccatggtcttggcgtcggcctgctcgggcgcgatgtcctcgccgaactcgtctcgcgcctcgcgccccacgcggaacgctgcgcccgtcagcggcgcgagcacgctgtcgcccgagcagtccgcgaacagccgcgcgcgcacgtggtggaaggtctgcgtggtcatctgccagccggtgacggcggcgatggagctgcccgccatctccgcgtccaggcaggtgcagttgagcagcagctcgattcccggctggtagcgcgccttttcgtagaggatgccgtcccagatggagtagttcttgtccgggttgcgggccatgttgtccatgctgatctcctcgagtaggcccgtctcccggttgttgtcgccgtgcgcgccgcagacccacatgcggatctcgctcgaggcgttgccgccgagcatgggccggtcctgcatcagcagcacgcgcgcgccgtgccgcgccgcgctcaccgccgcgcagaggcccgcaagccccccgcccacgacgcacaggtccgcctcgtgctcgaccgtggggaacgccgtgttcatctcgtcttccctccctctcgatggcaaaaggggaaccgaagtcccccttttgctattcccgaccgatggtcggttctctgtggtttagtaagagccctcggtgttgagggtgattcccttgtcctcctttgcgcgggaggtggcgcggcgcttgttgagctcgctgaggtagaggtcctcgtcaaagggaatttccacggtcttgtccagccaggaggacagatgcatcgcgttggagagggtcaggccgttgattccctcgcggccgttggcgaccagggcctccccgcgcaggatcgcgccggcgaagcggttgacgacctccacgtgctgcaggttgcggccgtcggtgtcgacctcgatgcactggtactcgggcttggcaaagccttcggtcgcggtcttgcagaactcgatgtccgagacctcgttcttgtagaagcagatttcgtcgttctcgcagacgatcttgcccatgtcgccgctgatctccaggcggttggtgccgggggcgtcgccggtggaggtgatgaagacgccggttgcgccgttcgggtactccaggtacgcggtgacgtcgtcctcgacctcgatgtcgtgccacttgccctcgtgcaggaaggcgcgcacgcggcagggcatgccgcagagccactgcacaaggtcgagctggtgcgggcactggttgagcagcacgccgccgccctcgccgtcccaggtggcgcgccaggcgccggagtcatagtagtactgcgtgcggtaccaatcggtgatgatccagttgacgcgcttgagctggcccagctccccgccgtcgatcatctccttgatcttgcggtagacgcagtttgtgcgctggttgaacatcatgccaaagaccaggtccgggtgcttgtcggcctcggcgttcatctcgcgcacctgcttggtgtagacgcctgcgggcttttcgcagagcacgtgcaggttgtgctggaagccctcgatggcgagcgtcgggtgctggtagtgcggcaccgcgatgaggatggcgtccacaaggccgctggcgatcaggtcgctgccctccgagaagatggcgaccgcatcgcccagctcggccttggcccagtcgcgccgctcctgacggcggtcggccacggccgtgatctcgacctcgggcaggagccccttcttgtagttgccgatgtggcccgagcccatgttgcccgcgccgatgatgcccagacgaactttttccatgttctgtgcctccccacatgaaatgtaactgcttacagtatagcgccgcgcgggagaatggtcaacggggaatccgccgcccgccgcgcgctttctgcctagggatccgtgcgttcctccatgaggattgccgcaacgtccttcgagaagcggtacgcctccggccctgcggccgggtgaatggccagcagcgggatctcccgttcgtacagcgagccatgcgtgcgcgacgcctcggtgtgcagccgctcgcccggaagctccgcgaacgcgcagcccggggccgccaggagcacatagtccccgatcgccgctccgggcaggtgataggccgcagccgcctgcgcggcggtcagcacctgttccacctccggctggctgcgggcgaagtcgacgaattcggcatcgcgggccgcatccttcaggaacacatagagcgtgccgccctcctggtagacgtggttttcgatgtagcggtccttcagcgggggcaggcagtagagcgcaaagcccgcgcgctcggcgacggcctgaaagttgatcaggcgcgtcttctggttcatgccgtggtcggccgtgatgtagatggacagaccagggttctcgtcgtggaggcgggacacccactcgtcgaccgcggcgatctgctcgcgcgcctccgccgcccccggcgcaaagtggtggaagatgcagtcgtttgtcgtgcaatacaggaagtccggcctttcggccgccatgcaccggtatgccgcctccagaatccagcgcgtgctgtccacgctgcggatgtccggcggcggcgtaaggcccagccgctcgagcagggcggggtcgggcttttccgcgctcaggccgatgtccgcgccttcgccgtacacgccgaggatcttgcccttcaccgtgagcagggcggtcttcccgcccgcgcgccgggcccactgcagcagggtgggcgcgcgcatgtagccgcgctcctcgagaaagccctcgcgccccgtgcgggggtcgtagacgtagtttccggcgatgcccgtctcctccggccactttccggacagcaggcaggcgtggttgacattggtcaccgagggcatggcgcactgcacgcgcttgacgaagccgtgcgccccggccaggcggtgcaggcgcggcgccgtctccgcggtgaagtattccggcgcgcagccgtcgaggaccaggaagaagatggacatgggcgttccctcgctttttcgtgttttcgttttttgctctcagtagtcgcgcatcctgcgccaaacggacagggccagctcataccgctccagcggcaggccgcggaaggggatgttcgaggtggcaaagacgtagccgccgccgggcttgccccaggtcatgcagtaggtggccgagtcgatgacgtcctgctcggtgccggtctgcatggcggcgcagtgcacgttgccgcagagggcgaccttgtccccgacgagctccttgaccttgcggatgtccacgcccgccatggggtccagggagtgcagcgcgtgcgggtttgccgcgacgagctggtcgaggatgggcatgatgttgccgtccgtgtgcttgatggcgtagccgcccccttcgcggatggcggcgatgatgcgcgcaagatagggctgaatgaactccgcaaacatctggggcgagaggaagggcccctggttgaagcagtagtcgctgcacaggatgaagccgtcgagcccctcgcgcagcagccagtcgtttcgcgcgatggcctcgtcgcacatgcgcgcggcctgcgccttgacggactccggctcttccaccatgcggtaggagagctcgtacatcccgtccccgtccgggatggcgaaggtgccgtccccgtgggccatcagcaggaaggtatcccccgcgatgcggtggatggcctccaccgtgcgggcgacgagctcgggcttgagctggatgcagatggcgtcgtgctcgagcaacgtataggcctccaccaggaccttggcgttttcgaggatcttgtcgttcagggccttgccggtcaggccctcgaagtcgcggtccacgcagaagtccttgccgatgagctccggcgcgagctgaaactcgagctcaaacgtgggcacgcggtcgggaatgccgcgctccagcgcggtgatcatgcgctgcttgggcgtcatggaagaatcgcctcccgatttttctccctttgcaggtcagaagtccacgcggatgcactggggcatgccggggtggcggttctccggcgcggagacgtccaggcagccgtccttctgcacaaaggggaccggctggccgtagaccgagacctggcgcacgggccgctcgtacacccggcccagggagacgatgcgcgtccggccctcgcgcatgcggaaggcgaagaccgtgctgccgtccttgctgcgggtgaagcggtagtcctcgcccgtccaggcggccgcgccctcctggaaggcgccggcggcgagcttggactcgccctcgcccatcttgacataggggcgcgtggcgtagatgccctcgccgttgtcgcgcatccaggcgccgatcttcttcagggcgtagaggcactcgtcgtcgatggtgccgtccggccgctgggtgacgttgaccagcaggttgccgttcttggcgaccacgtccacgagggtgtcgacgatgtcctccgcggtcttgtagacgtcgcgcacgttgtagaaccagtcgccgatggaggtgtcgtcctgccaggggtcctcggcgatctcggcggagatgccgcgctcgatgtccaggacgccgaccttgtagatggccgggtccgtgcccttctgcgtgtagacggcctggctcgcgccgccgtggcgcgcggcgctggcgttgtacaggtgcgccaccaggtgctcgccgtaggtcccgaagggcagcgggccgtcggtgtagagcagctccggctgcagcgtatccaccacgtcccggatgcggcggtaccaatcctggtggtacttctcgttgcgcgtataccagccgtgctcgagcagctcgctgtcgttgtcgcggtagagggaggcgttcttcgggtccgcgccgtcgtagggcacgcccgcgtagggaccggtcttgtccgcgccgtgggagagggacatccacgtgtaggaggcgcccaggtgctccgatacgccgaagggcaggccgaacttctccgccgcgcgcttccagagcaggcagatgtccttcttcgggccggcgttgaccgagttccaggggttgtgcttgctggcaaagttgtcgaagttgtcgtggtgcatggcctggcccacgaagtagcgcgccccggcctcgacgtagagccgcatcagcccctcggggtcgaagttctccgccttccagagcgggaccaggtccttgtagccgaacttggagggatggccgtaggtgcgccagtggtagcggtactgctcgctgccctccttatacatgtggcgggcgtaccagtcgccgtacatgggcacggactgcggcccccagtgcgaccagatgccgaacttggcgtcccgataccactccgggcagcagaacgtgcgcaggctgtccaggttcggagcaaagggcccctttgcgatgtcaaattggaattcgctcatcttgggttcctcctattttctttccgatgaaaatgcggtttcgtcttgcagcagcgcggcgatcctgggcgcaagggccgcggcctcctccggcgcttcgccggcgcgcgcggccaggaccacggcgaggaacgcgcgcagcgccccgcgggaggcgcccatggccgcgaggtattcctcccccgccgcccggcggagcgcctccagccccgcgggcgcggcggatggcagcggcgcgtcctccagcaggaagagcgtgcgcgccacgtccagccgcgcgtccccccgggccaggttggcccagtccagcgccagcaatcgctcgccctggcagacggcgttgtccgggtgcaaatccccgtggcagagggcctcccccgcgggaagcgaccgggcgcgcgcgagcgcctcccggcgcagcccctcctccaggggcgcgcgggcgatctgcccggccaggcgcgcacgcgcatcgggcaggccgtcctgcggccgggcgcgcgcggcgaggatgccgcgctgcaggtccgca

SEQ ID NO: 1632 - DNA, 32759 bp, Unknown
  16S sequences of unknown bacteria
ctataatttttgaaaattcatgtatagaataatatttactcaaagcatcaactcctttcaatagtattctaccctaatatcctataaaactcaacatgtaattatataattttataatttatatttacctgttaactgcccccaccccgaagcaaaacagatcctgccacattcatgatccatctgctcatctgttcttttttgcctatggttaagcatagttgatttcctatcttttgtcaatcagaccaaccttgcattttttcttaagattttggctctgagcgctctcccgaacctttctctttacgaacccttcccaaaatgatatacttttaccgatattaattattcgattgatcgggaatatccattttacttactgcctgctgattttttgcaggcagatgttccgaggtgatgacatgaaatgggatgacaaaccctaccattcacttgactatgaaatgaaacaccgtttcggtgaaaaagtttaccgcctgtctctaaatggcggcatgacctgtccaaaccgcgacggaaaatgtggcatgcgcggctgtattttctgcagcgccggaggatccggtgattttgcagcatcgcctgccctctctatttccagacagctttcctcgcaaaaagagatgatccgaaaaaagcggccggttgagcggtttatcgcctattttcaggcctataccaatacttacgcaccggtcgattaccttcgtcctctgtttttggaggcgatccgcgacccggaagtcgtcgcactctccatcgctaccaggccggactgtctgggggatgacgtactgcagctgcttgatgagctgaatcatatcaagcctgtctgggtggagcttggccttcagaccatgcacgaatcatccgcacgttttatccgccgcggttatccgctctcctgtttcgaacaggctgtcccggcgcttcgctccatcggcatcgaggttatcactcatgtcattctcggtctgcccggagaatcgcaggaacaaatgctggagacctgccgttaccttaatacgcttgatatccagggcatcaagctgcagctgctccacgtactgaagcgtaccgatctgggcctgctttacgaagcaaagccattcccggttatgaccatggaggaatatatctcgctgctgatccgctgcattgaacagctcccgccgcagcttgtcatccacaggctcaccggtgacggtccaaaagatctgcttattgcaccactttggagcacacgcaaacgaactgtactgaaccagatccacgcagaattcagacggcgcggtacctggcagggcaaatactatcttccacccactgaaggcggaaaaccaggaggaaacttatgccggaaccatttacactctacaaactgatcgtcctttatatgctgcagaaagttgattttccgctgaccacttcacagatctcttccttcattctggaccgcggctacacaacctatttcacgctgcagtccgtcctgtctgaactggcagaatccgatctggtccgtatggaaccaatccgcaatacttcttattacacgatcaccgcacctggagaagaaacgcttcattacttccagaaccgtatctctccgactattcgcgaggacatcgaccagtacatgcttgaaaataagatccagcttcgcgatgaagtctctatcatctccgattattaccgcaacacagcggacgaattttcggttcactgcatcgtaaaagagaaatatgcgaatccgatcgatctcacgattaccgttccagatgaagcacaggcaaaaaccgtctgcaacaactggcggagaaagtgtcaggaaatctatgaatttgtcatgaaggaacttttataagtcactgcccctgccttatttcgtaaaacggacatttgcgatccgcttcactgtctgtgaacacagacataaaaaaacagccacaggaaatcccgtggctgttttttatcttctgttttgatgaagtcctggaaaacgggtcatcttctcgccattccaaaacgctctttgcagaagctgagggcgcttcctgcaaatttcctttatgccatcactgctgctgccgcctcgtagcatgcgctggggacgccgcctacgagtgcatcagaaagtgctccgtttgatggtgatgcgaataatccggactgataaatcacttcactgaccgtatccgggtactctgtactgtatacacagtccataaccatttgtcccatcgccagcatgctgtcatagtcatcactgccagcttcgcaataaatcagtgctgcaagaagtccgatatcatcagaggtcacttcgcctgcttcactgttctcagcataagaagctgcctcataatcattgtcgatcacattgccgtctgcatcataataggtatcgctgtctgcgtcataccatccatcttctccgctttcgtctgtaccatcatccggtgcagaagtctccggtgtggtctccccatttgtttccggtgtctccggtgcaggagaattgtttttctttccgattacatttccgtttgcatcataatacgtgtcggtatctgcatcataccagccgccattatctccactgcccggatcacttgtctcggtctgcggcggattcgtctctggtgcgctcgtctcggtctgcggcggattcgtctctggtgcgctcgtctcggtctgcggcggatttgtctccggtgcgcttgtctcggtctgcggcggatttgtctccggtgcgctcgtctcagtctgcggcggatttgtctccggtgcgcttgtctcaggctgctgccagtctgtctccggtgtactcgtctcaggagccgttgtctccggtgtctctgtctcagccggatctgtctcttctgtctcttctgtctcttctgtatcggcctctgtctctcggttcatcggaacgagatcattgccttcatataactcatctttatctactgcagtatccaggatcagtaccttggatacatcctcagaggaaacatagccaagaccatcggtaccaacctgtacggtcagccagtgtccctcatcctgaagcagaatgaagtaagcacccgtctccagcacatccatgacatctgaatctgcattctctgctgaaaacagcttaacatcatcccaggtcgttgcaacaccttcgtatccataatgatctgcaagaccgatcacatcacgtccatacagcagatagtcattctttacgaagcctgtgatatcgccggaagtgatctctgtccactcatcgcctttgtcgatcacccatgcagccatgccgtaatacagataaccgactacttcgccatccttatctgccgtcgcacggatattgacaccagtatcaacggcatcgtcattgatcattgctactttatcccacgcattttcctgttcatatggtatcgtaatcttgtcccgaatctcgccatcctcagcagccattacagaaccgccagccaaaatggaaaatcccattgctgaaagcagacacaacagggcgcgttgatttctctttttcatttctatctttcctcctcggaacgcgtttgacatttcctttaaaaatattacacaattattaagttatattacggattcattgtaatatgtaatataggatttgtcaagctttattgtctattttaacgttcatttgttatgggcaaaattcacaaaattttccaggtccggtcacagaaaacccgatttccggcacagaaaaagctccggaatgtccgtttttcggcacatcccggagcctgaagctgacagaaaaattttcactctgcctgactctttttctgaacacgggtcgcgaagcagattgcgaacgtccgctttacattcgctgtctgctatgcggctgtcttccagatctgaagcttatatttgtccagtaccgacgcaagaatgcagccaagtacctcacaggaaatcacctctccgactcctaccgtcaccatcataatcgggatcggaagtgccacgccgtatgcatagcggagcacaaacggcacgatgcagatattcgcgatgatcggtggaagtgccgcaataaaatgcctgcagctgcgcagcttccacgtaaatactgctccgatcagcgttgcgatgcttccgcagatgatatccgcgatcacagctccgccaaggacatttccgatcaggcagccgacaaacagccccggaatcgccgccggtgtaaaaatcggaaggatcgtaagcatctctgaaatacgaacctgcacttcgccgaaactaaacggctgaaataccaccgtgagcaccacataaatcgccgcgatcattgccgcgtgggtcaaaaaggttacgttttttctttccatattctgttttctcctttagttttgttttacgagtggaaggtcacgaacactcggcacatttataggcggtgaacgccttgcagcccctatacgaccttgtttttatgggcactgcaacgggtgagagtatagcacactcaccttgaaattgcaagaggctggcaggctcttttttatccttattttgctcttctctgtctgtttgcctcatacatcaggatcgccgaagcaaccgccgcatttaaagactccacctgtccgcacatcggaatgcgcacatatgcatcggccagatccgccgttttatcacttaagcctttactctcatttccgatcagaaagccgctcggtccggtgtaatccattgtatcgtgccctccgcttccgcgcagatgcgcagcgtaccattttaccccttcttttttcagttcacgaatcgcagcgccaaaatctgagacgtagcaaaacggcatccgatagaccgatcccatcgtggaacggatcaccttcggattataaagatccacacagccttctgtcatcaggataccggttaccccggctccctctgctgtccgcaggatcgtgccaaggttgcccggatcctgaatgttttccagcgccatgatcagtgcgttttccccctgtcctcccaggagatcccgccaggaataatgatactgccgcaccagacacagaatcccctgcggtgattttgtatcagaaacgctctcaaatacccgatcggtaaagatcgtcagatttttttcttttccgtcaaaaagctctctcttcttattatagaagctctccgatgcatacgtatggacgagccgcttttgcggcacctcctgatacatcttaatgccttctacgataaatacgtcctgctccgcgcgcagctttgcctttttctgcagctgaatgagctgcttcacctgcgcgtttgacgtactgctgatgatggggattgtcatattctcttcctcacttttctttttcccgcctgagcatgctcagtgctctggcatacaaaaactgcccaggcagcctttttactgtccgggcagttactttttctgatttggcgcaaagcgaacattccagatccgcttcgctgcttgcctgattcagtcagatcgtcatcgccttcgccacgcgcaccatgtactctgaaatatccttctgcatgctcagtgcctcgtcgatgtcaaaatccttgtattctccgtcacggaatgcaacgacacggtttgtcttgccctctgcaagaagatccgccgcataagcgcccatcacagatgcatacacacggtcacggcaggtcgggcttccgcctcgctgcatatggccaaggatcgtcgcacgggtctcaactccggttgctgcctcgatccggcgtgccatacttgttgaatggccgataccctctgcattgatgacgatgtggtgctttttgccgcgcttacggttattgatgatattattgattagctcctgctcgtcgtaattgtagcgctccggaagcagaatatcctccgccccgttcgcgataccgcaccacagtgcaatgtaaccggcatttctgcccattacctcgatgatactgcagcgttcatgagaagttgaggtatcacgcaccttatcgattgcctccatcgccgtattgactgcggtgtcaaaaccgatcgtgtaatccgtacatgcaatatccaggtcgatcgtacccggcacaccaatcgtattgatgccgcgtgccgccagctgctgcgcacctgcaaaagaaccgtcgccgccgatcactaccagcccgtcaatgccgtgtttctgacagatctctgcgccgagatcctgcccctccggcgtacggaattcggaacagcgggctgtatacagaatcgtaccgccctttgatatcgtgtcagaaacggatctcgcatccatgtccacgatctcctcgttcagaagccctttatagccctgattaattccttttactttcagtccctgcgacagcgccttgcgaactacggcacgaatcgccgcattcattcccggcgcatcaccgccgctcgtcagcacaccgattgtctttacttcttttgccatatcgtacctcctgctgaagccgttattcttctattccattattctgcgtaactgttcagagccaacctccaaaatgctacgcatttcgtcggtgtagcgtatccgccaaatggattttcacacaaaagtgttcggtcatgcaagcatgactcacgcttttgcatgaaaatccgcttggctctgaacagttactattctgcaaataattgtcatgccatgcaagatctacagttattttcagaaatgatgttactgtgcagccgtttccttctgtcccggaaaatcaacggttattctttttttccagaagtactctgcctgtttcattctaatctattttcctgaatttgtaaagaaaagctactcttttttccgcgtcagtctgacattttctttgccaaacatcgcagcaagttttgccatcatcgcttcatccgcacggaccgtccagttttctcccagtttgcggacactgcgcggatttctcacgtagatcgccacatagtcgcttccatcctcggaatcgcgcagcacaccgaacagctcctgctctctggtgcgatacgtctccatatccgaaaactgaatccaaagctccatcggcacctcctcaaagcgccagattttttcacaaatcagcttgcttggccggtcatcctcattgtttacccggccacggataaagaccttttcatcctcgttcatccactgctggttcttctcataatccttcggaaaaacaacgacctccaccgtaccgaccagatcctcgactgtcagaaatgccatcgccttattcgtcttcgtgtacttaatcgtcttcgtcgtgatcataccgccgatgaccgccttgcttccgtcaaccaccttcgaatggccagtctcctcatccagtgcaaaatctacagtcacgttcgtgatcacaccgcgccacagatcctcatatttttcaagcggatggccgctgacgtagattccaagcacctccttttcgaatgcaagcagctgttctttatcgtactccccgacatttggcagctgcacctcatactcttttttgtcctcctcgttcatcaggtcaaacagcgacatctgacccgtcattgcgctctttttttcctgcgccacatgatccgccagccccgcatacacctgcatgaactgctttctcgtccctccaagactgtcaaaagctcccgatttgataaaattctcgattgtgcgtttgtttgtctcttttccggtcagacgctcgatgaaatccttcaggctgcggtaaggaccgccaagcgtacgctcctgcacgatcgcatcgatcacaggccggccgatgctcttgattgcagaaagtccatagcggatgttgcctccatctaccgtaaaccgcgcctcaccgacgttgatatccggaggcagaatcgcaatgcccatctggcggcaggtcagaatatactctgccaccttcggtggattgtcgatcacggatgtcatcagcgctgccataaattccaccgggtaataaaatttcaggtatgctgtctgatacgccaccagcgcatacgccgcagcgtgcgacttgttgaacgcatacttcgcaaaatccgtcatctcgtcatagatcttattcgccgtctgctcgtcaatcccgttcgaaatacagccaggcacgccctcgtctttatttccgtaaacgaaattctggcgttcctttgccatgacagccgctttcttctttgacatcgcccggcgcacaagatcactccgtccaagtgtatatccgccaagatctcgcacgatctgcatgacttgctcctggtaaacgatacacccgtacgtcggttccagaattggctttagctgcgggcagtcatactccacagtctccggattgttttttccgcgtatatactgcggaataaaatccatcggtcccggccggtacagcgaaatgccggcgatgacatcctccaggctttgcggctttaactccttcatgaagtttttcataccgccgctctccagttggaagacgccctccgttttgcctgttccaagcgaatcgagaacctttttgtcattgtaatcgattttcagcatgtcaagatgcacaccggtgctgcgttccaccagctgcaccgcatcattgatcaccgttaaggtccgaagccccagaaaatccattttcagaagtccaagttcctccagcgttgtcattgtaaactgcgtcacgatcgtcccgtctgccgcccttgaaagcggcacgtactcatcgaccgccttctgactgatcacgacaccggctgcatgcatcgacgtatggcgcggcagcccctcaaggcgttttgacatattgatcagttctttaatctgctcatcggtctcgtataacgtacgcagctcctgattcatctgaagcgctttatcaatcgtgatatttaactcctgcggaatcattttcgcaatggaatcacataaagcatacggaagatccatgacacgcccgacatcccggatgacgccgcgcgctgccagcgtaccgaatgtgacgatctgagccacacagtcttttccgtattttcttacgacgtaatcaatgacctcctgccgccgctcaaagcagaaatccacgtcgatatcaggcatggagactcgttccgggtttaagaaacgctcaaagagcagattataacggatcgggtcgagctgtgtgatgccaagcgtataagcgacgatacttcccgccgccgaaccacgccccggtccgaccggaatgccattgtcgcgcgcatagcggataaaatcccacacgatcagaaaataatcaacgtatcccattttttgaatcgtcgtaagctcatactccagacggggcttcagctcctctgcgttctcaccgtaacgctccaaaagtccttcgtaacacagcttgttcagatattcccacgatgtatacggcgatggcacatcgaaacggggcagctttgtaacgccaaactcaatgtccacatggcaccgctgtgctattttatgtgtattttcaattgcctgcggcgcatacggaaaaagctgtgccatctgttccggtgacttcacgaaatactggccgccttcatagcgcatccgatcctcgtctgccagcttttttccggtctgcaggcaaagcaggatatcatgtgccgctacgtcatcttcatacgtataatgtacatcgtttgtcgccacgagcgggatatccagctcctgactcatgcgcagaagctgctggtttaccagcttctgatccggaattccgtgatcctgaagctccagaaagtaattgtcctttccaaacagattctggtaataacgagcggtctcccgtgcctcctcatacagaccccgcatcagataacgcggcacctcaccagcaaggcaggcactcagtgcaatgatgccctcatgatatttttccagcgtttctctgtctacgcgcggccgataataaaagccctccacaaatccaactgagacaattttcatcagatttgcgtacccctgattattttccgcaagcagcaccatgtgataatagcggtcttcatcgctcccaatctcccggtccagtctggaattcggtgccacatacacttcacagccaagaatcggattgatgcctgccgcctttgcttcccggtaaaaatcaatcacaccgtacatgactccatgatccgtgatcgcggcgctgtccataccaagttccttgacacgcgccacatattcttttattttgtttgagccgtccaacagactgtactctgtatggacgtgcagatgtgtaaattccaatcgttctcctttctgtaatgtactccaggaatccttctgtacttgattttgtgagaaaatttttgtcaggtatacacaaatttctgaggcgtacacggtatgtagtgtacatcgatgaaatttatgtacgactggcataaaatcggtcacaaaagcaagtgcaggaaagactccgcgcgtaacattgtaaaatgaaaaagccgctgcaaaatctgcagcagcctctcattttctattctattttcagcttgtaaggaaggcatcctatctcataagggatcctcccacctgcggtgggcaactcataaggcatcctcccgcaagcggggtccctccttatgagattccttccttatgagattttgcgctgattttggtaaaatcaactctttcttaccgaacgcgcgctcataagggatcctcccacctgcggtggatccctccttatgagattccttccttatgggattttgcgctgattttggtagaataaactctttcttaccgaacgcgcgcccataagggatcctcccacctgcggtgggtccttccttatgggattttgcgctgttcccgtctgaattagatctttcttaccgaacgcgcgcccataagggatcctcccactaacgtgggtccctccttatgggattttgcgctgattttggtagaataaactctttcttaccggacgcgcactcataagggatcctcccactaacgtgggtccctccttatgagattaatcattcatcatgaagttgatgaggcggtcgatgtcttctctctcgtatgctacgatctcaagctccgggatctcaccgtttgagaaaatgtttgccatggaaacgtactggctcagctttgatttgaggttcagtctgtcgccctcaccggtaaccagttctactcttcccttgcactgatctactaccttgaaaaatttgtcaatgtttttgatgttctgtactttcatgtctgtttactccttttctttattttattgtaactgttcagaaccacctccaaaatgctgcgcatttcgtcggtgtggcgtatccgccaaatagatttccatgtaaaagtgttcattcatgcaagcatgattcacacttttgcatgaaaatctgcttggctctgaacagttacattttatttatctgtatctaaccgaatagcatcacggattccgaatatccactttagctcgctgtcatactacttttccattttgaagtttctgtcctgatccgttttatttcgtcgcgatcgactcaatctcaagcagcacatccttcggaagtcttgctacctccacgcaggatcttgacggatacggcgcggtaaaatattttgcataaattgcattgatcgtcgcaaaatcattcatttctttgataaataccgtcgtttttactaccttttctgtcgaagtaccggctgcctccaaaagattggaaagattggaaaatgcctgctctgcctgtgcctccacacctgacgggatctcgcctgtcgccggatttaccggaattacacctgaagtaaataccatgccgtttacctcgatcgcctgagaatacggtccgatcgctgccggtgctttatcggtgctgattactgtcttcataatcaaaaccctcctgaagtgtctgtcattgttgtcttatattttttaacctgtttattttaccgcatccttccagcgcctgtcaatggtgaggaagcacagaaataagccggaaattctcatttctttgtaagtgcactgtccaccagcattctgtttttttcgctgcgttttataaaacccatcaaacaagacaccggtgaaaaatatggttgttccttctatttcagcttccggatccggttctccgtgatctcaattcttccctgcttgagcaaccttccgaccgcacgcttgaacgcagccttactcagcccaaattccctctggatcacttccggacttgctttatctgaaaatggcagcacaccgtcaaattcctcaatgacctgcatcacaaactctgcatcctcgtccatctggaggtacgctttatcgcggatactcaaatccagttttccgtcttctttcacaccggaaacacgtgcatgcacacgatcgccgaccttgatgccggatgtcccctcccgctttggaattaatccggaataacagtcatccacagccacaaacgcaccaaaattatcactcagttcatagacccttccactcacctcatcattcaagtgatacggtgaattctttttcagatatgggtatacgcgcatcgtcgcacacagtcggctgctcttatcctgatacaaagccaccagacactcttcacccggatagacctttcccgtctgctcccgaaacggaagcagcagatccttttccagaccccagtccagaaatgcgccgatctttgtcacatccttcacttttagtaccgccgtattcccaatcgtcagcaccggttcacggcgtgtcgcgatcaggcggtcactggaatccagatataaaaacacgctcaccttatccccgcattttatggtttccgcctcttttttcggaagaagcaccttatccttgctgtgctcctcttccgccagatacactccgaaatttgtttcttttacgacggtcaattctcttttttctcctgcctgcagcatagttcctccccttgaatttttatttttattcgtctttcgtctgtaaatattttctgtcttttcacattttgcgctgatcttgacaccctgatatctttcataccgaacgcaccgcccacaagggatcctcccactggcgtgggtccctccttgtgagattgctcataaggcatcctcccgcaagcgggtccctccttatgagattccctccttatgagattttgcgctgatcttggcaacctaacttctttcataccggacgcaccgcccacaaggcatcctcccgcaagcggatccctccttgtgagattccctccttatgagattttgcgctgatcctagcaccctgatatctttcataccgaacgcaccgcccacaagggatcctcccactaacgtgggtccctccttgtgagattgctcataaggaatcctcccactgacgtgggcagctcataagggatctcccgcaagcggtccctccttatgagattccctccttatgagattcagcagtgcatatggttttccttcttcatcacagagactcactgccacacggttctcctcctgatgcacatacggtacgatcacatcgtgcaaatgtgcctgctggcgatactctaccaccaggcgggatgcctcaaatccagccggaagatattcctccgccatacggatatactgtccgttgttcacgtgatgattcgtatcaagatggtaatgacataccggaaatggctccattttcacactctcttccggaatcttcatcttccgtgaaccgtactccatatccagtttttcttccaggccatagctgtttgcatgttccggcggaaccttcatcggttttcccgtcttcgtattcatcagcacccagatactgtttgctttcgcaagataattccggtttgcatcgagaagcgcataattccggtatccataaaacatcttaaatccgtacggccacgtctgtgcataaattttctcgccaagcaccggtcttcgcaggatatcgatctgccacgaaaggatcatccacgcagcgtcatgctcgtacagataattcatcccagctccgcagtcctcagactgaaacgtggaagaatcctgaaaatagtccaccagtgatacgagtgtcagcttctgatccggccccgtttcactgtatcttaccctgctctcaaattcaaatgccatactgtatcctctttctgtctgttgcttttccttttgtaaagcgtgtctattataccattcttccctggatttgcccactgtttctttctcaaaaaatacagacgcgctcttcaccgaccgcgtatgcttcgctatctttttccatcattccgtctgctccccttcgttcgcctcctgcatcacgactgactccgcattttccgtataatggagccgaatcaccgcctgcggccagttcagactcactactgcctgttttcctttttctgctcctgcctttcgtatctcatccaaaagttctccgagcacctcacgcgtcagatagccgcctctccagtgaaacgtcagcatcttccccttttttgccgcctgaagcgcccgcttgtagacttcgtccgtcttcgtaaatgaaagtttcttttccttataatagaaatgcgctccgtcatcacacttcggagccgatgcgatcagcggctcatgatcacggaacacatttttatcgtccagattaaaataatcatagcggatccgcaccgcatcaccatcccgctcaccaagcgaattgtcaaaggtcacatccagatgataatactgcccgccaattcggacgatattccacgtatggcggtatttgattcctttttccggattgtttccgcagatcgcgatcatacaccacacaccaagtgcatcgcacaataccttcaccgactttgcaatcccttcgcagaccccgacaccgtgtcccagcggtccgatgatctcatgggaatatggctttttcagcttatcatagtgcacattttcacagataaaatcatgcacatactgttctttttccaattccgaaagcttcgctgccggacgcaccagcttctccacccgcgcagcgagtgccttctgatgctcgcggattttgttcttctcaaacatatattccggcacaaagatcagattcgtcgagtccagaaaatagcggtacttaaatcccgttgcccagaaaatctccggatgatccagccgaagctgaaaaaacacatcatatagccacgctccgtccggttccggtatctgcggaatctgtatttcatcagccagatccaaaagcccgcgcagcatcacccggtacgccgcctgttttgcccgatccattttctggtagtagtattcttccggttgtttcattggttgattgtcctttccgtcctgattctatttgttacctgtctgattcatatcaaagcggatattgcaggtgcgcttcgatgcctgctcacaggcattatcataaatgaatctgtttcacttataatacaggcagttttctgccagctgtttcttacctcgattttttatcataacggtattttgtgcctgttgcaagaaaaaaatgagagaatcgttcaggctcagttttttccagatcctgaacggttctccctcattttgcagctatttcataaaattttgcctgacatttagcagtaactatttcaccgatagtccttcatgtattcccctccccgtgtgcttcgatcagttcgtcgcacaccttcattcctgcgcagctttctctgcctctttcaatgctcttcgaaccccggttataataccttctgaggttgatgttgctccactgaccgcgtcaacttcatacgtttgttctttcaggatcgtatcgatcactgccattgcatttgtcctgtatggttcatcttctttgttctcctgcagacgaatatctgcaatcataccatccacaatatccacatcaactaagattttaccaccatagccggttccttttcctgtataagtaccatctttccacactgttccggttgaagcagatgatgtacccgcagcttctgtgtctgtacccgcagcctctgtttcctcatgaacagtttccgatgctccatccacttcttcactctcttgaccacaggatgccgtaatcagattattccatcccgttgtgacaatacaggccgcagcaaccgcagccaatatctgaaacaaaagtttttttccttcatttatctttgtttttctcagacgcagaactgcataggttgcaaacacaatagaatataccgtaatgtttactgcatattccacatatccatggactgtgcccggaatcattaacaccataatatgcacgtataaaagaccgtaatacacataagccagacgctggatctttttccatttccttggattcatctttttccgtataaccggaaaagacatgataaaaagaggaagcatgattgcaatcagaatgatgctgatcacacctgctgccagctgtactgcggacatagcatccggctttgtaaacatcatgataaagtatgttcttccaaaaaagatattgtggcacagacacataatagaagccatgatggaaagctgtccgcgaatcggcatcaaagttttcattgcctttgatccgtttttcaatgtcgccatatacatcacaacaacaaataatgcggtaccgattgttccccgtcgaaacatattgagtatgtaatcattgaaaaatcccgttgtttccttcggaataaacgcaagtgcagtacataaaagtattgtactgatataaaaaggccacgggtgctttcgcagcattttagcggcaataaatgaaaacaaaactgccactgccagtgaaaatataaacagcattttatttcctcccaaaccatattgcactactgcaagaatggacacctgacacttgcgatgccagatgtccattttaaaactgaatcaaagcggatattcgcaagccgcttcgctacttgccggatcataagggatcctcccgcaagcgggtccttccttatgatatttcataaccgagtagctacttcgcagcttatcaggagtggcttgtaccactcctgacacaagccactccactgcttattgctccgcgcaattgaagcatgggacttgcttgactcggttaaatctgatgtttgaactcccacagagtttcctgcctgactttgttaagccacaccaccgtcaaggaaaatatcgataccaaacatcagtttagcctgacgtgcagaagtgccgcaggcatcaaagccatcttcaaatactgtcataccggctttactttcatcaacgatctgcggataggactctgtcgcatcatcataagctgccgtccatgtagttggatcatcatccatagcaagaccaaacaggaatgcaaagccacgttcatttttgctgagatcccagagtgtatctgttgtagtacgcggatcgcgctgatcagtattaaattgaaaagattcatactgaattgcaatcaccggctcgcacacatcgtaaagtccactgtctgccagcatggcacgtgcatcaaaggaccagtttgcttcatcttccagaagctttgcagaaacttcttcgtcatcccacgggcggataaaataacgttcacgctcatacagatcttcatatgtcagcttataattatctgtataacgagctttaacccaataatgctccggattctccattgtataaccggtctttgttccggtatttacttcagtcgcctcaatagtatccggtgcatctgcaacacgcatagccagtgacattccctctttgaactcaacatctgctgcctcaagaacactctttaaggtagcccccatcgcatgatagctgttcataccatgcatcgggcaggcagctgtagagaaggattcttccgtacacatagcttccatttcttcatagctgaacaccttttcagaaacaacatttccttctccatcaatggtacgaatcgtaaaatccgtcggacgtttattctgaacagtaagccccaggcaaacatcatcataatcttccgcacagagaacaatttcatacgttttctctgtactgggatcaactgcaaacagatcagaatcaagaataacctttgtcgtacttactgtaaccttcatatcatcgacctgcatgtcttctgttacttcctcagaaatatctgccggcatctcacggatataaatggtgtcaacagcatcagcccagtcctcatcctgttcctcttcaaaagaataggttaccattccggtagctttcagtacaaccgtctcttctcctgctaattcagctgcattcgcacctgtcatcggtattgccatagctacaagcgctgccggaatcagcagcattttagacaatttcttcatttcataatcctcctatttttctttgctctgtttatcatttcattttttacgctttacaacaagcactacaacagccacgattgctgccagtgcaatcaggtatgcggcaatttttccggcggataagccattttcttcttccagatcttccgtctgtttttcagtcactgcttctgtaactgttgcttctgtctgcttttcagtcgctgcttctgtaactgttgtttccgtctgcttttcagtcgctgcttctgtaactgccgcttctgtctgcttttcagtcgctgcttctgtagctgctgcttctgtctgcttttcagtcgctgcttctgtagctgctgcctgctctgcatcagccggaatctcatacgtcacagaatgtccttctccatcattcatataaagtgcagcagctgttcctgcatactctgcataatcaaagatgccttctttgtcaacttttcctttgccgatctgctcctgattcgcatcatatacaataatacgtgctcccttcacagtggttccatcgctgaacatgaacttaaccagtgtaccacccgctgattctgcaagagcagcatgcgcacttgcaatggaagccaggcagaaacacagcatgcaagcaaacagtaagctggtaacaatcctgttctttctgaacatctccatccctcctttcttactttttatttgtattcaggctaagcatttcaggacgcacctgtgcaatcatctgaatagcaaagcctgttacaaccgcttcaataatcataaccggaatatgaccaatcataagaccttcgatcgcattgaacggtccaaatccataacggacattgctctcgatcagcataatcgatacgaacagaattgttataataacggataatgctcctgccgcagccccgcataaaagatttgtccgcgaatttttcccaagatacggccgtatcagccacccgacaagcatagccggaatcgaaacatcaattacattcgccccaagacttgtaattcctccaaagtgaatcgtcagaagttgcaagatcaatgacactgctattgcaaacggagtccttcttccaagtaccaggccgatgatacctgacataagaagatgtaccgaactgccccctatgtttacatggatcatcgaagccacaaaaaacacagacgacatcagcgcaatcttcggaagctccttttctttaattccctttaccgaccacgcaaccagtcctgccgcagctacactggttaccgccactaccggcgttccaagtacaccatccagaatgtgcatatcctaccttctctctttatttatctttatttgtatttatccttctttgtgcctctgcaaaactaagaggtattttatctgcacctgcaaataaacgtacaagcattggaactgccagccctgcttttttcatcagttctgcatcctgcataattgtctgatcacctgcggcaagcacgcttccattcgacataacaatgacatgatccgcccattcataagcaatatccacatcatgtgtgcttaaaatctgtgtcattccatgtttatgcaatacagtaagcgtctccagaaattgttctaatgatagaggatcgagtcccgaaaaaggctcatccatcagtaatatatctggtttcattgcaagcactccggctatggcacatcgctttttctgtccaaggctcaggttatacggtgatttttccctcagatcaaaaattccaacctctttcattgcatcttccgtaagccttttcacatccgcgtctttcattctcagattgtatggtccaaagcttacatctgcttcgacagtcggtgaaaataactggttatccggattatcaaacaataaacctacggtctggcgaatctgatcggcgttcctttttgtgatactctgaccatttatggaaacagatcccttttgcggaagaattaatccattcaaatgccgcaataatgtactctttccacaaccatttgcgccaagaattgccgtctttttctttttcggtatggcggcattcaaacagttcagtgcatgagttccatctgcataggtataggacaaatcacatatctcaactgcattttcactcatatcatcaccgtccaatctacatagatgattatagtggcaacgacagctgtcaccaataatcctaccagatcttttccttttatcctgccctgttcctcaaatggaataacccctgaaaagcagcgtgaacgcattgccatataaacatgttctgaacgatcataatttcttatgaacattccgcctatcacatagccaatatttttcagaacagacggatgtgcctttggtacaaacatgcgggatttcaaagccattgtctgtacacggaactctcccgtcagaagatgaatataacgattcaccagaaacaacattgacaaaattaccggaggaagcggaagcacagcaatccctcgaataaaatcgtctgtgctgcttcctgccgtcattgcaatcacaataaaaaccgccgccataactcttgcgctgatcagcagcgcaaatcctactgcttcccgtgtaagcggaactccatcacttaatgaaagtgttatcaacatcagaaagataaacggagctacatgccgcagatgatggaatgcttcatgaacggacattcccgaatcgcatgctatgatgcagcataaaataactgccattatcaccggggttccggcatgtttcgtcatcagcaatgcaatcatccacaacactgcagcagctagccgaattctgacatccatcattgttaatatctgtctttgcattgtattttttaaagaagctctacttctgctttgctctgaactttcagaagtaattcaaccgggccgtcagcattctcttttttaacagttaccgtatcatccttgcatgagaaactatatcctgtcggatgtgtttcattcagaccaaatacaattttttctgcaattgcaggtccgtccagctccataaaattatgtccatgaataccggtaaatacatttttatcttcatcatccgtcggaataacttcaccattttccattaacatcacccgaccgattccacgaatatgaaacagctcgcttacacgcatggtaacggatgcattctccggatcctgctccactacttccagattcattcctggagaaacaattgcatgaatggcaaaaggcgctactttgtctccctgatatgtcatctcaagcactccggcttttactgccataaccttcaggttgacacggacaacatcctccttcatttctacgctgatattgtttacgtcgatatcctcgcccgcaagcgttcctgcaaaatcagcaggatcaagcgcttctattgaatctgccttacagcaaaatgtcagatccatatgcacctgctgatcttcttctccatgattctctgttgttacttcaattccgcttactttaatattctctcccgctctctggcagcagctgctctggccaccagcagcatcaggggctgtatattcttctgtctccgatacaacatcctctgtctctacacgtttggtgaccggatcttccggctcttctcccttggcaaccacctttactgcaacaacaacagacgttccaagatattctcttaaacgtgcactgagcttcagttcggtttctccttccgaaagtgcagtaataatcaccttgccatcctcatataccgcgtctgcaattccttcattcttatcttttatcttcaaatccgcataataagtatcatagctggtagaatcacaggtacagttattatctttagacaggcaatttgatccacatttttgcggacaatctgacattccacatcccggcatctggtcttcctgcgccggatcaatcgtgaccgccagttcataagtttctccaacaccaagcgtcagttcttcagcatcgcagctgatttgtaccgttccgcgttcaatgtaagccattgccgaaaatggcagcaacgtgcacgtcatgatcagcgcacccaaaactcccattacttttttcatgtttttgtcctccttatattgcacattaatttaagtaaatatccatctgaacacagtctccgcttgtctccatctggtatccaccataatatccgtcacaatcacccagcgccgctacaaacggaccactgtgattttttacaactccaagttttatctcttccataccaagatcttttaaataatctctaatcggtgtacttctgacatatccttcgctttcatgctcatgatctggtaataacggagatccgttctttgcatatgcaaggatcggaattgcctttccgaatataacatccccatcagaagtacacatatagtacgctccggcatctttttcaaaataactgatgtcttcaatggtactgaacacttctccatcacgcccgaacagttcagcacggccatcaaagttctccagtccaagcacttctttcagtaaaaaatcaaatcgaagcccttcataataatccagatatccaccagttcccatagattcaatgtcttcttcatttccaataatcccgtaccagcttccataaacagcctccggatgttccagtgcaagtgtctccaattctgtcgttgtcaatgtttttgttatatccagctgcccgtctttatacagattgaaactgaatgtaatctctgcactttcatcatgcggagcgcgattatgcatttcataatgcagatcgtctcccatcaaaatttcccggacatcgcaaatcatcgtctcatctgacaaaatttcaattccatcctctggcatcactccgtctgccgataatacgataactgcatcatctcccgccgataccgttttctccccggtaagaatactgacatcttcatcttcatctacagcctccgcaccacaaagagaaagaaattttttcatatcaagccctgatatttcttttccttcatacgattttgtaatacaaagttctttcaattccgcctcttcagaagcaatctctgcaagttccaaaagatttgccattgaataaatctgttccatttccagtccactgccagtcactttgaccgtactatacatcgtcgtcagatcttgcgcattggcagatattcctgctatcagcactaagccaagtactatactaactgcttttttcataactcttcctttctttttttattcgttcttttgtaatacatgaaaaaaagagctctaatgagcccttacaaaataaaactccgcataaatatgcggagccatttcgcctgtaaaataaaatctcaacatttctccagccatggctcgcagcttcaaaaaatacatacaagccggtattctggctcggaaatcacggtatgcttccaccttcccgatattctcagtggcattttgaaaacatactccttccatacagcagcggcactgcacaggattcacacctgtttcccgtttaaagttcttctctgaaaagtttttaaaaagaactcacttgtacgtttgagataatatatatttttatttactttatcatagaaaactattaatttcaattcctttttattctattttctgcaaaacaaaaaaatatacgaaatattttccagcatttttattggcacaagatttttcacctgtataaatttttatattctgaacaggcaaaatgaaatatctggcagattccgtatctgcgttctatgaaagaagctaaaaaataaaataaccatttaagtcctgtcttttctccagttcttaaatggctatctctttaccttaccgataatccttcatatattccccgtgtgcctcgatcagctcatcacacatttttatgatatcaccgatattcagttccgccgctgtgtgcggatccagcattgccgcctggtaaatcttttttcggtcctttgtcactgctgcctcaattgtcatcagctgtacgccgatatttgacgcattcatcgctgccagatgcgccggaagttttccgaccttcgtcggatgaacgcccgtcccgtcaatatagcacggcacttccacgcaggcatctcccggaagattttcaatatatccatcatttcggacatttcccccgatcttatacggctgatccgtcatgaccgcttccataatataggacgcatactctttgctgcgctcgtgcgtgatcttcccgtcccgcagaatgtccgcgcgctccttttcccaaccttcgatctgtttgatacatcgcctcggatactcatccagcggaatgttgaattcgtcaatcatctccggatagcgtgatttgatgaaccacggattgtactccgcattgtgctcactcgattcggtacagtagtaaccgaggtgacggatatactcataccttaccatatcattatgtttttccccgcacgtattcttttcttccgctcttctgcgaatctccggatacaaatccaccccgtttttatcgtgaagctccagaagccatgccatatgattaatcccggcgatcagctctgttcttccctccagccggtcttccatcccaagatcctttaaaagacgctccgagcacacctgcacactatgacagaggccaaccgtcttaatcttcgtaaaacgctgcatgtagccggtgagaatcgccattggattggaataattcagaaaaagtgcatccgggcaaacctcttccatatcccgtgcaaagccctccagcaccggaattgttctcagtccccgcatgattccgccgattccaagcgtatccgcaatcgtctgctgcaggccatattttttcggaatttcaaaatcaatcaccgtgcacggctcataaccgcccacctggatcgcatttacgacaaatgttgcatcacgaagtgcatcctttctctgctccacgccaagataagttttgatgacagatcttccctcgtttacgttcttgttgattgcagaaagaataatccgtgaatcctcaagccgcttcgcatcaatatcatacagcgcaatttcgcagttctgaagtgccggtgtgcacatacagtctccaagcacatttctcgcaaagaccgtgcttccagctcccataaatgtaattttcattcgtatccctccttattttccgagtgatttttggatagttttattgtataatcttctttgtaaaacgactattcactttgtgtcagaaacttgtggaaatgttgtatcttctctctgcctggagtaagtaaagcggacattcgcaatccgcttcgctacttgcaggatcataaggaatcctcccgcaagcgggtcccccttatgatatttcatgaacgcagtcgcttcgcgacctgtcagtgggtgctttcaactcccactgacataagcatcccccttatccaccgcttagtgctccgcgcacttgaagcgggggaatgcttatctgcgttcaaactgcgcctgatactggcaggttcttaccaactgcttagcgcttctcgccgcccatatatgcttcattatttcattatataaacaaggagtcaccaaaatgtccggacatacaccgcatcctcagtccccactcactatctatttctgcgacagcgaaaactgccagccccgccacttttacggcccggcagtgcgaccgcattatcttctccatgtcatactgcgcggccgcggaatttatcagcacaggggcataacctacacactctcccaaggcgatgcttttctcattacgccaatagagatcacctactatcaggcagacgaaaccgatccctggagctatgcctgggtcggatttgacggaactgaagttccccaactgctctcccacactgtcttttccgattcggtaatctttcggaacaccgatccggaacgtatttccgcctttaccggacagatgctgcgcctgctggaagccttttctgagaatccatccgatctgcttacttccgccggacatcttctgcttcttttttctttcatgcaaaaagcagccccggaatcttattccgaggcctcgctgcaatatcttacaaaagcaaaagaatacctgaaaaataattatgcctatccggtccgcatttctgacaccgcccgctacaccggcatcgaccgcacctacctctatcggatctttatggagcatgagcatctctcgcccaaagaatatctgatgcggcaccgtctccgcacagccacagaaatgctctgtaccaccgactactccattacggaaatcgccctctcctgcggcttccgtgatggctcggcattttccggatattttcgtgagcaggtggggatgacaccgagggagtttcggagggggcacaggtgagctttatggttacccaaatattgctactttccatgatatggacaaatccaaagagtggagtcctgaaacttgaaatttcttttcctgttttagcgtcaaattttcatcaaaactggttttattgagttttctataatagccttttttcattaaaacccattctgttgagttttctgcggtataatcgcattagaaatctcatttttttaaccgaatcaagtaagtcccatgcttcaattgcgaatatccgctctgacccaaagaaaggaactgacacaactatgaataatagaactggcactatcattaataatctctcttgagacatgacataccaatcatttcatccctcgcccctgcctcctgttccaccaattgcatttacacctgaactggtcactaaattgatcgatacaaacaagaagctggcaacccttaacggtttatctgtacgtattcccaatatgaatttatttgtatctatgtatgttcgaaaagaggccttactttcttcacaaatcgaaggtacgcaatgtacacttgacgatatcttagatcctctgatcgaggaaaatacaaacctgaatgtttccgatgttgtcaactatatcaaagctacagaatttgcgcttaaaagattgcactcatttccattatgcaacagactcataaaagaaacacatgcagttttaatgcagggagttcgaggtcaggaaaaaagtccaggcgagtttcgttattcccaaaactggattggcggccagggcagtacaattaaaaatgcccgttacattccgccaaatccagaggatatgcaaaatgccatgtcagatctggaacaatatataaacagtgatgatgcgcttgtcccccttattcaggccgctttaattcattatcagtttgaaaccacacatccgtttcttgatggaaatggacgtgtcggacgtttgctcatcaccttatttttgatggaaaaaggaatcctttcttcccctgttctttatatttcttacttcttaaaaataaaccggatcgaatactatgatagaatgacacaaatacgcaaaacaggcgactatgaacaatggattttattctttctccaggcactatctgattcttccgatgatgcgattcagaccattgataaactgactgatcttcacatcaaaaatatttctttatttgatgatctctcaaagcgtcagaaaaccaatgtgcttaaagtttttcattaccttgaaaccaatcctattattgatattcaaaaaactgcggctgcgttagatctatcctacaatacagttgctaaaatcgttgctttactgactgaaaaaaatattctgcagcagaccgacaaatcaggaaaagcaaagatttactcgtatacagaatatcttgatattcttcgtaaagatacgtaattcgaagcgtaagaatgaattcataaaaatcactggcaatatttcaaagcaaaatatcaccagtgattttcttcactaatacaacgattccacaaaatcttcaagtgatttttctgttgattcagtccttcccgtttcatgattccaaaatacaatctttttttctttcagagaataacatatataatttccaaatggatcaattccgaatgggattaaatctttgtcctcaattacttctaaagcgtcaaataccgaatctacttctggctcattctcattaaaacaaagcactgcaccgaagactctctcgttatttccaagcatgaaattatatcttgagggggttgaagcatttgttttcaatataaattcttttaattcatccggaaataatatctgtctctctttttcaatctcatcaaacactgctggatcggatatatcgatcttatatttccatgtgagttccattttatcctcctatctgcagtcagcaccgccaccccagacactgcgtcctcctgtgtgtcggcaagcattatgctctctggcatctacaagctgcattttaccggggatctcattatgatgccaggtcaaacctgaaatgcgtggttcgccatttttaatctgttccagctgacgcggcgcaaactgttttgccagttcaggatccttttctatctgctttaccagtttttccgtacagtatttaaactgttccgtgtcagaagcagttctcaattcttttgggagcactgtctcaaatttactgtcaaatttcgggaaaacgccctctaccttttcaccatcaagcacaaaaacatgctttttgtattccacactcgttcccggataggtttgtccttccaggctttcattaattgtcggaatatgcctcggcgttttgacttcattttctgcattttcaaaggcttttgttgttttttccgtttcatctgttttctcagaaagttcctgaacttcgtttatcccaaatggattcatcctatcacctcacccttgacaaattccttccaggtatcgaggtattccatcggcttacgatagcgctcgatctgttcttgcaaaatgcactcaattgctttattttgtttttcaacagcaagcccttccaggagtgaatcctgtgcataaatgaatacatttttccattcctcgatggaatcagccttttctgcctcttgttccgtaaaagaatcacaaaccagatcatagatcaccgaactaatgtcatttttcacacacgcaccattctttcgcagtgccctcagtgctttaatcttcaccttcgttgggatatccatccctgccatcatttcagtcaattcaccgattgtcatatccattctttccccagaacttttattcaaaagattttgaatcagactccgcttctctcccagtaaggtaatactgtttgtttctggttttctatacgctctctcttctcccttgaacttttctattttgcagagcaccggttccagccagtcattctgatatactacgccaacccccttgggaagttttgcgatttcatccaactgatcgtttttcaacccggctgattttcctgccagatgcctgtcctgttcatctggaagacgcataataatctttgtattcgtattcctaattgccgacatatccaccgcactcggtgactgatccgcaataataaagccttctccataagtccgcatttccgcaatcgcatttgaaatcatttctactgactttccgacaacattcgaatcatccaaattctgctccgttgaggttcttttcaaaatattatgtgcctcttccaaaaccgtcacatgatgcaacgaaacattcatttctccggcggtcgacattctatactcactcaaccgcatgatcaaaatgcccatgatcagtgattttgtctctgaagacccgatacgactaatatcaacaattactttctcatcgaaaagttcctgatccttaatttcatttaccgaaaaaatctgcccgtttaagccatttgtaagagatcggattcttgtgaccagggagcccgtataattactctttacttcctccgaataagcagaattttgaataactgcaactagctcattcagcaagtccgaaaaagcaggaaacagctgatcactatatcggttcttagattctgcaagatcccagccgcatgattcatatgcctgcaaaacagcttctttgagaactgcaggcattgcggcgtacattggccagcatacattaaacacctcgaccaagcggtcaatatgctccagaatatgaactccctttgggaaacggaacggattaattctcaggagactggtatattgcggatttgttccgtacacatgcacatccgactgtgcaccaaatatatttttgtactcgccttttaccggttcaataatcagatattttacaccaaagttatctagctgacgtatcatttcataaatggtattgctctttccagagccagtagaaccagttataaacgtatgcatcgccaggctgtttacattcagaaaagccttactgtttccagcacttcccatattaaaaattttcccgagattaattcctgttccctgttttgctccgtcataagtaacgatttcttttccgaaatccgcatgttcaataacgggaagaccacacacggatcttctcggcaatcccatatgtatagccagttcatttccactgaccagcgaacacggcgtcacttcaatatttcctgccggtccattatatcgaaaaacaggatgaataaaatttttaacatactgactgatcatctctgttttttcccgctgaaactgtccccaggaattgattgctgcaatttccacgccagaattttccccacgcatcaacgctttataggtcgatgcagcaacctcagccgcatactgatcatcggaaaggaaataggctgcacattcatacattccaaggctttcaaattcatcgatccgctttaattgcttgttgatccgctctagggtatcttcaatcgatttatcatgaagcgtcagcgtcattccctctgaaatgcccttcgtatagccttcagttctggatattccataattaaccgtatctgtcgttccatcacttgaaccttcaaccgtagaaaagccgctggaaactgattcattccttgatgtcgaatctgatacattttttgtgattgccgatccaagcaaaccaagacttccggaaataactccccctacagacaagctgatatttccggtcaatggagcaagtgccgccccaagtaaagacgcagcacttgctacacctttaatggtctttcccgcaacactttctcttgactccgaatgcgaagtcgacgaaccagttgtcctagtttcacttcttgtctccgaatgattatccgtatgagttcttgccttactattgccattcgtttccgcaacagaataattaaatgaatgattacttgcgtaattcacctgagtacttgcaaaagcagataactgtgtatatacattttcatatccttttctaagctcccgcaactgtgcctgtgatgtcccgtttgcaatgataatcccagtgtatttttctccctgcatggaaaggaccagtttttccaacccctgtacgaaagactgattggaagaatcttcatgcgctttatcattagcgacacaggaaactgccgaaatacttttcgcctttatccggtcgagaatttgctccatatcttcaatcgtataatcatcagaggttttaataccaggaaattgtcctttcatggcattttccacagtgtttttcagtgagctgatcgttctgtattcatcctgcgaacgtactcccatataaaaatcagtctttaccccatcactgtctataataataaagaccgcgctgtctgtaatagacaacgcattaaaaacgctggcgaatttataagttgccaattcgtttttttcatataccatttctgtgatcttgaaaaaacgcacattgtcccgaatatttgaacgtatcatattcctgcttagcggtacgatttccatttttgacaattctgaaatgtaatttttcaaaattacatcatctacaacctttaatgcagactgatatccatcagcaatatttgtataatcaggaaccgaaaccgcagaatctgccctatctcttcgtatcacttcctccatcaaatatcccccttgtcactgacaatcagtgcaacaccaaccgctgcgactgccagaccgccgacagtcaaagcaacctgtgacgtacaaatgccagctaccgccgcgactccacctgctgccgtcactcctgcgccaatttgtttgcgcgtaaggccattgctttgttcttttgatccgcgctctgctttgttcgctctttctgcctcaatcttct

SEQ ID NO: 1633 - DNA, 32759 bp, Unknown
  16S sequences of unknown bacteria
cgaactttcgtgcgacaaatcctccacaagctgaataaagtcgcttttgtatccgttacgatttaacgcgtccgaaataactttaacgatggccttgttggaatttattgcgtctttactgccgcgaagaactaccgcattcgacgttttcatgcacagccctatcgcatcggccgtaacgttgggtctggcttcgtagataatccctatcacaccgaaaggaacccttacttttttcagtaacaatcctgcatgattggtccactcctcggtaatttcccccacgggatcgggaagttcaatcaacttgacaagcccgtcgctcattcctttaatgcgctcttcggttaaagcaagcctgtcgagaatatgtttcggtttatcgccgttattgtcgagatcgattttattttgcgataaaatatattccgcctgctccgtaagggcgtcggaagcaatacgaagcatattgtttttatccgccgtagacaaagccgacagataaggaacagctgctttcgcaagtttgcagttatccgtaacgctaatcaattattcttcctcctcttcggattcaggcaattcggcattatgatagacgttttgaacgtcatcgttttcatcgaacatatcaagcatcttcgtaaatttttcagccgcggagtcttcaagcgtaacggtcatggaaggaatcctgtcaatctgactgcttaaaaactcatatccctttgccctgagattatcgcatacggcattaaaatcctcgggggtggttatgatttcatattcatcatcagcgttaaagtcttccgcaccggcctccaaagccgccatcataacttcatcgtcatccattccttttttcttttcgacgacaatgacacctttggattcgaaaagataggatacgcaaccgtttgtacccatagagccgccgaacttatcaaatatatgccttacgtcaccggcagtacggtttttattatcggtaagggtttcaacgataaccgcaacgccgttagtaccgtatccctcgtaaacaacggattcgtagttaatactgccaagctctccgcttgcctttttaatgctgcggtttatattgtcgttaggcatatttgccgcttttgccttagctattacggtcctaagtgccgaattgctgtccgggtcaggtccgccggcttttacggcaaccgctatttcacgaccgattttggtaaagaccgcagatcttgcggcatcggttttaccttttgctcttttgattgtagaccatttgctgtgtcctgacatattaattctcctgaatacgggcttctaaactccgccctgtttttaacgtttttttgattttttatttaatcactataatatttgtacaacacaatcgaactaaatgtatataagcgaaatttaaaatcgatatgataaaagacaatctgtttagtaaaaattttaatgtatttattataacataaattgcccgaaaagtaaaacgcttaaaagcataaaccttattgttatgcaatgataagccctacttttgcgttttattcaggcaagcgctgccaaaactcaattgatacatcaaaaccgccgccgaaacacctgcatttaatgattctccctcaaacatcggcagacataatacttcgtctgacgcagtaattatagcctcggaaatgccgtttgcctcatttcctataaccaaacagcacttatcaaacctcaaatcagcctcaaacacgtttaccccacccatatcggcagcaaaaaccttatatccgttttgcctgagtttttttacgcaattataatctactttaaataaatttacctttgacacggcagacattgcgcttctgacaaccttaggattataagggtcaacgcaatcaacacaaaaaatatccttaaatcccgtcgccagagccgtgcgtataattgttcccatattaccggggtcgcgtattctgtccaacaaaagaacgtattgcgttttatattcgggggaatcgatttttttatccgacacacataaaacgccctgagtattttcggtatcgcaaatttgtttaaaaagctcgtcggtgcagacataaaatcctgtgtccgaaaattcagacgaaaatttttcgcacgcgctttccgaaagcaacaactgcgcgcccgataaaaacggcagactgtctttgacggcacggtacccctctataacatatttacccgatgagtcccgaaactttttgtctttcagttttgcaaccgtttttaaaaatgaattgtcttttgaccttataaccataaatacgcaaacacctcacgtctttgccagccgggaatatttttcaaacaatgcaataaaaaataatgataattgagttttaacaacgaaaaggcacctgcttttaacgggtgcctttttaaggtaattatttcgctattgctttggaagcggtttcggcaagtgccttaaatgcgttctcgtcgttaactgcgatatcggcaagaacctttctgttaaggtttacgcccgcagttttaagaccgtacataaacttggaataagacattccgttaagacgggcggcagcattgatacgcgcaatccacaactttctgaaatctctttttttacgtcttctgccgataaaagcatacatctgggacttcattaccgcttcacgcgcaatgcgataagagcgggatttggagccgaagtatcctttggcgagtttcataattttacgacgcttcttgacagcgtttacagctcttttaattctcattgtaaagcacctccgttatttctgaatcatgaccttcaaggtcgcggcctgtttttcagaccccatgtaagcgccttgtctgaggcccatttttctcttgctggtcttcttggtaaggatatggttcttaccctgctgagcgcgttttactttgcccgatgcggtaacgcggaaacgttttttagccccgctgtggcttttcatttttggcatatcttttgccctccgtaaatgtatttttattttttgggtgccagaatcataaggatatttctaccctcggtcatcggctttttgtcgaaaatacagacgtctttcacaatctcgtaaaaatcagtcatgacctgaacgcctaacgccgcgtgcgcctgttgccgacctctcattcttatcgaaaccttaaccttatcgccgtttttaaggaacttgacgcactgtttggctttggtttcaaggtcatgggtatctatggtcatagaaagccagatttctttaagctcggtaactttttggtttttacgcgcgtctttttctcttttggcggcgtcaaacttaaatttgccgtagtccataatcttacagacaggcggatttccgccgggatttatcttgacaaggtcaagatttttttcgtccgcaatgcgatttgcctcccgcgcgctcataatgccgagctgctgtccgttttcatcgataacgcgaatttccgaatcggtaattctgtcgttaatctcaacttccttattgataaccgtgtcctccgattaaaaaaaattgagcggcatagatttaccgctcaataaaataacacaataattccataaaattacggcgttacacgatctgggaatcccgatcggtgagaataaatctacttccaacctgtaatattatattacttttaataaatcgtgtcaagaattttaacgcatattacaaaacttttccgtcgttttcctctttgattttcataaagaactgttcgtaactcatggttccaaggtcgccttctttacggcttcttacggaaaccacgttattctccacgtctttatcgccgataatcagcatataaggaattttttcaagctgagcttcacggattttataaccgattttttcgttcctcaaatcgcactccgcccttaaccccgctgcattcaacttatcagccgtttctttggcaatatccgccgtcctgtcggtaagcgacaaaaccttgacctgagtgggactgagccaaacgggaagcgcgcccgcatatttttccaaaagcaatgccattgtacgctcgtagcaaccgatagaactacggtgaattatataaggtcttaccttttctcccttttcgtcgatataactcatgtcaaagcgctccgcaaggaacatatcgatctgtatggtaatcaaggtatcttcctttccgtggacgtttttaatctgaatgtcgagtttcggcccgtagaaagccgcctcgcctattccttcggtataattaagcccgatatggtccagaatccgcttcatctcgccttccgcataagcccattcttcggggtcgtcaatgtatttttccttgttgacaggatcccacttggaaaaacggtaggaaacatcgccatccagtcccaaagatttcagcatgaacattgcaaggtcaagacagccgcggaattccttttcgagctgagagggcatacagataatatgaccttcgcttagcgtaaactggcgtaccctgataaggccgtgcatttcgccgctggattcgtttctgaaaagagttgacgtctcgccgtaacgaataggcaaatcacggtaagatttaagtccgttattataaacggtgtattggaaaggacaagtcatggggcgcaaagcgtaaacctcttcgtccttttcctcgtcgcccatgacaaacattccgtctttgtagtggtcccagtgcccgcttattttataaaggtcgctcttcgccatataaggggttttggtaagaacatatccgcgctttctttcctcgtcttccacgaatcggctgagaatctggaaaagtcttgcgcctttcggcataagaagcggcaatccctgacctatgacgtccgacgtcatgaaatagccaaggtcgcgtccgattttattatggtcgcgcagtttcgcctcctccaacgccttaagataatcctcaagctccgatttcttttcgaacgccgtaccgtaaatacgagtaagcatcttattcttttcgttgcctttaaaatacgcgcccgttacttgtgtgagtttgaaatttttaattttgcccgtagacggcacatgaggtccgcggcaaaggtccgtaaactcgccttgagtataaaaagtaattacggcatcggcaggcagttcctcaataagctgaactttataaacctctcctctttccttcatgaaagcaagggcttcatcacggaaaacttcccgtctttcgaaaggatagtccgctttgactatagccgccatctccttctcgattgcgtcaagatcgtcttttcctacaggcttatcaaaatctatgtcgtaataaaatccgtttgacacagcgggtcctattgcgaatttggcgtttttataaagtctttttaccgcctgagccatgacgtgagccgcgctgtgacggtaaacctccaaaccgcgctcgtcttttgcggtaagcaaagaaagcgaacagtctttatcgggcttgtagctcaggtccacttccttaccgtcaaccgccgcggcaacagccgcacgggcaagcccttcgcttatggattttgcaatgtcaagacaggaaacacctttttcacattctataacactgccgtctttaagtgtaattttcatatattaaacctccattcattacaaaataaaaagtccttaaagtcattaaaagactttaaggacgaatttctccgtggttccaccttaattcgccgtacaaaagaacggcctcgttaaaaatccgattgcgtcggaaacgcgcttccgcatcggcggtttcgtcattgcgctctcacgcgcgtcgctttcagccaaggcaacgctctctgaagcatcaaacgcaagctacttgtccgatgtttaaggaaatacaggttttatgcccgatttagctaaattataaacccaaacaaaaacatttgtcaacgattttcaagcatttcagtacaattcgattttaattctcgacgtagcaaaagtcagcacggaaatcttgccgcaaccgccctctttcaacacacgcgaacattcttccgcagttgaacccgtagtgaaaacgtcatcgataagcaaaacgtttaagtcttttaccgacctttcgcccgataaagcgaaagcgccttttacggcttccgctctttcgcgcctgcccattcgcgcaaaagtagatgtctttttaacgcgtttgagaaggttacaaagcgggatatcaagaatatctttaagcgccgacgcaatagcttccgactgattataacctctttttctttcgcggcttttcataagcggaacgaaagtgattacatccaccgtcatattgttttcgtaaaatacgtcagccatgaactgcgccattatttcgccgagatatttgcccgctccgaattttagtttacgcacaagcccgactatttcgttttcgtacacaaacggagcgcgagccatatcaaaagtaaagccttcgttctggcaaaaatcgcagtaatcagccatattcttcatggccctgccgcatttaacgcaaaatttcgtgttgaaagtaagtttacaacgttcacacacgcaataacgcgtttctttgggaagatcgtcgccgcatattacgcatttaatgcccgacggataaaacaattccgctattacgcgcgacgctttcattatttgagtcttaaagtttctcttgcgataaccagttcttcgttggtaggtatgatatataccttaaccttagacgcaggtttagtaagcaaagtaatttctccgcgcggcacgttattgtttttgtcgtaatcgaaatctatacccaaaaactcaagaccgttcataaccttttcgcgcactatttcggtatgctcgcctataccgccggtaaacgccacgcagtcaagcccgcccatcgccgccgcataagaaccgatatacttctttacacggtaggaaaacatatcgatggcaagtcttgccctgtcgtttccgtcgttcatggctgcaacaaggtcacggaagtcggaagaaacaccgcttacgcctaaaacgccgctctttttattgaggtaatttgtggcctcatgaatatccattccttttttatccatgagatattctataaccgccgggtcgatatcgccgcttctcgtgcccattacaagcccttcgagcggagtaagtcccatggaagtatccacgcattttccgtccttaaccgcgcttacgcttgcgccgtttccgagatggcatactacgagtttaaaatcctttcgccccatcaatttagccgcctctcccgatacaaacaaatggcttgtgccgtgaaagccgtattttcttatcttaaaattcttatagtcgtcgtaaggaatagcgtacatatacgcataatcgggcatagtagcatggaaagtcgtgtcgaatacggcaacctgcggcgcgtgcggcattgcggcacggcaagctttgattcccatgatgttgggcggcatatgaagaggtccgagatcgatgttgctttcgatttgtttaagcgtttcgtccgtgacaagcgcgctttccttaaaaatcacaccgccgtgaagcactctgtgaccgactgccgcgatttctttcatatcggaaataacgccgtaatttttatcgacaagcgcgtcgagcaccatttttatagcctcggaatgagtgggcattgcgccttgaatacgcacttcctctccctttcccctgtgaacgagaaccgagccctgctggccgatacgctcgcacacgcctttagctaagacgctttcgttatccatttctataagctgatatttcagcgaagaactgcctgcgtttacaacaagaattttcattttcgtcacctttattttttgaaaaccaatgattacagtgtctgcaaagcggtcattgcaacaacgtttacaacgtcatccaccgagcacccgcgcgataggtcgttgacgggcttattgaatccctggcatatgggtccgattgcttcggcgcccgcaagacgctgtaccagtttgtatccgatgttgccggcctgaaggtcagggaaaataagcacgttggctctgcccgcaacaggactgccgggcgccttaagagaggctacgctttcgacaagcgcggcgtccgcctgaagctctccgtccacgttgaggaaaggcgcggcttcggcaacgattttggtagcctgcaccactttatcgacaagctcgtgttttgcactgcctttcgtggagaaagacaacattgcgaccttaggatcgattcccgcgattttcttcgcgctgtcggcagaggctattgcaatggcggcaagttgttccgccgtgggattgggattaaccgcgcagtcaccgaaaaccagcacgccgttttcgccgtatttgctgtttcctggcataatcatgataaagcagctgcttactgtggaaattccgggtgcggttttaataatctgaagcgcagggcgcaaaacgtcgcccgtcgcattgacggaacctgcaaccataccgtcggctttgcctgtttttacaagcatcacaccgagatacagaggatttttaacaagctttgccgcctgctctttatccatacccttcgcttttctcaattcgtaaagcgtatcggcataataagtaaggtcttcggtttcgggattaaaaatatccacgcctttaagattgacgtcggggcactttttaagcatgacttcggggttacctataagcgtaacctttgctattttttgtctggtaatgctttcggcggctcttattatacgttcctcttcgccttcggcaagaacgatacgcctgttaagttttgccgccttttccttaatactttccaacaacgacataaatatttctcctttccgcgccttaaatataggtgcaaaattattgactaaatggtataataaagttgctttgactgaaacgttcagtttttattctgttcgtttgacgccataaaatattatatcacctaagaaaaaaaatgtaaaacctttatcgggagataatcatgaaaatttgcgcagtgatttgcgaatacaacccctttcacaccggacacctttaccaactgaacgaagccgcaaaaaagtttgaccatacaatatgcatcatgagcgggaacttcgttcagcgcgcagaacccgccgtagccgaaaaatacgtcagagcggaaatcgcccttagatgcggcgcctccatggtgctggaattacctatcatttacgctaccgccaacggggaacgatttgccgacggcgcaatcaaaaccctaaaaaacctaaaaaacgttgacgctcttgttatggggtgcgaaaccgccgacaccgacgcgcttatcaccttatcggaaattcagtcgcgcgaggacaatgattttaaaacgcttcttgcaaaaaatctcgacaacggtttatcttatgcggccgctctttcttctgcaacttcggtcatggcagaaaaggaaaacataccttcagacaaatccgccgagatactttcaaagcccaacaatattttgtgcatcgaatatataaaagccctgaaaagaaacggactttcggttaaacctgttttcgtaaaacgtaaaggtaacgattataacaatttttccgcaataggaaactatctttccgcaagcgcattgcgcgaattgatatataaaggcgattataacgcggcggcgccctaccttacgggagaaaacgaaatactttttgaagaactaagacgccataaacccgacaaaaaagccttttccgaccttgccgtttataaattgcgcacttcttcgacagcagaaatcgcaaaagctttcgactgccgcgagggtttagagtaccgtttgtccgaagctgcccgcacctcaattacgcttgacgaagttcttttaaagtcaaaaaccaaacgatacaccatgagcagattaaaacgcgtagttttacaggtaatgttgggcatcaccgaagatatatatgaaaattctgccgttcttccccctcgtttacttgcaataaaggaaaatttcaagccctacctcaccgaaaacggcaaaaacatgattatacgttccgaagatttaaaccgttatgacggagagtttttcaataaattttttgaaatcgaaaaaaaagcggcggcgctttattcggtcgtcacacacaatcaaaacgacctttttcttcccggtaaacttttcagcatttaaatgtcgtgattattatacaaagctttgaagaattaatatcgctttttcttaacaaattttaaatcctgaaaatcatcagcaagcttataaaactttatataagcccacccgtgaaataacgcatacttgatgcaaacagaataaaaaaacgaccccgcataaagtcaaacagacattgcggggttatgtttgttgaattaatgtggagtaaatagtgttttataatctttcagccacggaaagaataagcgcttcgctcttttcccagcctaggcagccgtcggtaatcgacttaccgtaaacagtaccgtcgggaggctgatttccgtcctcgatatagctttcgattaaaaagccctttaccagtttcttaaagtggtcgcaatgacggcaattccctacaacttccttaacgattctcacttgctcaaaaggatttttactgctgttggaatgatttgtatcgataatcaccgcaggaaaatgcaggtcttctttaaaatacatatcgtaaaaacgcatcacgtcctcgtagtgataattgggtacgttgttgccgtaaacgtccacgcttccgcgaagtattgcgtgcgcataagggttacccgaagtacgaacctgatatccgccgtatttgaactcgttggaaatctgagcggcataaatggagtttaaaagcacggacaaactgccgttcatggggttttttattccgacagccacgtcgaatccgcttgcgacaagtctgtgctgctgattttcggtcgagcgcgcacccactgctatataggtaagcaagtcctggatgtaatcgacgttatcgggataaagcatttcgtcggcggcagacaacccgctttcactgatagcccttgcgtgcaatcttctgagcgccagaataccagcctgaatgtcggtaagcttcttatgcggatcagggctgtgcatcatgcccttatatccctctccgcgagtacggggcttattggtatacaaccgcgggacaataaatatcttatcttttactttttccgcaagacgggcaaggcgcgatacgtaatccagcaccgagtcctcgttatctgcggaacacggtccgattataaacaacattctgtcgtctttacccgatattatgtttttaacggtttcgtcgcggctaagcttaatttttttcatttcaggtgaaagttttatcatttcaaccgcttcttccgcaggaattatctttttgattttttcaaacataacgttattccataccgtccttttgtagaaaagtttatttttaatgaagtttattcttaaagcttgtccgccatatcataaatgagtctttcggttttttcccagcccaggcagccgtcggtaatggactttccgtacacagtaccgtcaggcggctggtttccgtcttcgatatagctttcgataagaaatccttttacgaattttctgaagtcattacagccggtcatgttatagattatctcttttgcgattctgacctgttcgagcggacgtttgctgctgttcgagtgattggtatcgattacgacagcgggatttttcagtccttctttaatatacatttccctaaggcgcataacgtcctcgtagtgataattgggcacgttattaccgtaaacgtccacgcttccgcgaagtattgcgtgcgcgtattcgttgcccgcggtacgcacctgtttattgagatatttgaattcgttgggaatttgcgcggcatatatggaatttaaaagcacaggaaaactgccgttcatgggatttttaaatcctaccgaagtatcgcttccgcttgcaacaagtcggtgctgttgattttccgtcgagcgcgcgcccaccgccgtataagacaacaggtcgtcgcagtatacggtattttcggggtaaagcatttcatctgcggcggataatcccgtttcgttcatgacgcggacgtacatatgccttattgccagaatacccgcctgaatatcggtaagttttttatgcgggtcaggactgtgcaacatgcctttatacccttcgccgcgagtgcggggtttatttgtataaattctgggaacgacgaaaattttgtcctttaccttttcgaaaactttcgccaaacgaacgcaataatcgcatacggaatcttcgttatcggcggagcacggacctataataagcagcaatcggctgtctcttcccgcaattatatctttaattgcagcgtcgcgctcagttttctttttcatctgctcttttcccggttttatagcctctctggcctcttccggactcatgattttacgtacttcttcaaacattaatgtttttctccgtatatgcaatcgtaactgaattaaatttttaagactgtttattgacgtttgggttaagcaccgcgccgcgcagttcgttgcggttagtgcgtattgtgttaagagtgctttcaaagaaaatttccgtttccttaaacatctcgtcaagatgctccttggtcttctgaacaagcgagtcgcattgtttataagtattgtctaacgcttctctgccttgcttctcggcaattttaagcacgtttgagctttccgataaatggaaagcgcgctcttcagcctctttaatgatattctgagcaaccgtgtctgcgttttcgagaatacgttcccgacttttaacgacgagatcggcttcggtcaaagacggcggaagcatccttttgatttcttcaaacaactcgatacatcttgtaaggtctactctgcttttaaataaaccttttctgccgttaagctcttcatccaattcggatataagttcgttaagattcaacttaattaaacgctccctatttaatttcttcggcagcctcctctacgatatagcgggacacgtcccctccgagctccagaatttcacgcaccaaagacgcggaaacgtgagcaaactcgtttgacgccataaaatagcacccttcaacgctgtcgtcctgcgatttgtaaacgttgtaaagattacgctcgtaatcgaagtccaccgcattcctgagccctcgcacgaaaactttaatatcgttctcccgcatgaaatccaccaagaatccgcggaacggcacaacaatgacgttttttaacgccccgagtgaaagctgagcaatcctgacacgtttttttatgttataacgacaggttttggcctgattgccgtcggctacggctacgtaaagagtcgtaaactgttttgaagcgcgttcggcaatttcatagtgaccaagcgtaaacggatcaaaagttcccgcaaaaaccgccttattattcattatgcccaacctccttcggatatgataaaaaagaaatcaccgtattgccgcatactcttctgtcctcaataaatttacccgttgaaaactctacgcttcgcgaatgttcaatcatcaatattccgtcctttgcaagcactccgaaaccgtcgattttatttaaaatttcgttttcaagaccgcctgcatacggcggatcggcaaaaataatgtcgaaacctctgtttttaagttttttcagcgcaaaagcaaagtccacgttataaacttcgtatgattcggacggcgcttttacgtttaaaagattttgccgaatcaacctgacgctttctgggtcgttatctatgaatattgccttttccgcgccgcggcttaaagcctcgatacccaaagcccccgtcccgccgaacaaatccagcaccgtcacgccttccccgtaacctttcgacgccagaatattaaaaagcgtttcctttatcctgtcggtcgttgggcgtactttatcgtttatcggggcaaatatttttttacctctgtatttaccgcttatgactcgcataattccagacccgtaaaattactcgtaactgcgaatttcgttaacgatttcgattgcgcggtttttaagcgacctgacgctataaacataacctgcaataaagccggcggaaacaataacgacggacaacccaacggacaacaaagaataccaagaaataaatcctgcttcaaactttataagtcccgcacctgtaaatacaagagtcataggtaaaaaaatcaacagcattgcgccttgcagccactgctgtttcaaaactatgcctaaaacagtaaacaaaagcgcagaaacaacaaacggcagaacatataaaagcgatttgaaaaaattgatttttattgtcttttttgaatgtatatccgataaaatcaatttgttctttaatttgtattctttctctcccgcaaatttgcccttttgaaattcaactatgactaccggtgcgataaaaacaattcccagcagaattttaacgaaccccggtatctggtccattataaaaattataccgaaaatcgagaacattacggaatacaaatacatgccgccgcttgtaagcaaatattcgatgataggtttacgctcgacaagtttttcaacttttgttccgtttgaaggttttttaacagccatttacgtcatatcctcccgattacgcgcgtaggtgtgacaatgacatccaacggcacgtcgtgtttttcgaattctatttcgtcgttttgttgttcgtcgtaagcaagccctattttgacggtgtgcctgcaaaaaagatatctgtcatagtatcctccgccgtaacccaagcgaaacttgtctttattaaaagccagcataggcactaccgtaacatcgatatttttccttaaagcttcagcatcaaaacgcgtagcttccgataaaaaattttcaattccctcggcgtttccaagcttgtccgttttataaatcatgtctaaattaggcaattttacgggcgtcatgttttccttgaaagtataaggaacgaatatttcctttttaccgaataattcggaaataatgtctttcgtgtctacttcgctgcccatggacaaataaaaaaacagggaatcgctttttattcccgataataattttatcaccttttgtcttattttgcaatctttttcggcgcgaaaagacaattcgcttctgattttaagcgctttaattctgaattcttttttgtcctgcgacataaatcctctccgctcgttcattaatcatcgtaagtacttcgtgtgaaatagtattatgcgtgacacaaacatcgtcaaaatcgatgttttcgcccaaaatacatacacgctgccccactttacagttaatatcgctaacgtctattatacaaacgtccatacatacattgcccacaacgggacacaacacaccgtctacggaaacataatgatttttaattcttctgaaaccgtcgccgtaacctactcttacggatgctattttcatttttttaggagcgacaaagtcaccgtaaccgatatgttctccggcggaaacgttgcctgtccatattatgtccgtgtatgtatccatagcagggacaacgcccctatatccgtatccgtacatagcaagccccacccttaccatatcaagataatattcgcgcggcaacacaaggcaattactcgcgcaacaatgaaattttataccggagtcttttatacaaaatatcgcccgtttaaattcgtcaaactgccttttacaagattcttcatccgattcgttaaaaaagtgagtgtacgcgccatgcaccgataaaccgtgtttaagagcagcttcgaaaaccttattaaaattatcatggcttaccccgaaacgattcatacccgtgtttaccgcaatggaaacctcggttgccttcccttttaaagcttcaaccccctcaacggaaaatacggaaggaataacgttttttggcattgtttcattaggataaccgtaattaaaaaccagtattttttttgttataccgctttttaccagctttaatgcttcatactcggtcgcaaccgcaaaacaatccacgtcttcttcaacagctttagaaaactcacataagccgtgtccgtatgcgttggcttttactaccgcgcaaaattccgtgttcgttacggatttaatgtagcttatattatgttttattttagacaaatcaacgcggacggtaagcatatattttccttttttactgcgaaaatttctatctatatatatgctttgcgccgcaaacgggttaataagctttaatcagtatttatccataaatagagttttgggggttttgaaaggccactctcccttaaaaaacgcatttgccaacgatgtgacgtcatactttttatccgaattttttaaagccttttcatcagttttataaacacggcgtttccctttagaaaattccgaaacaaaaactccgttgttctctgaaattatatcgtcgctgactttaattgtaaacgacgtttttttattgcgaaaaatatccgattccaaaaatttttctacgtttactattcgcatttgcacataagtcgattttccagccgaaaaattttcacaagtcatacctttaaagtaattgatttttttgaacgctccgcaatttaaaaacgcatgttttgccatgctgccgttgtctatcgccgaaaacgcaaacggtttattctttttgtcataggctatataaattgcaccgtcgtcaattgccagctcttgaatataactttcaaaaaaactttcgtcgtatacttcgaaaaagttaaatttttcagaaaaaacgtcataaatttttttaagttcatttttatcgcaagcttcagcttttttaattttataatctttaccgccgcatatcaatgtttttccacaataagacgcgtttacaaatccatatcttaaataataattataatcgaacggatacaatgcggcaaatactgcgttaccattgcgcattttacacaaagcgggttttattacgtttgacaccagacctcttcccctataggctgacaaggtagagaccgcgcttaaataatcgacttcaatattacaatcaaacagaagagctctttttttaacaatatagcatgcgcttacgagttttccgtccatttcaaaagtaacgatgttttcttcgggtacggaagatataaaataagcggcatattctttactgtccgacggaaaaccgtccatataaagctgaagcaatttatcgtcactcggtgtcaacggctctctcctcggcaaaatgtttttcataaagtattacgggattgtatgaaagttttgcgcggcgcaacccctcaatccccatatcttcttgcctgtttacgaaagttccgtccgggaaatatctctgcgcggcaaacttgtttatcgcctgatatattcctacgtattccgttaaccccttttcaaatatcgtatgaacaataccgttgcactcaatggacgaaacggagaatcccgcatatttgccgtcgactttaataactgcaatgcgtaaatcaagttgtttatgatacttaaaagcgcgttccacagcctttttttccacctccaaggttgaatgcgaggattcgtctttccagatttcgtacaacgccataagaccgtcgtaatcttcgggagtataatctcttacggtataattataagtattttcaaaacgcgtgacaaaattacgtttagaatgaaaagctttgccgcgaagatatttaaggtcatccgaattataaatgtaatcgtaatcgtttctgctgcttgccgtaagaaattttgtctcatccaaaagtgcggcctgttcggggcgtaatccgcgcaaacgataaacaattttcttttcccgcgcatattcggaaattttgcccaccgctttaagaaagtcggaatcgttcttcatatacggcggcataaaaacgatactgttgtaaaacgtattgtaaataaacagaattccgtcttctgtagccatcatcattgtatcattaacgtcccacaaaaaaacggttgcaaaattgtattcccaacccaaatcgtttttatcaatgtaactttgaaacaattttttatcgtcaacggtaagttttctgaattccataaagttgtcagtacctcaaatagctgtcgaatgcgttctcaatatgttccacgtgcttgtcaccggtataaacttctatcacgtcgaaacgcacagcacaattaaacaatctgtatttttttatatattgcgacgcgacctgatttattttcctgcgtttagcgtaattaaccgcgtcagccgcaaagccgtaatcttcgttaagtctggatttcacctcgacaaacaccacataccctccgtgtgccgcgattatatctatttcgcctatatcggtggtaaaattgaggtccattatttcatagcccttatttttaaggtactgaacggctatttcttcgccggatttaccctttaacttggtgcttatcataagtcggctccgataaaattttttatgaaagattttctgtgcaaaggacagggcccgcacttttttaaagcttcgatatgctccttggtgccgtaacctttatttttagcaaaaccgtactgaggataaagattatcgtaatcccgcataagcctgtccctggtaacttttgcaattatggatgcggcagctatattgtagctttgctcgtcgccctttattatggattttatgggaacggaaacctttacatcaactgcgtcgataagtacaagctcgggttttacgggcatattttctatacattccgccattgcgcgtttagttgcgcgaagtatatttatttcgtctatgacctcttgcggaataacgctgactttaaaaaccgctgaagctgttatctcacagtaaagcttttctcttttaggctcggaaagttttttactgtcgtttatcccgtcaatcatgcagtcaagcggcaatatacagcatgccgcaaccacgggtccggccaaagggcctcttcccacttcgtccactcccgcaatagcagataaattaaaatttctgtcgaaatcaaaaaggttttgcgtcataacaattccgccttatccagagttattctgcccaaacgtccttttctgaagtcgtcgataagcgcaacggaagcacgctccgtatcgggtgcgccgcctttaagcagaaaagaccggctgcgcgccacttcctcgaggtccttttctcccgactcggaaggaataaaaccgtaccttgaagatatggcgtcgggcttcagcatagccagctcggataaaagctgaacggaaagctcgaaagtatccactacttcgtcttttatactgcccagatacgcaagatgacgcgccgaaacctgatcgttaagcttaggataaagcgtacccggcgtatcgagaacctcgatatattccccgacgcggaaccattgcttgccgcgtgttactccgggtctgtttcccgtaatggctttagcctttcccaaaagattattgataagcgtggatttacctgtattaggcactccgattaccattgcttttatggttgtcttaatgtttttcgcggcatatttctgtatttttccgccacaaagcttttttattattgccagcaccgaagcggtacttttagacacggtactgtttaccgtaattgcctcgcttctatccccgcacaacagcttgctccacttctcggtttccgcgctgtctgcaaggtcgcatttattaagcacataaactacgggcagtttttcaatataccgcgcaaaatcgggattaatgcaacttttgggagcgcgcgcgtcgagaacataaatcaaaacatcgataagcttgatgttttcttctatcatgcgtatcgattttgtcatatgtccgggataccagtttattaccgacattattcctctccgattaaatcaggtctgtttttcttggttataatcagcgactgttccttacgccacttttctatattggcgtgatgtccgctaagcaaaacttcgggcacggacagcccttcaaaaacctgcggacgagtgtactgcggatattccagttttccgtcagaaaacgattcttcagataccgattcggaacttcccaaaacgccgtctatataacgcgcaacgcagtccaccaacaccatggcgggcaactctcctcccgtaagcacgtaatcacctatggaaatttccatatcgaaacaaaggtcaagcaccctttggtcaacgccttcgtagtgcccgcaaagcaaaagcaagtcacggttttcacccgcaaggcttttgactaaaggcatattaagcgtttcccctttaggtgacatataaattcttaacgccttatgcgacgggtctacggcgttaaccgcgtcaaaaatgggttgaggcagcataaccattccggctcctccgccaaaaggataatcgtcgcatttgtgatgcttgtcggacgaatagttcctgatgtcggtaacgcgtatgtcaagtatgttgttttctacagccctgccgataatgcttgacttaagaggcgcaaacatttcgggaaaaagcgtaagaatatcaatcctcataaacgcaaactccgtcaaaaacgtccttttttacaatcacaacaccgctttccacatccacttttacaatcattttcttaagaaacggaaaccttaaagtctttttgccgtccgtaaccgtaaaaacgtctgccgcgccgtattggcttacgtccacgattttacctttttcgtctccgtcgtccgtaaaaagcttgcaacccgtaatgtccgcgatgaagtaactgccttcctcaagcggaacagcgttgaccctgtctatttctataaaaaggtctttcagcttttccgcctcgttacggtcggatactccggcaagttttaaataaacgaattcgccgtccacgcggcaattttccattctgtatggacgggatttaatataaactattttcagttttttaaagcgctccggattgtcggtaatgggcttaaccttaatttcgccccttataccgacagctcgcactatttgtcctactgtaataaattcgttcattgattcctcgcaaaaaaaacagtcgcgcatttgccgctttatattaaattagagagcgttaaaaagccctctaatcaaaagcgtattattgctcgtccgcctcaagaatgacaatcgaatatttgacgccttctttgccggaagcagcttttacaatcgttcttatcgccttggcaattcttccgtctttaccgatgactttacccatatcggacttgtcaaccttaacgtttatagtgttatcattatccgcggtgacaacgacgccgtctttattttcgacaagttcgctcaccaaaaatttaacaagttcaaccataaaaatcctcttaaaattgcacatagccttaaaaacaaggaacatctccctgttattaatctacgtacagataactgcgaaaaaaaccgcttttaatttaagccgaagttattcgcctttcttcttttttacggcgtttgtctttgcaggcatagcctttttctccaaaagacctgcgctgacaagcaaagcacgggcggtatcggtaggctgagcgccgttagcaagccatttgtttgccttttcggcgtcgattttgatttcggcgggttcggttttggggttgtaggtgcctaccacatcgataaacttgccgtcacgcggagccctggaatccgcaaccaccactctgtaaaacggcgatttcttatcgcccatacgggtaagtctgatttttactgccattgttcttttctccttaaaaaaattatttttttcttattaaaaacagaaattatctgcaaaataataacgtcttagaaaggaaatttgcgtttaccgcccttcatattaaaagagccgtttttcattcttttcattaattccttagtctggtcaaactgcttaagcaactgatttacgtcctgaatagacgtgccgcttccgtcggcaatgcgctttctgcgggaagatttaatgatttcgggcttatcgcgttcctgcttggtcatggaatgaattatcgccttgaatttttccatgcgcgcttcatcaatatctttttccgacagtttaagattgccgagtcccggaatcatacctatcaggtcgctcatattgcccatttttttcaggctttcgaactggacaagaaaatcgtcgagcgtaaaactcgcctcgcggaatttcttttccatttgcttcatttcttcttcggaaacggcggattgggctttttcgattaacgtaagcacgtcgcccatcccgagaatcctcgaggccatgcggtcgggataaaacggctctaagtcgcccgatttttcccctatgccgcaaaactttatgggttttcccgtgacggctttaatggacagtgccgcgccgccgcgagtatcgccgtcaagttttgtcaatattacgcccgtaatgtcaagttgctcgttaaacgcggaggcaaccgtgacggcgtcctggcccgtcattgcgtcaacggtaaggagaatttcggtcggagaagtcgccttcttaatctccttaagctcatccataagcgcttcgtctatatgaagacggcctgcggtatctaagataaccgtatcgtagccctttgagtttgcaacttctatggcttctttggctgttttggcgggcttttgcgtaccacgttcgtatacttcggtatttacgcttttcccgacgattttaagctgatttattgcggcgggacggtaaatatcgcaccctacaagcatgggctttttaccctgctttatcagatattgagaaagcttgccgcacattgtggttttgcccgcgccttgaagtccgcaaagcattatcacggtaggcggtttgggtgaaacctcaagtttagaatttgtgctgcccataagctctataagctcgtcattgacaagtttgacgacctgctgaccgggagtaagacttttaagaatctgttcccctaccgctttttcgcttacgcgcgcaatgaaatccttgacaacgccgaaattgacgtccgcttccaaaagcgcaatgcgtatttcgcgcatcgactgcttaatttccagctcggtcaattttccgcgcgatttaagcttgctgaaaatatgatttaatttttcactgagaccgctgaataaagccatgtctactcctctaagttttgtttaagacgtttcagaacatttttagcgtcgtcatatgcgccttgttccaaacttgacagcgcgtcggaaattccgccgtccatgattttgattttctcggaaaagccaagcttgtcttcgtaaaatttaagttgctcgacagctttgacgataacgtcgcgtaccgcttgccgtgatattcctgaattttcggcaatctcggcaagagaaaggtcataatcgtaataattgcgaataacctcgcgttgatgcggggtaagcaaaactccgtaaacgtcgttaagcccgcttatgcttaaatcttttttcaacgcgcaacccctcagaataaaacaaagtgtaaagcctgttgactttacacattaataatactacttttttctcacagtgtcaagcgtttttattcgaaaatcgcgtcaacgaacgccgtcgaatcgaaatcttcaaggtcatcgattccctctcccacgcctatatagactacaggcacttcaaggtcgcccgcaaccgcaagcacaacgccgcctttagccgttccgtcaagttttgtaagaattattccgtcgacatccacagcctcgttgaaaatatcaacctgcgataaagcgttctgtcccgtggtggcgtccaaaacgatatagttaagatacatcgcgtcgggcatttcgcgtcttatgatacgcgagattttaccaagctcgtccatcagatttttcttattgtgaagtctgcccgcggtatcgaccagaattacgtcgtcgcccttggctttggcgcttgtaagcgcgtcaaaaacaacggagcccggatccgctccttccgcctgcttgactatccttactccggcgcgctccgcccaaactgaaagctgatcggcagcggcggcacggaaagtatcggcggcgacaagcaacacgcttttaccctcttttttaaactttttggcaagctttcccattgcggtcgtcttaccaacgccgttgacgccagaaaccatgataacaagcggataatcatactcgggggcgggattttcgtcaagaattcccaccataatgcgtttaagctcttccttgacctcagcgcggtccctcattagcttttcgtcaacgacttcgcgaagttcgtcaagaatacgctcggtagtggcagcgcctacgtcggaagaaagcaatatacattccagctcgtcgtaaaagtcgtcgtcaagcgccccgcccgtaaaaagcttgtttagtttataagcaatgacgtcctttgtctttttaagcccggctttgatttttgcaaaaagtcccatttgatttctccgtatttttctcacacggcagcaaccgcgtcttcgagtttgaccgaaacgattttacttacgcccttttcctccatggttacgccgtaaagactgtcggcaagttccatggtgggcttacggtgcgtaattacaataaactgagtgtcctcgctgaaacggcgaagatatttggcaaagcggttagcgttcgcgtcgtccaaagccgcctctatctcgtccagcaaacagaatggcatgggcttaagcttgagtatggcaaacagaatcgcaatggccgtaagcgctttttctccgcccgacaaaagcgatatggactgaagtttcttttccggcggctgagcttttatttcgatgcccgcttcaagaggattttcgctgtccagaagctccaggtcagcattgccaccgttaaacagttccttgaaaatcttgataaaattggaacgtatctgcgcaaactgagtactgaaacgcgccagcatttcgtcggaaaggtcttttattattttaagcaaatcgctttcggctttttccaggtcttctttctgcgcgttaagcacgttatactcttcggaaaccgttttgctcatctcaattgcgtccacgttaacgttgccaagtgcgttcatggcgcgtttaagacgcgcagtttcctgaatgcctttgtttgcgtcgtagccttcttccttaaattgcaaacagtcttcgtattccagattatactcttctcttacgcgctgctccatctgctcgatatccgtatcgaccttaagaagcaacatctcttcgcggctcttgttttcgcgcaacgtctgcaattcgttcataaggtcaagcctggtcttatccacagacgcaactttttcctgcaaagattccttataggaatcgagatgcgcaagtttttccctgatttcgacaattctctttgcgtccgcgctttcgtcgcgctgctcgtccgattgaatacctttttcaatggtggcaatctgagacttgttctcgttgatttcttcgttattggtttctatttccgtcgctacggcagctatatccgcctgcatacgctgaatgtcgttttcaagagttttaacggcactttccagttccgccgcggcaaggcgagccgcagtcagtttttcctgaagttcatcgcggtttaccttaagttcgtcatatttcttttgcctggtttcgtcgtcttgttttgcgttttgttttttactggtaataagttcttccagttcgccgacgctgttaatgtccgcatttatcttttctatgcgcaacttatccgcattgcccgatgaaacaaggtcggatataactcgtttacggttttcgatatcgatatcgagtttatttttcgcctcggttttcgccgcaatctgaaggtccgcttcgtgaatacgctgctgcatatccttaatcgaagattggacaaaatcaagctcgcttgcgcacttttccttcttttcggtaagacgagctatttcctccgtcagattctttactgtttcttcaagttccttaagctcgcggtcgtggctgaaaatattggctatatcgtttttcttgcttccgccggtaatggcgccgaaaggattaattatatcgccttcaagcgtaacaatcttaaaaccgtatccggtggatttagcaagcgacacggcagtatcgagattatttacaataaccgtattaccgagaagtcctcttattattccgtcgtatttgcggtcgtattttaccaaatccgacgcaactccgaatacgccgtccgccttaagcgcgcgatcgaaccgcgaatcgagatatctgggttttatggcagtcatgggaagaaaagtaattcttccgtatttcatttttttaagatagtcaattatgaattttgcggcgtcttcgtcgcgcgtaactatgttttgcatcgactgtcccaaagccgtttcgattgccgtctcgaatttggcgtccatactgataagttgagcgacgataccttctattttggaatttaactgagcgttctttttggcatcgttcatcaaattgcgtatactgaacgcaaatccgtcatacgcctcgcgcatttcatgcaggattttacgcctggattccgccgtgtaaaatttctcgttaagtttgtcaagtttcgtggtgatttcgtttgcctcgacaagcaactcgttgttgcgtttgtatgcattctgaagtttttcgccgagttggttcttgactgacgcgacggatttaagcccttccgaaagctcgctgaattccgattggtcacgatttaaaagttcggtttcgttggcaatccgcttatcgttatcttcaaccgaagcggaaagcgcgtcgcgctcggcaatcaatcttgacatattcgccttgatgtctgccagcctgtccattgcctccatcaaagcctgtttgctgttttgtgcgtcgttttcgtcacgcgtaagtttttctaccgcctcaagatacttctgacggtaattttccacttcggtacgcgcatctttaagcaagttttcacgctcagcacgctccgccttggttgtttcgatagctttaagcgtttcggtgtactttccgtcaagcgtttcgtttgcctcttccagtctgcggttacggtcgaaaagcgcggataaacgctccttcaggactttcatgtcgcccgcctgtttttccattccgacggtaagcgtaagcagctcctctctgagagcgttgatgtttttatcgatggaattaaggtcatacatagactcgttgtaagacgcaaccgccgcctcgtacgacttttgttttaaatcgatttcttccgtaatgccgttaagcctgccgtttatgacttctttggcctgcgaagcggtatcgtactgatgaatataagtgttgatttcatgatgcttaagactgtcgcgcatatccaaccatttacgcgcggtttcggcttgtttcatcaaaggttcaagctgacgggatttttcttccaatatgtccgtaatgcgcgtaagattatcacgggtgcgcgtcaatttgcgctccgaatccacttttcttgccttaaatttagatatacccgcagcttcctcgaaaatctggcggcggtcttccggttttgccgacaaaagctcgtcgattctgccctgtccgattatggagtaaccttccctgcccattccgccgtcgcgcaacaggtcgacgatatccttaagcctgcacggggtacggttaagcgcgtattcgctgtcaccgtttctgtaaagtttacgggaaagcactacttcttcgtaatcaagcgaaggaaacagtttttcgctgttgtcgaaaacaagcgcaacctcacagtacgacatggatttgcgcttttcggttccgttgaaaatgacgtcctgcatggagtttccgcgcaacagttttgcggattgctcaccgagaacccatcttatgctgtcggcaacgttacttttgccgcaaccgttaggtcccactattgccgtaacgcccgagccgaaaggaatttcgtacttgtcggcaaacgatttgaacccgtatatttctatcctcttgaatttcaaagtcctttctttccttttttgcaaatgtttaaatgcgattatttatacaaaaccgtttttgcgtctatgtttccatagtcacggaaaatacatcaatttcaaccttattccgacataaacgcttgtgtgttttcgataaaaccaggcagcataaactcctcttaaaaatccgactgcccgccatgaatattatatcacagcgggctttcgtttgtaaagcggtaaaaccttaacttttaattttggaaagagcttcctttgccgcattttgttgcgctttctttttgcttgagccctcgcccttaccgtaaaccgcgccgtttatctttacgcaaacgcggaacacgggtctgccgtccgacatttccaagtcttcgtattcgggctttatgccgttaagacgtttttgcgtgtaattctgaagttcggacttatagtcggaagtattaagcccgcccgtaagattgcgttttaaaaactcgcgcggtgcggaaagctgtctgccgcaatcgatgtaaacggcggcaagcagcgattcaaaaagatcggacttcactttcggcgaattgtttacgtctttacccgcccccttgcctatgcgcataaagccgaaaattcccatttcgtccacggcattgcaaagaggctccttagatacgatttgggaacgtatttccgtcatttcgccttcgtctttgttaagtctgaaatacagttcttcggaaaccaaaaaatccagaacggcgtcgcccagaaattcaagtctgtcgtaacttgtatcgcaatcacggttttcgttaagaaaacttgaatgggtaaatgcggttttcaacagttgtttatcgttaaaaacgtagccgatggcgctttctatttttttaacgtctttatcagtcattgccgtttccgttttcaacggtttcaccgacgccttcgggtacaacggctgaccttatactttcgaccagcttaagttcgttaaggtcaagaacctgttttacgcaagccgttacggactttgcgtttgatgaaccgtgagattttatcagtattttttccacgcccaaaaacgccgctccgccgaaagcatgataatccatagctgtctttaagttgccaagagcttttttcataagcaacgcgccgattttagcggaaaaagacgacattacttcttttttcatggttttcattaccatggacgcagtgccctcaatggacttgagcagaacgttacccacaaaaccgtcgcacaccagtacgtcgtattctccgctcagcgcgtcgcgcgcttccatgttgcctacgaaattcaacggcaattgcttaagacgcgcaaaaacctcgtgagtaagctcgttccccttcttatcctccacgcctaccgatacaagcgcgactctcggattttcgacaccgcaagccttcatgtaactgctgcccataagcgcgaactgaacaagatattcggggcggcaatccacatttgctccgcagtcgataatacaaaccttaccgcctttcatagtgggaagaagcggacacaacgcgggtcttaacacccctttaattctgcctattttgaaaattccgcctgcaagcaccgcacccgtactgccggcggaaatcattcccaccgcttcggggtctgacttggtgatttcaagcgcgcgcacaagcgaagagtttttcttcgtccttatggcaacggtaggcgactcgttgttggaaacaagttccttggcgtcctcaaccataattctggatttatcgaaaccgtacttgtcaagttcgcttttaatcgcgtcgccgtcaccggtaagaataagctgaaagtcgctttttatacttaaagcgtccacggcgcccttgactatttcctcaaatcccttatccgcacctaacgtatcgataacgatttttgtcatgataaaaattcctttaaatgtataaaattagccccgtaaaccatacggggccgaccgatataaaatcaaccttattctttatcctttttaacttctacgcttctggacttgtcgtaataaccgcaagctttgcatgccctgtggctgagtttgggtgcatgacactgcggacactcaccgacggcaggagcttcgattttccaattagcgtatcttgaattgcccgcctgcttggaaactttatgtttcgggactgccatattaagcacctcctgtttgaaaatgtttgctttacttaaatcgctatactattataaggtaaaaggctgattttgtcaacggaatttaagtcaaaatacaaaagatttgattaattagttgttgttttccctttttagcgaattaagaactgatttcgggaaaaactcctcacagatattttatcataccgttttcggtgtttacggccgccgttttacctttaagcactacttctcttaaaggttcgtcttcggcatattgattttcgtaattcacgatatatacgcgtttaccgaaatccccgtcaaaagtataagcgcggattaaagcacatgaattaatatcctcctccgctacgtcgcttacgtcttgaccgcgcccgagcaaaagtaccgaaacttttccgctgcaatacttataacccgcaaaaccgacaattcccacaggcttgagaaaagaatattcttcggttaacgcgtccgaaaatctgtaaaacggtattccgttatcaagaagctcgtacattcccgaataatcttcgctttcgggaaaataaacagcacccactttatatttttcgtttatctcaactataccagaagcaacgtccgcgcttagagaatttacgaaaatcgcgtcaatgcgctttccgcgcacggaatacatcatttcgttaaccgaataatagtttttcacgtcgcccacagcataaattttgccgtcgtgtcttataagcgaagtgacagccccgtattcttcgcagcaaatgaggttatattcgtatgaaagcggaatgttcatgtaaattacgccggttgcggtaactaatacgcaagcaatgatgaccaagggcttgaacttaggcatcataaagaaattactgcaaatgaaataaagtataaacacggcaaacaaaagcgaataggcaaaaattctgatgtctgccaaaggcaaagcggctacaaattccgccaccgtatccacaagtacaagcggaatccccgcaacggttaaaattattcccgcggaaggaatcagcatcgcgacgaccagcccgaacacaatggcgataaaagctaccgtcacaagcggtattacaagcatattcgtaaaaaccgaatataacggaaagttatgaaaataaatcagtattatgggcgtgattcctatctgcgccgaaagcgatgcggataacgacgaagaaagaaacttgggtaaaacttttgaaaatattctttcgaaagagcggctgaaaagtaaaattccgaacaccgccgcaacgctcatttgaaatccgacgtcaaacagatacagcggtttgacggcaaggattaacgacacggcaaaacatagagtgtttaaggtgtctttctgctttccgaaagtcattgcgataagaccggtaatacacattaccgaagcgcgcacgacggaaggtgaaaacgaagcaagaaagcagtaaaacgtaagcactgcggaagtgagagcaaggcttactattttacccgcgtggaaaattttaagcagaaatccaactataagcgtgacaaacccgatatgaagtcccgataccgccagaatatgacctaaaccgcttacgctgtaataatcccttacgtcatcctctaccgaacctttctcgcccgtaatcataccgaacgccacaggtccgtaagcaccgaggtttttatttagcgcggtgctcatatcgtttttgagattgtcgaaaaaagaaggctcggcattaataaattcgattgaactttcagccgtttccgcataatatctgatgttgttgcgataagaatatccgtcggtttcctcggcaaaaatgtcattgaacctgggttccgcgttaaaataaattctgtcgccgcgtttaagaaacgatgccgtaacgccgtcttcgacgttaacggtcagataaacgttgccgtttatactttcgccgtcggcaaacacgtcggtaatcagaaaggcagcggaaaaagtatcgaaagaaatatccgatactttgcctgtaaaattatattcgcggttttcgttaagcttattcgcccagttgtttttggtaacgataactcctgcggcagacaaaacggcaacaataaggcacaaaacgaaagttgcacattccacggctttattcgctactgcacagtaaactattaaagcgacgaaaataagcgaaagcacggttaaacaaataaccgctgaag

SEQ ID NO: 1634 - DNA, 7636 bp, Unknown
  16S sequences of unknown bacteria
ccatcatcgcactggtactgttcgttggaaaagcccatacaccggcagccaacggcaagattttcgtgaaatccaagtaatttttcccagtcagccgacatgaccgggaacccatttcaaacatagaaggaggatgaaatatgtcgaatattccaacagctcacaacaatgcaaaagcaaacgattttgccaaaaccgtactgatgccgggtgatccgctccgcgcaaaatacattgcagagacttacctggagaatccaagacaggtgacagctgtcagaaatatgttcggttacaccggaacctacaaaggaaaagaaatctccgtcatgggaggcggtatgggtatgccgtccatcggaatctattcctatgagttatttaatttctatggtgtagaccagattatccgtatcggttcggcaggagccttgcaggatcatattaaagtgatggacgtggtgatcggtatgggtgcctgcacggattccaattacgcatatcagtatggactgccagggacctttgcaccgatcgcagactatgagttaatgaataaagccattgagactgcaaaacgtcagggaaccaatgtagtcgttggaaatgtcgtgtcctctgatgtattttacaatgcagatccgactgtcaatgaccgttggcgcagtatgggagtactggcagtagagatggaagcggcagctctttatatgaatgcagcaaaagcaaagaaaaaagcgctctgtatgctgactatttccgatcatatttataccggagaggctctgtgtgcagaagaccgtcagctgggattcggcaagatgatggagatcgcactggagctggcatagttttcatattacagataaaaaggagatcgatgaaaatggacgtaaaagagattttaaagcacgtggatcatacactgctgacacagactgctacctgggcagagatcagacagatctgcgatgatgcggttaaatacggaactgcttctgtatgtattccacctgcatatgtgaaacaggtaaaagagtatgtgaaggatcagatggcagtgtgcacggtcatcggctttccgaatggctatatgaccaccgcaacgaaagagtttgagaccaaagatgcactggcgaatggtgcagatgagatcgatatggttatcaacatcggctgggcaaaagacggtaaatttgatgctattgaggaagaaatccgtactctgaaaaaagcatgcggttccaagattctcaaagtcatcatcgagacctgtctgctgacggatgaggaaaagaaagcaatgtgcaaagctgtgactgcagcaggcgcagattatatcaagacatctaccggattttcaaaagcaggagcaacctttgaggatatcaagctgttctccgaaaatatcggaccgaatgtgaagatgaaagcggcaggaggtatctcttctctggatgatgcagagaaattcttaagccttggcgcagaccgtctgggaaccagccgtatcgtaaagattgtaaaacaggaagaggctaccggatactaagaaggaaagttgaggaagacgatgaagaaactggaagaaacacagattcaggaactgatcgaaaaagcaatcagcatgatggatcattcttattctccatattctcattttcatgtaggtgcggcactactggcgaagaatggaaatgtatatggcggctgcaatattgaaaatgctggttatacacccagcaattgtgctgagagaactgcattttttaaggcagtcagtgaaggggtgctggagtttgatgcaatctgtgtggttggcggcatgaacaaggtgctgaaagagtatgcagctccctgcggagtgtgtcgtcaggtcatgatggagttctgtgatccggatacatttcagatcattctggcaaccagtaaagatcagtatgagatcttcacgttgaaggaactgctcccacttggattcggaccgaacaacttgaagtaggagaacacaatatggaaagatttaagagagtatttgtagtagtcatggattccctgggagttggggctatgccagactctgctgactttggtgatattggagtgaatacattaggccacatctctgagtctgtagacaccttcaagattccaaaccttcagaaactgggaatggcaaatattattccgttaaagcaggttccggcaaacgagcatccaatcggatactatggaaagcttcgggagaccagccgtggcaaggataccatgaccggacactgggagatgatgggtctggaagtaacgaagccgtttaagacctttacagagaccggctttccgccagaactgatcaaagagctggaagaacgtactggtcataaggtgatcggcaacaagagcgccagcggaacagagatcctggatgaactggcagaagaggaaattgcaactggacatatgatcgtttacacgtctgctgattctgtactgcagatctgcggtaatgaggagaccttcggattagatgagctgtatcgctgctgtgagattgccagagaactgactatgaaagacgagtggaaagtaggccgtgtcattgccagaccatatgtaggtaagaaaaaaggcgagtttgtcagaaccagcaaccgtcatgattatgcactgaagccatttggaccgactgcgttgaatgctatgaaggatgcagggctggatgtgatctccatcggtaagatcaatgatatttttgtgggcgagggtattacggaagcttataaatccaagagctctgtccatgggatggagcagaccattgatgtggcgaagaaggatttccatggactttgctttgtaaatctggtggattttgatgcgctgtggggacatagaagaaatccatcaggctatgcacaggagattgagaaattcgatgtgaacctgggtgtgctgcttgagacccttcgtaaggatgatcttctgatcatcactgctgaccatggaaatgatccgacctacaccggaaccgatcatacccgtgagaaagtgccgttcctggcttattccaaagcttttgaaggaagtggagcactgccggagcaggatacctttgcagtgatcggcgctacgatcacagaagatttcggtgtgaagatgccggaaggaaccattggtcactctgttctggaggaactgaaataaatggaagcggcagaacagaataaactgattgaacaacatcctatattggcagatctaaaagaagcaaaagagatcgtctggatcaatccggacaaagttatcacggcagaagggtttgccagagcacctcttggaatggcagatattgatgatgcggaagaaagacttaagagatttgcgccgtttatcgagcggtgtttcccggaaaccaaggagcgccacggtctgattgaatccccattaaagccgattccaggcatgaaggcacggatcaatgagcgttatggaagtaatctgaaaggtgatctgctccttaagatggacagccatctggccattgcaggatcggtcaaagcaagaggcggtatctatgaagtgttgaaacatacggaagatctggcactggagcatggactgttaaaagaaggcgattcctatgcgaagctggcagagccgaaatgcagggaatttttcagtcagtataagatccaggttggctcaactggtaatcttggtatgagcatcggtattatgggtgcggcagtaggatttacagtcattgtacatatgtcggcagatgccaagcagtggaagaaggatctgctccggtctcatggtgtgaccgtcatggaatatgagtctgattacagcgaagctgtgaaaaacggacggaaattgtctgatgaggacccgaagagttattttgtagatgatgaaaattccaaagatctttttcttggttatgcggtagctgccaaacgtctggcagaacagttgaaagagcagaagatcaaagtggatcaggatcatccgttgtttgtatatatcccctgtggagtaggaggcgcgccgggcggtgtgacctttggtctgaaagaagtatttggcgatgcggtccactgcttctttgcagagccggtacaagctccgtgtatggcactcggtatgatctccggccttcataacaagatcagtgtacaggatatggggctgaccggactgactgcagcagacggactggcagttggacgtccatccggattcgtaggcagtgtgatggtgcctctgctcagcggagaatttactgtggatgatgccatgctttacgaatatatgcgtgatcttctggatacggaagaggtgtttctggaaccaagtgcatgcgcaggattccagggacccgagaaactgtttattacagaggctgcgaaagcttatctgaaggaacagggattggatgagaagatggagcatgcttctcatattgtatgggcgacgggcggaagtctggtgccggagactatgagagaagagtataaaaatacgttttgaccatttttcgacaaattctgaaaatctactggacgaaatcgtgattttatgaaataataaatccgtatgggattcttgtgtccaaagacccttacaggattatttgaaaggagtttcaaacaaatgatttattcacgtgaagtagaagaaatgtgtccggtagctcagggcgtacatcatggcgctgctccgatcccggaggaggcaaaatgggtacaggcgaaagaagtaaaagatatttccggatttacccatggtgtgggctggtgtgctccgcagcagggtgcctgcaaactgtctctgaatgttaaagagggtatcatccaggaagcacttgtagagaccatcggttgttccggtatgactcactccgcagctatggcagcagagatccttccgggtctgactgttatggaagcactgaacactgaccttgtatgcgatgcaatcaataccgctatgagagagctgttccttcagatcgtttacggacgttcccagtctgcattctctgaggatggacttccggtaggtgcaggacttgaggatcttggaaaaggacttcgttctcaggttggtaccatgtacggtactctgaaaaaaggacctcgttatcttgagatggcagaaggttatgtaactggaatcgctctggatgctgatgatcagatcatcggataccagttcgtatctcttggaaaaatgactgactttatcaaaaaaggcgacgatccgaacactgcatgggagaaagcaaaaggtcagtatggccgtgtagcggatgcagttaagatcattgacccgcgtaaagagtaattctgggaggtaaacgaaaaatggcattatttgaatcatatgagagacgtattgataaaatcaacgctgttctgaacagctacggcatcgcttctgttgaagaggctgagaagatcacaaaagatgctggactgaacgtatacgatcagatcaaaggcattcagccgatctgtttcgagaacgcttgctgggcttacacagtaggtgcagctattgcaattaaaaaaggatgtcgtaaagcttctgaggctgctgctgcaatcggcgaaggtcttcaggctttctgtatcccgggctccgttgctgatacccgtaaagtaggtcttggccatggtaaccttggaaaaatgcttcttgaggaggagaccgagtgcttcgcattcctggctggacacgagtccttcgcagcagcagagggtgctatcggtatcgctgagaaagcaaacaaagttcgtcagaaaccgcttcgtgttatcctgaatggtcttggaaaagacgcagcacagatcatttcccgtatcaacggctttacatatgtagagacagaatacgatccatacaagaacgaagttaaagaagtattcagaaaagcatactccgaaggacttcgtgcaaaagttaactgctacggcgctaacagcgttccggaaggtgttgcaatcatgtggaaagagaacgtagacgtatccatcactggtaactctaccaacccgacccgtttccagcatccggtagcaggtacttataagaaagaaagactggaagcaggaaagaaatacttctccgtagcttctggtggtggtaccggacgtactctgcatccggacaacatggcagcaggaccggcttcctacggaatgaccgatactcttggccgtatgcattctgatgcacagttcgcaggttcttcttccgttccggctcacgtagagatgatgggtctgatcggtgcaggaaacaatccgatggttggtatgactgttgcagttgcagtagctgtacaggaagcagcagacgctggcaagttctaagctagaacgatagtctaagagataaatgtggaaaggcattcgccggatgaatccgacgggtgccttttgtttttgttgcgcgatcaaaaaagtgggaaaagttgaagccaaccaacatttcctataggcaaaatagggtattgacaaaaatacatttctctgctatagtaaagttactgtagcacatcaaagttacactgtgaaaaataaaaagtcaatggagactccgaagaagcgcgtcttgtattgactttttttagttaaaggaggataatattatggcaaaccttaaattgtgggattttgtgaaagaagtaaaagggacaggttacaaatgggtagacctgacacatgagctgagcccggaaactccgcactggtatggcttcaagccgctggaaggcaagctccttttcgactacagagagggaaccccggacgacatgatggctcccatgagatgtattcagtacagcgtagccagccagtatggtacccatgtagacgtaccgcttcatttctggggcgacggtcgtgacatgagcaagattaccgtaaaagagctggtatatcctctggtagtcgtagacaagtccaaggaatgtgccgagaacgccgaattcaccatgactgtagcagatctggaaaagtgggagagcgagaacggcagaatcccggagggcgcgttcgtagcattccgttccgattggcataagaagtccaatctggacaatccggacgagaatggcaatcctcattatccgggctggagcgtagacgcgatcaagtggctggtagaggagcgtaatatcggcgccatcggacatgagccggcagataccgaccccagctatgtgaccacaagagaagacgcatatccgtatccgggcgagcagtacattctggagactgaccgcatccagattgaggttatgagaaatctggatcaggtaccggctgtgggagctatgattgtatgcgcgttcccgaagctgaaggatggtacaggcttccctgcaagatgcttcgcaatctgccccgaagattaaactaggaggaattttattatgctggaatttgacgagcagctttcaagactgcagaaaccggatcgcgaggagatgacagacgaggaatacgctgtcttcaataaaaatgtggaggtcatggagaaaaactggggctttattaacaatctgtttaagattcttcccctgaacgccaaggagtacattggattcctgaatttcaag

SEQ ID NO: 1635 - DNA, 32759 bp, Unknown
  16S sequences of unknown bacteria
ggcgacaggcctcgcgcaaggggtagtaccccttgaccccggactgcgccgcgggtgcgcaggggcgtagggagacgtgtgagttggctgcgatgataccgccgctcggcgacaggcctcgcgcaaggggtagtaccccttgaccccggactgcgccgcgggcgcgcaggggcgtagggagacatgtgacttgactgcgaaataccgccgctcggcgacgggcctcgcggtttgctggttcggtgtggtttccttgtcagttgaataaaaaagaccgccattcggcggcggcgggcctcatggcttgcgtcaaaggccagcgtggatttgcaacccgcgctggcctttggtgttagaggaatcccctcaattacaatgcgtctttccatccgacgctagtggagcatggttcacacttaatgcagttcagccactaaacctgtttttctacgctgcaaaaccattccagccactttgaaacggcccaagtcatgccatttgatgcaagatgggggagcgtcccatgggacagtaagccccgatacgcgttggagcacagtatcatggcaaaggctaccgcacattgtcgcaggggctttccccttattcgttatccacatttagggccgaaaaacagcgctctatggcgagttctctccatcaagccgggcgtgtgcgtttgagtagaaacgccgcccggacaccgtaccgccgagtcattgacaaaaaccatcccaatgtggtatgactaaaaccatgacgcggcgaaagcaggggaagctttcctcccttttccccgcatacggaggaaaaacatgaaagttttggccatggatataggcggtacttttttgaaatacgccctgtacgaggacgaaaacgtccttgtgtccggaaaaacgccctctcgggccgccgaaggggctgaagcgctttgggcagtgctacttggtctaggcgaagcgttccgaggacagttcgacgggatcgccgtggcaacggcgggaacagtgggcccggagggacagatcgtgtacgccaatgaaaacatccccggctacacgggcgttcctttgaagaagtggctggaggagaccttctccgtcccggcagcggtgctgaacgacgtggccgccgcggcctatgcgctgacggacaccttcgaggactatttcttcatcgcccttggcaccggcgtgggaggggcctatgtgcatcggcggcagctgatgaacggcggcacgggcttcgggggccaaatcggctatctgcccatgaaaaacgggagtacggctgaccagacggcctcgtccgccgcgttggcccgacgggctggagaagcgggggagagggtgtttgaaaaggccggacagggcgacgaacgtgccgcccacattctggacgaatggctggatgatgtagcgcagatcatcctgacggcggagatcgtgacgggcgcggagaccatcgtactgggcggcggagtcagcgctcagggcgagaccctgttgtcgccgctgcgggcaaagctggatcggatggaaactccctatcggggaaaattcaggctgaccatcgccccggacggcaacgccagcggcacattgggagccagaaaatattttgaagagagtttgaggagagaaaaatgaacgcatttgagcaggtaaagggcggactgatcgtttcctgtcaggctttggccgacgagcccatgttcggcagcgaggtcatggcgaagtttgcgctggcggcgaagcagggcggagccaagggtattcgggccaacaccatcccggatattcgggctatcaagaaaaccgttgatctgccggtgatcggcatcatcaaaaaggattatcctgacagcgaagtgtatatcacgcccacctttaaggaggtgaaagccctgatcgacgagggtgtagatgtgattgcgctggacggcacccgtcgctcccgtccggctggggagacgctggagggactggtggaaaagatccgcgcatatcgaaaagacgtgctgctgatggcagacacctccacctacgaagaagccgtgtatgcggagaagctgggttttgacttcgcgggcacaacgctggtcagctacacgccctataccaagggcgaaccgatccccgcattgcctctgatccgccggttggcgcaagacctgttcatcccggtcattgcggagggcggtatttccacgccggaggagctgcgggccgcgctggatgcaggggcatttgcagcggtggtaggcggcgctattacccggccgaagcagatcaccgaacgctttgtggacgcattagaaaaataaacagagcgcccggtcttccgaagaaggaagaacgggcgctttctatgtgccgcacaagaatctttagcaaagccggtaggggagcaacgaaacgtttatagaaaactgaggtggctcggcctatctgttcgggagttgccacaaagccgctgaaaatggggcatatacattcgttggtggaaccctgctcgagagaatgtcggaacggcggcgataaagtatcacggttttgcgttcgggcagtttcaatcacctgagacgtaaaacactcttttatacaacatttccatccaaagaaaaagcccgaaatcgaatgatttcgggctttttgtaagcaataaagaaattcggaactcagcgcttgctgaactgaggtgcgcgacgggcggctttgagaccgtacttcttacgttccttcatacgaggatcgcgggtcaggaaaccggccttcttcaggggctcccgcagttcgggattgctcttgatgagagcgcggctgatgccgtgacggatagcgccggcctgaccagtcagaccaccgccggtcacagtgaccagaatgtccatgtcaccgccggccttggtcacatccaagggctgacgcacggtcatcttcagggtttccaaaccaaagtagttgtccagatcacgcttgttgatcacgattttaccgtcgccagcgaccagacggacacgggcaatagccttcttacgacggccaacggcactatattcaaccttcgccattttgattcgctccttccgtgtccttacttaatcaccagagtctcgggctgctgagcggcgtgctcatgctcggttccggtataaactttcagtttcttcgccatcttgcggcccagaggtcccttgggcagcataccaatgatcgcgcgcttcacggcgaactcgggcttttcttccatcaggtgacggtaagaagtctccttcaggccgccggtgtagccgctgtgatgatagtacaccttctgatccagcttcttgccggtcagcacaactttatccgcattgaggatgatcacatagtcgccggtgtcaacatgaggggtatagacaggcttgttctttccgcgcaggatcgcggcaacctggctggccagacggcccagcacaacgccttccgcgtccacgacgtaccacttgcgctgcacgtccgcggctttggccatgtaggtattcaaggtaatttcctccttcggagtgtgtgagtaggggtgcgcgtttgatggtcagcaaacggcgctagttcaatgagaatccggggctaacggagtctattgatgccaaaaatcattgtatcaaaggaaacggcttgtgtcaagtttttttccgggaaaaagaaagaatgaaagtcaaaatcatcgggtccgagacaagcaacatctgctttgagacaaaaggaagaaaatacgggtggaaacgcccgaaacggattcttcatgcatcgaaaacgtcctgcatcaccaccgtgcgcaggtggttcgcaaaagctccgtactgcttttccgtcaatttctccgggcaggacattacgatcagcttgtggccttcatagcctttgtgataggcgggatgcacgtgctcacacggattggccgtgaatccgcagcgctcataaaagcccttgcggcggatggaaatttcatccaccggcgggtcgatttccaaaatgacgggctttcctttttcattcagcttttccagcgccctttgaccgtatttttgtccccgaagtttcggaaaaatgcagaaatgctccacatagatgaacgatttcgtctcccagtacaggatcagccccgcccagcaagtgcagtcgtacacgcagtcaaaatgatactggggatggctcataatgcgctcctgcgaggcttcttcccgcagctcgtgataggggaagctgcttcgatacagggccatggccttttcatagtccgggtgactggctgaagtcatgcgtctgaattccatcgttctttttcccgctttgtgatttgctccgctgattttccgctcggcggatcgggttattataccgtatgctccatgcgttagcaaccattttgaggtaaaaaaccgccccgcacagggcggggcggctggaaggattttgatggtttttttaggaacggcttagtacatgccgcccattccgccagcagcaggagcaggagcgggttcgggagcggggatgtcggtcacaaggctctcggtggtcagaaccatcgcggccacgctggcggcgttctgcagagcggaacgggtcaccttggtggggtcgatgatgccgcgctcgatcatgtccacatactcgcccttcagcgcgtcgtagccataaccgtccttgtggctgatcttcacgttctccacgatcacgctgccgtcgataccggcgttcttgcagatctggcgcaggggctcttccagagcgcgcagcacgatctgcacgccggtcttggcgtcgcccgcgaagttgtccagctcagcctgcacggaggggatcacgttcatcagcgcgatgccgccgccggggacgataccctcttccacagcagcacgggtcgcggccagagcgtcttcgatgcggagcttgcgctccttcatttccacttcggtcgcagcgcccacctgaatgacggctacgccgccagccagcttggccagacgctcctgcagcttctcacgatcgtaatcgctggtggtttcggcgatctgactgcggatggaggccacgcgggcgtcgatgtccgccttgttgccagcgccttccacgatggtggtgttttccttgtccaccttgacctgacgggcggtacccagcatgtcgagggtggtttccttcagttccagacccagttcttcgctgatgacctggccgccggtcagcacggcgatatcacggagcatttccttgcggcggtcgccgaagccgggggccttgacggcgacgcaggtgaaggtgccgcgcagcttgttcacgaccagcgtggccagcgcttcgccttccacgtcctcagcgatgatcagcagcttgcggcccgcctgcacaacggcttccagcacaggcaggatctcctgaatattgctgatcttcttatcggtgatcaggatgtaggggttgtcgagaaccgcttccatcttgtcggtatcggtgaccatgtaagcgctggcatagccgcggtcgaactgcataccttccacggtattcatttcggtcttcatggtcttgctttcttccacggtgataacgccgtcgttgccaacggtctccattgcctcggagatcagcttgccgatctcgtcgtcagccgcagaaatgctggcgacctgagcgatggactgtttgccgttgatgggctggctcagcttcaccagaccgtccacagcggccttcacgcccgcttcgatgcccttcttcagcaccatggggttcgcgccggcggccagattgcgcaggccttcatggatcagagcctgagccagcagggtggcggtggtggtgccgtcgccggccacatcgttggtcttggtggaaacttccttcaccagctgagcgcccatgttttcaaaggggtcttccagctcgatctccttggcgatggtcacaccgtcgttggtgatgaggggagcgccgaacttcttgtccagcactacgttgcggcccttggggccaagggtgatcttcacggtgtccgccagagcgttgacgccgttttccagagcgcggcgggcttcctcgccatacttgatttgcttagccataacgattgcctcctaaaatatcagctcattgcccgagataacaggcaaaatcagaaaatgcttgcggtcaggcgcttattccacagtcgccagaatgtcgctctgacggacgatgatcatttccttgccgtccagcttcacttcggtgccggcgtacttggagtagatcaccttgtcgcccaccttcacatgcatggtaacttccttgccgtccaccatgccgccggggcccacggccagcacttcggccatctggggcttttccttggcggcgccggtcagcacgatgccgctcttggtggtttcttccatttcaacattcttaatgaccacacggtcgcccaaaggcttcacgatcataacctaaaacctcctgtttttgatcctgtctggtactgttagcactcgaatcatatgagtgctaacaacactgtgtagtttacgacattcccgccagatacgcaaacgaacatctgttcaaaacagcgcaattttccgattttctcactgaaaaacaatctattttgaatcattttttcgtttttttataaaatttctttgattttctttttatattgcttctttttatttttctctgtttcatttccagtccgtcatggtagaatgagcctgagaaagccgctggcagcgccccggctttccggcatccaaaggaggagctttccattgaatacgcccgcggaagcgctgcttcactggtacgatgaaaaccgccgggatcttccctggcggcataccaccgacccctaccgcatctggctttcggagatcatgctccagcagacccgggtggaatcggtcaagggctactacgcccgatttctggaggcctgccccacggtggatgcgctggccgccgcccccatcgagcaggttttgaagctctgggaggggctgggttattacagccgcgcccggaatctgcaccgggcggcgcagctcatcgtggacgagtacggcggggcgttccccacgacttacgaggaaatcctaaaattgcccggcattggcgcttatacggccggggcggtcgccagcattgcttttcatcaaaccgccccggcggtggacggcaatgtctatcgggtcatcagccgctttttgggcatccgggaggatgtaggctcgcccgccgtgcagaagcgtttccgtcaggaggtactggcgctgatgccgcctgaccggcccggagatttcaatcaggcgctgatggagttgggcgcgactctttgttcgcccacgtcgccccgctgcgaggaatgcccgtggcaggaaagctgcgacgcctttgacgaaggggacatggaatccttgcctattcacgaaaaaaagaagccccagaagatccttccggtggccgtctgcctgttgactttcggaaaacgcgttttcgtcatgaaacgaacggaacggctgctgaacggcctgttcgtgttcgccctgctggagggggaaacctccccggaacgctgcggccagcatttgcgcgaactgggctttgactgcactttccggcaaaagctgggggaagcgcggcacgttttcacgcaccgcatctgggaaatggacattcttcattttgatttgattgccgaaccgtcccagcccctgctggaacggatgggtggacgtatggtcagcctgcccgaactggaagcgctggccatgcctgcggccatccgcaccgcccgcgcccgggcggaagaactgctgaaaacgaaggaacccgccgagccctgaaaccggcgggttcctgttttgattttgcttacttcagatcatccgcgtcgtaattcagacgataggaataatagaagctcaacgtgtcgctatacatccggctcatggtcagggtgaagcgaacgtcgtccttcgtccacgtggcggacagatcgccgttctccacgtagtttgctacgccgccctcatcgaaggggtcgctgtccggcgcgccgtaggcggccgtcagggtctccagcgccgctcggaaagaagcgatgacgttgtctcccacgggcagccccatggagatcaggctcagccgggattctcccgcgctgttgttgcggtcggcctgaaaggtgatagactccgccaccagctcgccgatgccgatcttgacgttttccatggaaacggagccggtgcctgcgtcgtcgtcccaggtttcgaccagtgcgtcctcgcccagcaaggcgctcagctcgtccagactcatgccaaagcgaacgccgcagggcaggggagcggtcgccgtgctttcctcggcaaaggctgcaacggaacaggccagcacggccagcgtcaggcaaagggccagcattttctgatgaaatttcaagggtttcacctgctttcgctattatcgtaggtttttcaaccgaatcaaaaaattcgccggggcaaaggcacaatcctttgctccggcgaaactgttacatacctcaaatcattttgacgggcatgggcaggccgaggaaatccgccatcacgccggtcaggcgctccgcttcctcccgggtgggcatttcgcagaagatgcgcagccggggttccgtgccgctgaaccgggcgatgatccagccgttctcgaacagtaccttgcagccgtccatgtagttggtggccaccacggggatcgggaaggcgggcagctgcttttccaccatcagcaggtggtgcagcttttccttcatttcctgatcgaagggccagtcgaactcgctcatgtaggcggtgccgaactcggcgtagatctccttcatcagctggctcatggacttgccggtgacgctgagcatttccaccagcagggtggcggcgtagatgccgtccttgccgttgatgtggccccgcaccgtcagaccgccgctgctttcgccgccgatgacggcgttatgctcctgcatggcggcggaaatgtgcttgaagcctaccggcacttcgtagcaggtctcgccgaacgcctcggccacccggtccagcaggtgggtggtggcgatattacggacgcaggggccgtgccagttcttgtacttgagcaggtagtagtacaaaagcaccagcacctgattggggtggacgaaatgcccctcgtcgtcgatgatgcccagccggtccgcgtcgccgtcggtggcaataccgatgtcggcgtggttctgcagcaccgccgcctgcagcgcgcccagcgtgtccacattcggggcgggaagccgtccgccgaacagggtatcgtggcgctcatggatgacgctcacgtcgcagcgggccgtcagcagaatggtctgcagggacgtgcggctcacaccgtacatgggatccagcacgatctgcaggttgcggctgcggatcgcgtccatgttcacgccgcggatgatcgcgtccagatactggttctggggattgatctcctgcaccagacccgccgcgatggcacgcttgtattcgatggagtggatttctttgggatcgacgtcgttggccgccgcgcccagttcgttggtcacgctttccaccgcgtcccggccgcccttggtgaagagcttgatgccgttgtacagcgccggattatgactggccgttaccgcaatgccgtagtccagcccgtaatactgcacggtgaacatgatcagcggcgtaggggcctcccggttgatcatcagcacgtgaatgccttcgcccgccatgacctccgcggcccattccgcagcctcccggctcagaaaacgccggtcataaccgatgcagaagcttttgtcggccacgtcctcccgcttcatccgctgagccagagcgaacatcagcttgcgcacgttttccttggtaaagtcatcgccgataatggcgcgccaaccgcctgtaccaaaagaaatcattctatatccccactttcgtgataaatgtattattccgaacgtcctcatgataacaccggataaagagggatgcaagtcctcccccgaaggttttttacataatttttactttaaaaaaaggacggacaaccgattgtccgccttttccattgtcttcctttatttttcgtttttcttcagccccagccgggcttcctccatctggcagagccggtcacaggcctgatccagcagccggtacacatagcagcggctgaaatgcatcctccggctgatgatgccgcaggggatgccctccaaaatgcgctgggtggccacggcccgcagcactccggcgggcagcctctccaccagcgggcgaatgtccttaagcagcgcgtccagctccttttgcagttcgccgatgccccagcgctcggcgtcgctttccagcaccgcatattctacgtggcttcgttccacgccgcgcccgtagcgcacagggctcggacggctgccggcccgcagggcggagagcttcagatattcgattctccccaccgcccgtgtaatggcgcggtggatctcgtccacccgcttcagcttatcttggagggaaatgggcaggtcgtatgagttcatgcaggtttccttttcttccggcatacgctttcctttccgctcccctttccgtcacagcgcatggcctcgcccggcgcacagggggcattgcatccgccgccggatgggcgcattttagagaatccgatttggattttcaacgcccgatcccggcagaacgcctttttcaaatacgaacacatgttcgtatttctgttctcatcataaggggaacgggaaggaatgtcaagcagaaaatttccgcgctttttgtcgatcaggtctgcgcaaaccggcgagcggttactgcgcttttctaaaaaggccggttctgaccggcgcggcgatccccatattttttccattttttttccgcaaaggattgaaaaccatggatagcatttgactttcccaaagacgtgtgctatactccctgttgttgtaaaagccaatactccggcgctttacgtgtcggaagaaacgaataggagatgcgaattatgaagaggatcaagaccatcgccacccggaacctgtgcgagagcgccaaaaagggcggctgcggcgaatgccagacctcctgccagtctgcttgcaagaccagctgcggcgtggccaaccagaagtgcgaaaacaagaacaagtaattttggaaaccacaggaggctgttgcggcaaaatgcggggcggttcgcgccgtgattgctgcggcagcctttttgtgcatctgcgaaagaacggaggaaccaagcgtggttcatcagtatcagcttaacggctacaacatcgtgctggactcctgctccggctccatccacgcggtggacgaagtggcctacgatatcatcgccctttacgacaagcacactccggaggagatcgtccggctgatctgcgaaaagtacgcggggcgggaggacgtgaccgaggccgatgtgcgggagtgcatcgccgacgtagacgaactggtcagggagggaaagctcttcagcccggacaccttcgctccgctggcgggcaccttcaaggagcgcagcggcgacgtggtcaaggccctgtgcctgcacgtttcccacacctgcaacctgaactgctcctattgctttgccagtcagggcaaataccacggcgagcgggcgctgatgagctacgaggtgggcaagcgggcgctggatttcctgatggagcattccggcagccgcaccaatctggaagtggacttcttcggcggcgaaccgctgatgaactgggacgtggtcaaacggctggtgcagtacgcccgcagcgtggaaaaggagcggggcaagaatttccgctttaccctgaccaccaacgggatgctgatcgacgacgatgtgatcgacttcgccaacaaagagatgagcaacgtggtgctctcgctggacggccgtaaggagatcaacgaccagacccgggtggactacgcgggcgtgggcagctatgaccgcatcgtgcccaggttccagaagctggtcaaggcccggggcggaaagaattactacatgcgcggcacttttacccaccgcaaccctgacttcaccaacgacgtgttccacatggccgatctgggcttcaccgagctgagcatggagccggtggtctgtgctcccgacgatcccgccgccctgacgccggaggatctggagatcgtgaaggagcagtatgaaattctggccaaggacatgctgcgccgggaaaaagagggcaggcccatcaccttctatcattatatgctggacctgaccggcggcccctgcgtgtacaagcgcatttccggctgcggctccggcacggaatacatggccgttaccccctggggggatctgtatccctgccaccagttcgtgggcgaggaaaagtacaagctgggcgatatctggcagggcgtgaccaatacggccctgcgggaggagttccgctcctgcaacgcctacgcccggaaggaatgcgacgactgctgggcgcggctgtattgctccggcggatgcgccgccaacgcctatcacgccacgggcagcatccgcggcatttacgagccgggctgcgagctgttccgcaagcgcatcgagtgcgccgtcatgatgaagattgccgaagaggacgcgcaggagcatgaagacgccgatcgctgattttgtccggtgctatcaggagtccggcatggtgcgtttccatatgccggggcacaagggcgcgggccttttgggctgcgagagcttcgacattacggaaatcgccggtgcggacgagctgtacgacgcgagggggatcatcgccgaaagcgaacggaacgccgcatccctgttcggcgctgggcgtaccttttattccacggagggctccagccagtgcattcgcgccatgctgcggctggcgatgctacgtcaaaccggcggtacgccgctgattttggcggcgcggaacgtccacaaggctttcgtttacggggcggcgctgctggggctggaagtacgctggctgtggccggagaagacaaattccctgtgttcctgccgcatttcgcccgctcagctggaaaacgcgctggcagcgcttccttcgccgctcgccgccgtgtacgtcaccagccccgactatctgggcggcatggcggatgtgcagggccttgcggaggtctgtcaccggcataatacgctgctgctggtggacaatgcccacggcgcgtacctgcattttctggaaaagcccctgcatccgctggatctgggggcagacctgtgctgcgattccgctcacaagaccctgccggtgctgaccgggggcgcgtatctgcatttgagccgccgagtctctgacgagctttgcggcgaatccaggcaggcactggcgctgttcggctccaccagtccgtcctacctgacgctgtgctcgctggatcggtgcaacgcctatctggccggggcgttccgtcaggaattggcggaatggacggcccttttggacgagacccggcaaaccctgcggcaaaacggctggcaggcggaggaaagcgaccccctgcggctgaccctgcgggccccggcgggacagacgggaaccgggctggcccggctgctgcgttcagccgggatggaatgcgagtatgccgacggtgaccatctggtgctgatgctgacgccccagaaccgtccggaggagctggggcggctggtggaagcactgggccggaacgaccgtccgcctaagccgccggaaaacctgccgctgcccaaggcaaggcaggaaatgtccatccgggaagccatgctgcgcccacaggagcgcatttctgcggaaaaatcgctggggcgcgtctgcggctcgcccacggtggcgtgcccgccggccatccccatcgccgtgtctggcgagcgcatcggcccgcaggcggcggcgctgtttcgccgctacggcgtggaaagcgtggaggtcgtgagagagtgaaaacgcgggggattccgcttgcaaaacccgccgccctgtgataagataggcactgttccgggccctgcgcccggcccaaaggaatgatttcgcatcgttttttcgcaaagagagccgctcctcggctgaaagggcggcggagaacggcgaaggacccgcctttggcgaagtcggccaatccccgacggcccgtccccgatacagggcgcacacgaggtgaaaacggcgcactgcgcgcgttttaagctgggtggtaccgcgaaggctcccttcgtcccggcgcacggcagggctgtgcgtgggagcgggaagccttttttcatactcaaaacacccgagcaacaggaggaaaaaacaatggcggaagaaaaaaaacagggctttgtggaacacattacgccccgggatgtggatttttcccagtggtataccgacgttatcctgaagagccagctggtggattacgcccccgtgcgcggctgcatgatcatgcgcccctacggctatgccatctgggagcgcatccgggaggaaatggacaagcgcttcaaggccaccggccatgaaaacgtctatatgcccatgctgatccccgaaagcctgcttttgaaggaagcggagcacgtggaaggcttcgcccccgaagtggcgtgggtcacccagggcggcaacgaaaagctgcaggagcgtctggccatccgtcccaccagcgagaccattttctgcgccatgtactccaagtgggtcagctcctggcgggatctgcccatgaagtacaaccagtggtgcagcgtcatgcgctgggaaaaaagcacccgtcccttcctgcgcaccagcgagttcctgtggcaggagggccacaccatccacgccaccgcgcaggaggcgcaggaggagaccatgaacatgctggaggtctaccgggaggtggccgagggcgagctggccatgcccgtgctggtgggccagaagagcgacaaggaaaagttcgccggcgcccgggccacctactccatggaggccatgatgcaggacggcaaggccctgcaggccggcaccagccacaatttcggcaccaacttcgccgaggcctacgacatccagttctccaataaggaaggcaagctggaatacgtgtacgagaccagctggggcgtttccacccgtctgatcggcgcgatcatcatgacccacggcgacgagcgcggcctgaagctgcccccccgcatcgctcccattcaggtggtcatcgtgcccatcgcggcccacaagggcggcgtgctggaaaagtgcgccgaggtgcagaaggcgctggaggccgaaggcatccgcgtgaagctggacgaccgcgacaccctgtcccccggattcaagttcaacgactgggagctgaagggcgtacccgtccggcttgagatcggcccccgggatctggaaaacggccagtgtgtgctgttccgccgggacacctacgaaaagcagacggtcaggctggacgagctgaccaccgccatccccgccctgctggacgatatccagaagaccatgtaccagctggcgctgaggttccagcaggcccacatccacgaagtccacagcatggacgagctgggcaaggtggtggacggcggcttcgccaaggccatgtggtgcggtgaccgcgcctgcgaggacaagatcaaggagcagtttaacgccaccagccgcaacatgcccttcgaccagacccctatcgacgatcactgcgtctgctgcggcaagcctgccaagaagctgatctatttcgccaaggcctattgatgatgaagattcagcaggttttatgggactggaacggcacccttctggacgatctggaatacagcattcaggtgcgaaacaacatctttccggcctttcatctgccgacgctgagcggcgtggaggaatatcaccggcagttcacctttcccgtgcggctgtattaccagcgggcgggcgtgacggatgagatcttcgacgacgtggcccatgcgtggatggccgaatacgagcgctgcatggataccatccccctgcacgaagacgcggtgaaaacggtggaacgcttccagcgggccggactgcggcagacggtgctttccgccagcgaacagaccctgctgcgccgtcagctggcgctgtacgggctggagggccgcttcgacgcgattctgggccggggcgacatctacgcgggcagtaaggaggccatcggccgggaatatctgcagggcagcggcgttccggcggaggccaccgtcatgatcggcgacagcctgcatgacgcggaggtggcccgtgcattggggacccggtgcattctggtagcccgcggccaccagagccgtgagactctgctggaagcgggcgtgcccgtggtggattccctgcggaaagccgccgactgggtgctggaacagcagtgaaaatttgcggcgcatgaaaaacatgcgattatcaaaaacggcggggagaaatccccgctgtttttcgttacccctgtccgcttcgaaaaggtgcttccagcataccggaacatggatgaaaaaaacaagacttgaaaaaagacactttttgtgtgaaaatttggaaaaagggatgcttgttttgcggcaaaatccctttccgacttttgatgcgcgttggcatgaaagaaatgcccaaaagcaggatagcagggaggaaaaaagataattttatacttttccgccacaggaaactgccagtacgttgcggcgcggcttgcacaggccgacggacagccgacgctgtcgatcgtggactgcatccgggaaaatcgttatgtttttgccgacgagaccatcgggatcgtgtcgcctacctatgattggggcctgccgaacatcgtcagggagtttttggagaaggcctcttttcagacggaatacctgtactttgtcgccacttacggaacgacccccggcgcgacgggctatatggctcaaaaagccatacgaggctgccaaatcagcgcgtactattccgtgcggatgccggacacgtggacgccgatcttcgacctttccaccccggaaaaggtggcgaagtataccaaaacaacagaaacggagatcgacggcattctttccgcggttgcggcacgccgcaccaaccggcatatggcgggacgcaccccggcctttctcaccgagtggatcgcccagccgctttatgatcggcaagtacgccgaacctcccatctgcgcgtggaggacagctgcatcggctgcggactttgcgccaaaaaatgcccggtacaggccattgagatacaaaatgggaagccggtgtgggtcaaggaaaaatgcgtgatgtgcctcggatgtctgcaccgctgccccaagttcgccactcagtatgggaaaaacaccaaaaagcatgggcagtaccttcaccctaagggaaagctctgattcccggcggctaaaacgagtacgatcaaccggcagtaggaaacactgacagacagaaagaaggcgcgctatggcaaagggtatcgtggtatgcggtctgaacggctgcggaaaaagtacgctgggcagagcactggccgaaaaaatggggctttatttcattgataatgaaaacctgtatttttcccgaaacgccgccgacgagccctatgcgaatccgagaacccgggctgaagcggaagcgctgctgatggaggaagtccgccggcacggcgattttgtgtttgcggcggtgaagggagattacggcagcgctattctgccgctgtatcggtacgcggtgctgatcgaggtgccgaaagaaattcgcctgcggcgggtgcgagaccgttcctttcagaaattcggcggcaggatgaagccgggcggcgatttgtacgaatcggaggaagtctttttccaaacagcggcagcacgcccggaggactatgccgaaagctgggcgcggacgctgccctgcccggtcgtcgtggtggacggaacgcgcccggtggaggaaaacgtggaacggcttgccgggctgcttcgcctgtagggccgccgaacgaaaaatagtagtcaatttccccgaaatgtgtaaaacttgagcattttttcctcgatgacggtttggaaagcggtttgcccgtggtatactgtactcgcggttgggaaagccctcccttttccgccgcttttttcaaatcaaaaagaggtgaagccgatgtgtgaaagcaagccccccttccccacggtggaaagtcagctcaggcataatattctgaagatcccgccggaggtctactcggccagcggcatcgtcatcaacggccgccgcatcaagagctttgtgtttaccaccgatctggcgatcatccgcaactgcgacgcggacgcggtattcgccgtttatcccttcaccccgcagcaggccatcagcgacgccatcatcaaggcgtcctatatcccggtgttttgcggcgtgggcggaggaacgaccaagggtctccgcacggtctcgctggccaaggatgtggaatgtcagggagccatgggcgtggtgctgaacgcgccgatctccgatttgaacctgctggcggtggtcaaggccgtggatattccggtcattatcaccgtcaccaaggaggatacggatatcgaggcccggcttcgggcgggcgcgtccatcctcaacgtggccgcagggccccgaacgccggacgtggtgcgcctgatccgggaaaagaacccgcaggtgccgatcatcgcctccggcggcaaaaccggcgagagcatccggcagaccatcgccgccggggccaacgccatcacctttaccccgccctccacgcaggaactgtttaaggaaatgatggagcgctaccgggaataagtttgacaccccctatctaacggattgcgaatatacacaaggaggaaatgaacatggatcagatcaccagcggacttcggaaattgcttttggccgggatcggcgcggcggctatcgccaaggaaaagggcggcgaggtgctggaactgctctccaagcgcggtgaagtgactgtggagcagggcaaggtactgaatgaggaactcaagcgtaacctgaaggagaccgttcgggagaacgtcgagaccgtccgggaaaacgtggaaacggtcaagcaaagcgtgaaggataacgtccgcgtccacgtgatctatcccgaggacgacctgatgaacgccgtggacggcatggacgaggaacaactggccgccctgaaggagcgcatcgccgcccgggaacaggctgcggaagagaaggaagcgcctgagaccgaagccgaaaccgaagcgaaagacgaggacgaaaaggatggcagcgcggaataacggtcggagcgacaaccggcagcgcctgatggagatcgtggaggtggtgcgccgccacgagatcaccaagggcatcacgccggacaagctctgcgccatcatcgaggaactgggtcccacgtttatcaagctggggcagattctttccatgcggtcggatattctgcccaaggcctactgcgaagccctgacccggcttcgcagcgacgtggcccccatcccctttgaacaggtaaaggcccagatcgaaaacgcctacggaagacctctggaggaggtcttttcgtcgttcgaccagcaggcgctgggcagcgcctccattgcgcaggctcacgccgccacgctgcagaccggcgaaaaagtggtggtgaaggttcagcggcagggcatacacgaggtcatgagccgggatatcctgctgctgaagcaggcctgcaagctgctcaagtacgcgccggtgaacgaactggtggactttaatcaggtcttggacgaaatgtgggtggtggcccaggaggaaatgaatttccagaccgaagccgccaacctggaacggttccacaagctgaacgccgacgtggcttttgtcacgtcgcccgccctgtaccgggactataccaccaccaccgtactggtgatggagcgcatcgacggcgtgggcatcgcccaaaaggatgagctgactgctgcgggctacgacctcagcgagatcggggccaagctggcggacaattatgtcaagcagatcatggatgacggcttcttccatgccgaccctcaccccggcaacctgcgggtgcgggacgggaagatcgtctggctggatatgggcatgatgggctccctcaccgaccggcagcgggagatgatcggcaaggccatcaccggcgtggcccggggcgatgtgaatgcctgccgggacgcggtgctggggctgggcgagttccggcagaagccggacaagcaccggctgtaccgggatatggaggatttgctggaaaagtacgcctccgccgatttgggcaccatggatctggccgaggtcatgcaggacttgaccgaggtcatgcatcagaacggtatcgccatgccctccagcctgaccatgctggcccgaggactggccaccatcgagggcgttgtggcggacctgagcccggagctgaacgtgatgagcgtggtcacggcccgtctgggacggcggatgctgtcggatgtggactggcgcagcgttctgacgcaggacgcgggcgcgctgtacgaaagcacgcataaatcgctggaaattcccgctcttattgcggacatccttcataccggcctgaaaggggaagccaatctgggcattgagcaccatccgggcgaagatatggcggaactggtgcgcggctcggtggagaaggtctgcggggcactgcttggctgcgggcttcttttgaccggcgcactgctgcacactacgccgccgctggccggagacctgtccgtctattccgtcgtctgcttcgtgctggcggcgggggcggcggtctggcccttccgcaaaaagaagaaaaagtgagcggttcgcccgataacgaggctcaaaaggtttttggggctttactttcttctgatttttcgctataatacctccgaagcaatgacaagggcggcttttgccattcctctgccaaagcgagtccgggagggtgcgagccggacggcagaaagtaaaagcccatcgccttggagctggccgctcgatcctcaaaggggaggacggcccgggagctcccgatacagagcgcacaggagtgggcggcgattcgccgtcaattcgggtggtaccgcggaagtatgatgtccatcattctccgtcccgttttcgggacggactttttttatgggttcggcccgcatcctcccggtcagccgggaatcattctccattcttcactaaggaggcatccccaacatgtatcgcaaggttccaacggacatgaagtttgtggagcgcgaaaaagaaacgctccgcctgtggaaagaaaagggcatcatcgaaaagtgcttccactgccgggacggcgcggaacgctttacgttctttgacggcccgcctacggctaacggccgcccccatatcggccatatcgagacccgcgccattaaggacctgatcccgcgtttccagaccatgaagggcaaggacgtgctgcgcaaggccggctgggacacccacggcctgcctgtggagctggaagtggaaaagcagctgggtctggacggcaagcctcagatcgaggcctacggcatcgagcccttcatcaagaagtgcaaggaaagcgtctggaaataccagcatgaatgggaagaaatgtctgaccgggtcggctactgggcggatatggagcatccctatatcacctataaggacgattatatcgagtccgagtggtggagcctgaagaaaatttatgaaaagggtctgctgtatctgggccacaagatcgcgccctactgcccccgctgcggcaccgccctgtccagccacgaagtggcgcagggctacaagaacgtgaaggagacctccgcgttcgtgctgttcaaggtcaagggcgaggacgcttaccttctggcatggaccaccacgccctggacgctgcccagcaacctggcgctgtgcgtcaatcccaatgatacctattgccgcatcacggtggagggcaagcattacatcatgggcaaggcgctggtctcctccgttttcagcggcaaggaagtacagtatgacgcggaaatgcccggtatcgacctgaagggcatggaatacgagcccctgttcgacttcgccgtgggcaaactggataagcccgcctggcgtgtgatctgcgatgattacgtcaccatgaccgacggttccggcatcgttcatatcgctcccgcctttggtgaggacgataaccgcgtctgtcgggagaacgacatccccttcgtgaacttcgtggacactcagggctgcatgaccgccgacaccaagtggccgggcgtgttcgtcaaggacgcggacaagctggtgctggacgatctgaaggagcggggactgctgttcgccgccgtgcccttcgctcacgattatcctttctgctggcgctgcaatacgccccttctgtactacccccgccccacgtggtacatcaagatgaccgccgtgcgggatcagctggtggccaataaccgcaccatcaactggctgccagacaacatcaaggaaggccgcatgggcgtgtggctggaaaacgtccatgactggggcctgagccgcgaacgctactggggcacgcccctgcccatctggcgctgcgaagagggccatgtccacgtcatcggcagccgtcaggaattgaaggaaatggccatcggccccgtggcggacgatctggagctgcaccgcccctatgtggacgcgatccagatcaagtgcccggagtgcggtaagcccatgacccgcgtcactgacgtgattgactgctggtacgattccggctccatgcccttcgcccagtggcactatcccttcgaaaacaaggatatcttcgaaaagcgcttcccggccaacttcatttccgaagccatcgaccagacccgcggctggttctacacgctggaagccatttccaccctgctgttcgaccgcgcgccctttgaaaactgcatcgtgatgggtcacgtgcaggacgcggagggccgcaagatgtccaagcatctgggcaacgtggtcgatccgtggtcggtgctggataagcagggcgcggacgcggtccgctggtatttctacacggccagcgctccctggctgcccagccgcttcagcgacgaggccgtcaacgaaggccagcgcaagttcatgtccaccctgcagaacacctacgcgttcttcgtgctgtacgccaatatcgacaacttcgaccccaaggatcaccccatggacaaggtcagtctgaccctgatggacaagtggatcctgagccgtctgaacagcaccatccgggacgtggacgacaacctgagcaattatcacattcccgaggccgcccgggccatcaccgacatggtggacgacctgagcaactggtatgtgcgccgctgccgtgagcgtttctggggtaagggcatggacgagaccaaggaagccgcctttgtcaccctgtaccacgtgctggtgacgctgagcaaggtcatcgcgccctttgtacccttcatggcggaggatatttaccagaatctggtgatctccgtgaatcccgacgcgccggaaagcgtgcatctgtgcgacttccccgtggcggatgaagccctgatcgacgaagacctgaaccgccagatggccgccctgcgggaggtggtcagtctgggcctgagcagccgctccgccgccaacttgaaggtgcgtcagccctctgcctgcctgtatgtgaagggcaccgagtttgacgaggccttccgggagctggccgaggacgagctgaacgtgaagaacgtggtcttcaccgaggacgcgcgggccttcaccacctacaacctcaagccccagatgcgcacgctgggcccgaagtacggcaagctgctgggcggcatccgcacggcgctgcagggcatggacggcaatgacgtggtggacaccttcgcccggggcgaaaccctgaaattcgacgtaaacggcacgcccgtcgagttggaaaaggacgacgtgctcaccgaagccacccagaagcccggcttctccgctcagacggacggcagcgtcaccgtggtgctggactgcaacctgacccccgaactgatcgtggaaggctatcagcgcgaggtgatctccaagctgcagaacctgcgcaaggacgcgggctacgatgtgaccgaccatattcaggtggtctatcaggccgacggcgagctgagcgccgccatcgaggcgggccgcgacttcatcatgaagagcgttctggccgacgaactgacctccggcgaggcagtggacggcaaggaatgcgacatcaacggcaaaaaggccaagctgagcgttcagaaggcctaaaccctgattgccccgggcaggccgccgcccgcccggggccgtttgtctgaaggagaaatacatgtatctttgcgatcaatggcgggattacgaagtgctggataccggcgacggggaaaagctggaacgatgggggaaggtgctgctgcgccggcccgacccgcaggtgatttggcccaaggcccggcctgaactgtggaagaaggcgcaggccacctatacccgctccgagaccggcggcgggcattgggatttccgggaaaaactgccggataagtggaccattggtctggacgggctgaaattctacgtgcgcccgacgggcttcaaacacacgggccttttcccggaacaggctgccaactgggcctttatgcaggagcagattcgttccgcgtccggctggaagcgccagccaagggtgctgaatctgttcgcctataccggcggggccacgctggcctgcgcggcggcgggggcccacgtcacccacgtggacgcggccaagggcatggtgctctgggccaaggaaaaccgcgatctcagcggcatcccggaggaaaacacccgcttcatcatcgaagatgcaaaggcctttgtgcagcgggaactgcgccggggcaaccattacgacggcattctgatggacccgcccagctatggccggggccccaacggcgaggtctggaagctggaaaacgagctgtacgggctggtcgatctgtgcgcacaggccatgagcgacacgccgctgttcttcctcatcaacggctacaccacgggcttcagctatacggtgctgcagaacgtggcccagcgctgcctgtgcggccggtacggcggccgggcggaggcggacgatctggcgctggccgtgacctccggcggggtgctgccctgcggcgcaacggcccggtggacgccccatgattaagcccgtctacgaggacaatcacctgctggtggtggtcaagcctcagggcaagctgacccagagcgacgagaccggagacctgagcctgcaggatgaatgcaagcagtacattaaggaaaaataccagaagccgggggaggtctatctggggctggtgcaccggctggaccggcccgtaggcggactggtagcctttgcccgcaccagtaagtcggcctcccggctcagcgaacagctgcgcgtccatcatatggagcgggaatatctggctgtggtggagggggaagaccttcctgcggagggaactctctgcgactggctcctgcaggacgaaaagaccgggctggtgcggacggtgcccgccggtacgcccggagccaaagaagcccggctgcgctacgaacggttgggcgcacgggacggaacggcactggttcacttgcggctggaaaccggccggaagcatcagatcagggtacagctcagccatctgggctatcccatccgctatgatatgcgttacggccacggggagcggggacgggacatcgccctgttcggcgcggtgcttcgtctgacccatcccaccctcaagaaagaaatgaccttcaccgcctgcccggaaaaccccgctttccggccttatgaaaaagagatcaccgcgtttctggcctcatgccagccgcgcgtttaaggagttattcagtggcaacatccaagttttcgtttgaagtcctcaagacctgcaagcagtccggcgcgcggctgggcctgctgcacacgccccacggcgacatccacacgcccgtgtatatgcccgtgggcaccgtggccaccgtcaaggccatgaccccccgggaaatgctggagatcggcacggagatcatgctctccaacacctatcacctgcaccttcgccccggcgaagacctgatccgcgaggcgggcggcctgcataagttcatgtcgtggcccaagcccatcctgaccgacagcggcgggtttcaggtgttttccctttccggcatccgcaaaatcagggaagaaggcgtggccttccagagccatctggacggcagccaccgctttatctccccggagatcagcatggatatccagcacgcgctgggcagcgatatcatgatggcctttgacgtatgcaccgcctatccctgcgaccacgccaccgccgaggacgcgatgcaccgcactcaccgctgggccaagcgctgccagcagcaccataccgacgacgatcaggtgctcttcggcatcgtgcagggcgcgtttttcaaggacctgcgcatcgaaagcgccaagaccctgcgggatatggacttcttcggctatggcatcggcggcctgtccgtaggcgaacccaagccgatgatgtacgacatgctggaggccatcatgccccacatggcggcggataagccccgctacctgatgggcgtgggttctcccgactgcctgatcgagggcgcgctgcggggcgtggacatgttcgactgcgtgctggcgacccgcatcgcccgcaacggcacctgcttcacccacgacggccgggtggtcatcaagaacgcccagtacgcccacgatttccgcccgctggacgagcattgcgactgctacgcctgccagaacttctcccgggcctacatccgccacctgttcaaggccggcgagatcaccggcgcgcggctggcaagcatccacaacctgcggttcctgatccggctgatggagcaggtaaagcaggctattcaggaggaccggctgctggacttccgcaacgagttcttctcccactacgacatgagccgtaatttttaaaaaacacgcgctgttcacgttgccgtcatggaacgggcacggagcgctgttatcctgaacctgcggggcgacgagcgtcgccccgtttctattttacgaaggagggagaacgaatgaaaaaaacagcctttctgctggcgctgctgctggcggcggtcttcatccttccggcggatgcggctacctatgaggcggacggccttttccgtctccgctatgacgaaaccgcgtatacgctggacgatcagacctatgcctacgaaagcgagaccggcgcatcccggtggtttttcgtgctttacaacgacgaaatgaccttcgacatgagccttctgcgcatggaaaacgacgcggggctgaccctttccacagcggcggaggatcggaagcagacctatctggatgagctgctggactggtatcaggacgaggacgcctctcttttggaaacggtggaggcgggcgacggccagacgcccttctgggtgctgggccttcgcaacgagttcggcccctatctgatggcggaaaccgtgatcgacggcaacgccatcgacctgcaggcctactacaacgattcgtcgctggcggcggacgagcggcttcaggaagccctgcgggagatgctggcaggctttgagcaggacggggaaacgccggtattggaaaaatagcaggaaagcggcatacttgtctttcggctgcgaaagggccggggcgatgcagctttcggcaaagatcgaccagaaaaattgccaacatatccttctcgaattttccaaatactattcatgcctcgttcacgactttgtcaaaaatgggtgttagaataagcccgtagttaggagggatactacatgaggaacactgaaacgaaaaagaccttgaagacttacatggcgatcgcgttggccctggctgtcgtattgaccggcggtaccgctttgattcgtatgaacgctacggcaggcgcggaaacggcgacgatcaccgagaactccaccgtagtggcgagccccttcaccgaggctgttgaaaaagtacacggcagcgtggtgggcgtgagcaactacaccaattacaccggccgcaacagctacggcggcatgtacggttttggctttgggtatggctatggctacggcaatgaccgcggcagcgacaatgaggacaacagccgtcaggtgctgcagggcaccggcagcggcgttgtggtggccaagggctacgtgctgaccaactaccatgtggtagaggacgccagcatgctggaggtcacttccggcgacaacacctacagcgccactgtggcgggctatgacgaaaatcttgacctggctgtgctgaaggtggaagatctgccgctggagccggtcgtgctgggtgacagcgacgcgctgaaggtgggcgactgggcgatctgcatcggcaatccgctggacttcaccggcaccacgacggtgggcgtgatctccgccctgaaccgggaaatcaccagcaaatccaccgacgcttacggacgtaagaccaacaacgtcaatcggatgatccagacggacgccgcgatcaacgcgggcaactccggcggcggtatgttcaacgtggcgggcgagctggtcggcgtgcccagcatgaagtacaccggcagctactactccacttccacggtggaaggtatcggcatggccatcccgatcaacgcggccaagcccctgatcgaggaagtgctgtccggcaagaccgtgaccaacggcacgtcggccgacagcacgaaggattccagcagcgtggctcctgaatcccgtccccgcatgggcgtgaaggtgaagaccatcagcgcctccaactccggcgcggtggccgcgggcgctctgcccagcggcgcgtatatcgacgaggtggaaaagaattcccccgctgagaaggccggtctgaaggcggacgacatcgtggtggaggtggacggcaccatcgtttcctcttctcaggaaatggtgaatgccatggcctccaagaaggcgggcgacaccgtggagatcaagtacttccgcatggagggcgaccagtccaagtgggaaagctacgacgacatcgagggcgactaccacaccgtaaccgtggagctggccatgctggacgaagcgcattcctgataaaggctgagcgttaacaggcaaagaaaaactccgggttctgtcctgaaaaaggcagggcccggagttttttctgtgcttctaaaatgccgctctgtcaggtcaaacgcccctacagccgcagaaccatttgaatttcatcccgaaaggagccgtcgtcatagcgaaaggctctgggcgtgcggccggtctgaacgaagcccaaacgctcatacagcctgagcgcccggtcgttgccgctgatgacctccagctccacctgttcgtagccgagctctttggccagcgtcaacacgcgggtcagcaacgccttgcccaatcccaagccccagtacgctttccgaagggcgatggatacgtcggcccggtgacagattttccgccgcgcgcccttgggcgtgagcgtgcagttgcccgccagcctgccgcccacccatgcgttgagcatgacgacggacggatcgtccgaccggctttgcaggaggctccgttcgccttcctcggtgaaattcacctcgtccggatagcgcagcagaaagggcgtttccccggcagtgtctttcagataggcgatcatttccggcgcgtcgtccggctcggcggcacggaaaacggcggttttgccgttcttcagggaaacggtttccggggcaagatgcataaaaacctccgcttcagtcctttttcagggtcatcagggccgcacagtccgaaattttttcataacgcagatcggggaaaaacggaagcagttcttccagaacgaaataaatttcttcctcatcccaagacgggccggcggcatttcgacaggcttccagctcggcctgagtgcggaacgccacgtcgccgatcaaaatttccccctccggggccagctggcggcgaagctgggcgagaaaatcccgcttgccttccagcgtcaggtgatgaagggaataggtggcagtgatgaaatcgaaggtctgcccttgcagctgcggcacgagtccccggctgaaatccccctgatacagcttcgcctgcggcattttggccgaagccgcttccagcatccgggcggaaaaatcctgcccgaagatcacgcagccctgctgatacagccgcgccgccagcgtgcccgtgccgaagccgatatccagcacccggggagactttcgggtcagcacccgctgatagatgcggctcagcagttctttatagcccgcgaagggatagccgccctcctcgtccgtcaggccgacggactggtcgtatccgtccgcccagagatcgaagccctgtgatgaaagcatggtcaaagttcctcccgtattgcctgaaatgggattctgaggggattgtaacacggggcgaaaacgctgtcaatgcaggaaaaagcgcgtcagaaccagaatctatatacgatgaaacaaaggaggaaaccgccgtgcgttttttgtccaacgcccatacccattcgaccttttgcgacggaaaaaatccgccggaggaaatgatccgggcggcggaaaaactgggcttcgtcagccttgggttttccggccatgccagtcagggcttcgacttggaatactccatgacggcagagactcagcgggcgtatttcgagaccgtgcgggcgttgggctccgcggcgaagctacgcgtctgggccgggctggagcaggataccttcgccccggacgcgctgaaagcggagaaccgccgggcagcggattatgtgatcggctccgcgcactacgtcagtctggattttcacggcagaacggtggcagtggacggcgaaccggcgctccttcggcagtatatcgaagaaaaatgcgggggagacgcgcttgagctggcgcggcagtatttcgatgttcacgtttccgggctgcttcgggatcggccggacatcatcggccatttcgatctggtgcggaaatacgcgctgtcggagagccttttcgacgaaaccagcccggcataccgccgtctggcgctggatgcgctggaaagggcgtttccctgcggcggcgtgctggaggtgaacaccggggccattgcccgaggctaccgggacgacccctatcctacggcggagctgctgggcgcatggcgggagatgggcggacgcacgaccatcaccagcgactgtcatgacgcggccaagctggactgcgcctttgaccgggccgcggaactgctccggcggacgggctatcgaaccgtgctgcggctgggaacgggcgaggcgctctggcaggaagaaaccctttgaatgaatccggaggaggaaaaaaacgatggcagattttaccgccatggtggaaaaccagcggaagtattttgaatctcaggcaacgaagtcctacgaatttcgccgggagcagctgaaaaaactgcaaggttggatgaccgaaaacgaacaggccattctggacgcgctgcatgaggatcagggcaagagcgactacgagggctatctgaccgaggtggccatggtgaagcaggagctggcggacgcgctgaagcaccttcgcggctggatgaagccgaaaagggcgcggaccgccatggggcagctgcccggcacctgccgcgttctgtccgagccctacggagtggtgctcatcatgtccccgtggaactatcccttccagctgacgctggccccgctggtgggggcgttggcggcgggcaactgcgccatcgtgaagccgtcggcctattcgcccgctacctccggcctcgttcgccgcatggcggaggagctgttcccgccggagctggtgaaggtggtggagggcggcagggcggaaaacgccgccctgctggaggaacatttcgattatatcttcttcaccggcagccctgcggtgggccgtctggtgatggaaaaggcctcccgccacctgacccccgtcagtctggagttgggtggcaaaagcccggtcatcgtggacaaaagtgccgatatcgccctgaccgcccggcggctggcttggggcaagtgcctcaacgcgggccagacctgcgtggcaccggactatgtgctggtggaccgcagccgggagcaggagctgatcgaggctctgatcgcggaaattcggcggatgtataccagcgcgccgctggccagcgaggatctgcccaagatcgtcaaccagcgccacttccagcggctggtggggctgctttccagcggctcggtggccttcggggcccaaatcgacccggcggaacggaagatctcgcccaccattctgacggacgtggagtgggacagccccgtgatgcaggaggaaatcttcgggccgattttgcccatt

SEQ ID NO: 1636 - DNA, 32507 bp, Unknown
  16S sequences of unknown bacteria
agttttttgaatctgcttttcatcctgttctcccctttctgcttccggttcttccccttctgcttttttatgtattccggatgataggccggatctatctccggcgattcttttttcttagttagtataatacattcctccatacccgtaaaccaaaagattcttaagaagttcttgcgtttcatgtcgtttttgcgcggacaaaaatccgtagaatttaccctctgtttttcattctttacaactattttcagaaaattttttcactatttgagcatgctcggaatgttttgttggatttcccttaattctctatgcaaaatgcacaaaattcacacccgggagcttagtgaaaaggccgattttgtccgtgctcagtctttccagattgaaatcacccgatgctcatgttacaatcagcgcacagaaaacgggagaaagaaacctgtaaacactttcattcaaggagggactctatgaaaaagaaaaccagacagaccggattattattatccgtgctcatgctcgctacgaccatcctttatccggtttccgcatttgcggaggaaaccacagaggctccggcagaagccgtaactgaggctgctgaaaaatctgatgccaaaaccatgatgaccggcaactgggcgccggctacccgggagcgtatccagtccgtcatagacgcaaacgcagacagcggacgctatgttgtattcgacttcgacaatacatctgctatttttgacgtagaggaagcgctgctcgcttatcagatcgaaaatctgcagttcaagatcgacccggcagagcttggcgatatccttgagacgcagattccgtccttagacgaaccggtcggaaagaatctcgcagacggcgatgtgaccgtggcaaatctggtcgccgatctcacttccgactatcagtggctgtatgataattatgagggcttcggtgcaggcggaacttacgaccttacctatatccatgcaaccaatcagtatgaggactttgcagctaagctccgctacatgtatactgcagtaggcgatacctttgatgcatctgtttcttatccgtgggttacttacctttttgccggcatgactccggacgaagtatatgatctggcgcttgcttcccatacctactggtccaactacggacgctacagcaagacagtctggacctctccggttgagctggaaggcgagagcggcgtaatcaccacaagcttcatcaccggaattactttcacagatgaactgcagaatctctaccagaccctgatggcaaacaatattgacgtttatattatctctgcttctttcatcgatgttatccgtgccgcaaacgacaacttcggctacaacgttccggaggatcatgtttttgcaatgcgcaacgtgctcaaggacggcaagtacacgaacgaatatgactacaactggggcggcgagggcaaatatgctcagacgcaggctgcaggtaagagtacaataatcaccaatttcatcgctccgaattatgacggtgcaggccctctgatggtattcggcgacagtgcaggcgactggaatatgatgactgactggatggaaagcggcgatacacagctcggcgtgatcttcaaccgttaccgtaagacaagcgacccgatctggcagggttccacagaagcagcggaatccatcggaaatgcagacgcacgctttgtcctgcagggaagagatgagaaccacggccagctccgtccgtccgaatactccattctccttggcgagaccgaagaagtactggtacgtccggcagagtaacatcaaacaaactaaatctgacaaaaatcgttttctcccgtaataccttgaaaaaggggctgtcgcactcacgtgcggcagcccctttgtattgtcctgctttcttatttggttccgaaaatacggtctccggcatcgccaagacccggaacaatatatccgtgttcattgagatgctgatccagcgctccgatataaatatcgacatccggatgagccttcttcattgcctctacgccttccggtgctgcgatgatgcaaaggaaacggatattctttactcccttatccttgagcatctggatcgctgccactgctgatccgccggtcgcaagcatcgggtctacgacaaatacctcccgctcgttggagtcagccggaagcttacagtaatactctaccggctttaaggtctccggatcacggtacagtccgatgtggcctacctttgctgccggaatcattgcaagcattccctctaccattccaaggcctgcacgcagaatcggaacgactgcgagcttctttccgctcagctctttgactgttgtcctgcagatcggcgtctcgatctcgatatctgtcagcttcagatctctcgtcgcctcatagcacatatacatggcgatttctccgatcagctcccggaactccttagagccggtctccttttttcgaatcagtcctaccttgtgctggatcagcggatgatccataactactattttctgcataatttcctcctaatatataaagatattggggtcaaaaagtattttgcccttatgatacacggattgttttgctcaatcctcatcaatcattcggatccgacgtgcatgacgctctgcgccggaaaattccgtatcaaggaacgtatcgacaatcttcattgcaagtcctgttcccgtcacacgcgcacccattgccagaatattggcatcgttgtgcagacgggtagcctcagcactgaagcaatctccgcagacggccgcacggatccctttatagcggttggctgtaatggaaatgccgataccggtgccgcagatcagaataccacgatcgcatctcccctcctgaatctcttttactactttctttgcatacaccggatagtctaccgcatcctctgaataagtaccgcagtctgtatattccagtccacgctcctccaagtgctttttgacttcctgcatcaggccatagccggcctgatcacaacccaatgctaacataacagttcctcctcattcaattgtactacaagcttcgcaatcagagcttccagctctgcaaaacacttcccataatctgccagcgagccgccatatggattggagatcccctcccgtactccgacgtactcattcagcaccggaatcagcagagaatattcctcgccaaactccacctgaatcttctgcttcacactctcatcaagcgcaatcaccagcgtacggtcttcaaaatcttcccggacaagcggatcactcatgtgattcttcatcgtcagtccattgctgaccagaaccgcctctgcctttggattgatcggctccggaaacaacaccaccacacccttggatgtgatctccagctcctccaacagaaatttgctctgcaaaatggcctctgccatcggaccaagcgccgtatcactgctgctcacaaagataagtctgtcgtatttcttcacctttttgctccttatcgcctcatacccggataatctgatgtccggctgccttaatcagacggttcataatcgcctgaccgatctgtggcgtctcaaacgcctctgaatatatcacagaaatatcggattcgtcaaactcccggagcagcccgaacaggtgctgcgcaatcgtaatctcatcttttctgcttccgatcgagcgcacatctccatccttataataagaaagagactcatctgtcccaatcacgccgacctttttcccttcagagatctgctgctgcaccagctcattgattttcctgcgaaccttttcggcttctccttctacgataatcagatctgcctttggtgcatagtggcgatacttcatacctggcgcctttggatgtacgcctgactccggcgcgatcagtccacggtccatctcgacctcgccgagcaccttcgtcaacatctcctgattgatatagcctggccgaaggatcgtcggggcgccgtctgtcagatctacaatcgtagactccagcccgatgtccacagtcccgccatcaatgatcatatcaatttttccatttaaatcctctgccacatgctctgcctttgtcgggctcggacgtccggatgtattcgcgctcggagccgccacatagccgccgcctgcccggatcagcgcccgcgcaatcggattcaccggcatccgtactgcaacggtctctagtccgccggtcgtcgcatatggcaccagatctgatttattcagtatcattgtgagcggacctggccagaatgcgtccgcaagttgcttcgcagcctccgggatctccgatacgatcgccctgatcgcctcccagtctgcaatatggacaatcagtggattgtctgacggtcttccctttgctgcataaatttttgcggaagcctccgcatccagtgcgttgccaccgagtccgtacaccgtctcagtcgggaatgccacgagtcctccttgtttcaatatctcaccgcccagccggatcccttcttccgaaatcccgctgcgcatatcttccagaattgtctgcatttctattcctgcctttccaatcctgtatagtataccactttgcccgacattttgaaacacttttctgatttcctgtacccaaagcttctactttgtggtaaaatattactaacttttttagaaaacggaggctattatgagcgaagaagtaaaaaacatgaatgaaaccaagccggaaaccgctacaaaagagactgcggctccggtagagacaatggcagattatgaggatgcaatcaacgcttctttaaagccgatccatgagggtgatattctgaccggtgaggtcatcggcgtatctgaagataccgtgacactcgacttcggttccttcactgacggaatcattcgtctggaagatgcaagcgatgatccgaactttaccttcaacgagattcaggtcggacagaccatctctgcgactgtcatccgccgcgacgatggcgaaggacacatccttctttctatgaaggaggctgctgccgtactcggctgggagcgtcttgagcagctcttaaaggatcagtccaatatcacggtaaagatcagcgaggcagtcaaaagcggcgtagtcgcttatgtagaaggcatccgcggctttatcccggcctccaagctggctctggaatatgtagaaaatccggagggctgggtcggaaaagaaatcgaggtccgcgtcatcaccgccgatccggaggataaaaagctcgtgctctccgcaaaagagatcctgcgcgagaaagaagcagaagagcgcaagcagcgcgtatcgaatgtagaagtcggcctcgtgaccgagggcacggtggaatctctgatgccatacggtgcgtttgtccgtctctccaacgatctgaccggactcgtacacgtatcccagatctgccagcagcgaatcaaacacccgggtgtcgtgctcaaagaagggcagaccgtcaaagtcaaggtcatcggcatcaaagacggcaagatcagtctgagtatgaaggctcttgaggatgtcgcagctgtcgaggtcgaggaagagacctacgagatgccggaaactgaggcagcgacgacctcccttgcttctttatttaaaaacattaagctgtcctgatgcgctaaaccacaataccccgacgcttcctcttatatagtcatatttactatacagagccaacgtcagggtatttttattatcctctcactgcatccttcatggactttacatactctttcacatacggtacacacgcctctttatactgcccgcagagcttcacgatcgcggatccgacgatcgccccgtctgatttcgccgccatcgcagctgcctgctccggggtagagatgccaaagccgaccgcgcacggaatatcctttgctgccttcacgagctgtaccatcgcaccgatatcggtcgtaatcgtagaacgcataccggtcacgccaagagaggagacgcagtatacgaacccttccgcctcttttgcaatctgagtgatccgctcatgggaggtcggtgcaatcagggaaatcagatccaagccatattttttacacaccgaatcgaactcctccttttcctcaaacggcacatccggaagaatcaggccgtccataccaagactggccgccttctggataaagcgctccgtaccataggaaaagacaacattcgcatacgtcatgaacaccatcggaatcttcgtattctgtcggagccgctttaccatatcaaaaattttatcggtcgtaacgccaccgcttaaggcacgcacattcgctgcctgaatgaccggcccctccgcagtcggatcagaaaacgggattccgagttcaatcaaatctgcgcctgcctcttccatcgcatagatgagctgctccgtcacttcaagtgatggatctccgcaggtcagaaacgggataaacgcctttccatttgcaaatgcttccgcaattctcttattcatgaatatcctcccctctgtaacgtgcaatcgctgcacagtccttgtcaccgcggccggaaatcgtaataactacgcactggtcctttctcatcgtcgggacaagcttcttcgcataggcaacggcatgtgcactctctatcgccgggatgatgccctcgatccgggatagatactcaaatgcatccactgcctcctcgtctgtcaccggcacatattcagcacgtccgatatcgtacaggtgtgcatgctccggaccgatacccggataatcgagtccggctgaaatcgagtagaccggggcgatctgcccgtattcatcctgacagaaataggacttcatgccatggaaaatgccaagccttcctgtcgcgatggtcgccgctgtctctgccgtattgacgccgcgtccggctgcctcacagccaatcaggcgcacgccctcatcctcaatgaagtgataaaaggtgccgatcgcattggatccgccaccgacgcatgccagcaccgcatccggcagtcttccctccttttccagcatctgctgtctgatctctttggaaatgaccgcctgaaaatcacgcacgatcgtcgggaacggatgcggccccatgaccgaaccgagtacataatgcgtatccgcaatccggttcgtccactcacgcatcgtctctgatacggcatccttcagggtcgctgtcccggaggtcaccggatgcaccgttgcgccgagcagacgcattttataaacgttcagtgcctgacgctttgtgtcttcctcacccataaatacttcacattccatgcccatcagtgctgccactgttgctgtcgccactccgtgctgaccggctccggtctccgcaatgacacgggtttttcccattttcttcgccagcagtacctgaccgagcacgttgttgatcttatgcgcaccggtatggttcagatcctcgcgcttcaggtaaaccttcgcgccgccaagatcctccgtcatatgtgaagcatagtacaggcgggagggccggccggcatactcatttaacagctctgtcagctcccggttaaattccggatcatctttataatgaaggtatgcctcttccagttcgatcactgcattcatcagtgtctctgggatgtactggcctccgtggattccaaatcttccttttgacatattggttcttcctttcttctgttgtctttcctgttctttctccaggcattttatgatgttatacacggattacttcgcatttcatgctctcacaatccgcactgcctcccgtatcttcccggcatctttcctgccatctgtctcaagactgctggagagatcgaccgcaaagggtcgcgtcctccggatcgcctcttccagattgtcgactccaagcccgcccgccagaaaaaatggcgttttattttctgcagcctttgaccgctccagcaaggaccagtcaaacgtccgtccggttcctccaccaccctgatccagcaaaatgtaatcggcaggactggcaaatgcccgctgtacatcctcctgtgtccgaatggaaaacgcctgaactaccggtcgacccgtctgttctttcactgcttccacatacgacgcatcctcctgcccgtgcagctgagccatcgcaagtacgccatcctgcagcagacccacgatcagctccaccggcgcattgacaaagacgccgacagaaacgatcccgtggtcgagcagcgccgtcagccttcgaagctgttggacggacacatttctgcggcttttcggtacttccactacaaagcctgcgtagtccggcttcacctcattgacagcttcgatatcctctgggcggctcagaccgcagatcttgattttcgttcgctgtgaagctcctgtttcttcctgtttccgtattacacacacagtatacttcctttccacacctgtacttcctgctgttctgccgctatggcagctttctgtgtccttgctgccagaagcagacggcacctttttctacagaatcattcctccgttcagctcttccagggcttcccgctttttcggactgcgcatcagcgtctcaccgatcagcaccgcatctacatgattctcccgaagtacctgaatgtcctgtgctgtccggatcccactctcagagacataggccgcctcctccggaatcaggctccgcagccggacgctgttcgtcacatcgacctgaaacgtcctcagatcccggttgttcacaccgatgatgcgcgcaccacttactgctgcccggcaggcctctgcctcgtcatgtgcctcgaccagcgcatccattccaagggactctgccagctcccgataggcgcgcagctgtgcatcatccagaattgcacagatcagaagcactgccgatgcaccaagcagacacgcctgataaatcatatactcatcgacggtaaaatccttgcgcagcaccggaatctctacctgcgctgcaatctcctgcagatatgcatcctttccgaggaaccgaaacggctccgtcagacaggagattgcggatgcacccgctgcctcatactctctggcaatgtccaggtacgggaaatccgaggcgatcagccccttcgagggcgacgctttttttacctcacagatataggacatcccaggcttttttaaagcctcataaaagctctgttttgattttttttgctcggtcgcttcgatctgacggatcagctcttccgtcggcgtctgccgcttttccgcttcgatccgttccctcgtctgcgccgcgatttgctccagaatgttcatctctgctcctccgcattggattcccggataaattcctccaactttgcaagtgccgctccactgtcaagtagctgctctgcccgacgcacacctttcgcaatcgtttcagcctttcctgcgatgtagagcgccgctcccgcattcaggcagaccgcctgacgctttgcaccctgcttggcgcctgtcaggatcgcccgtgtgatctgtgcattctcttccggcgtgcctccctgtaaagcatctttctcgcatcgctcatatccaaactgctccggcgcgagctcatagcttgtaaaggttccatccttgatctcgcacacagaggtcggcgcactcatcgaaatctcatccagacgatcctgtccgtatacgaccattccgcgtgtcacgccaagattcgccatgacctgtgccagcggctcgaccagcgactggtcaaatacgcccatcagctccatgttcgcgcccgccggattgctgagcggtcctaagatattaaataccgttcgaatgcccagctcttttcggatcggagccacatacttcattgccacatgataattctgcgcaaacaggaaacagatattgatcttatgcagcagctcggcgcttttttccggagatacggtaatcttcacccccagcgcttccagtacgtctgcagccccggactttgaggacgctgcccgattgccatgctttgcgaccggaacgcctgctgccgcaatgaccagtgaggaggttgtcgatatattgaaggaattcgatccgtctccgccggttcctacgatttcaagtacatccagattgtgaagaagctttacacagtgcgcgcgcattccggctgccgatgcggtaatctcatcaattgtctctcctttcatggcaagtgcagtcaggtacgaagacatctgtaccggcgtcgcctctcctcccatgatctcattcatgaccgcctctgcttccgcgtaggtcagatcctgtttctttgccagttttaaaattgcttctttaatcatagcgggtcctcctgttctgttcctggttcagttaaatttttccacacattttataaaattttctatcattttctttccttccggcgtcatgaccgattccggatgaaattgtagcccaaatatcggatcgttccgatgctcgactgccatgacttctccgtcctctgactctgccgtaacgaccagctccgacggaagcgtttccttctttgccgcaagcgaatgataccgcgctgccaaaaatgtctccggcatgcctgcaaagatccggttttccatcgtctgacggatctgcttttgctttccatgcatcagctgctttgcataagtgaccgttccgccaaacgcctcgcagatcgcttgatgtccgagacagacgccaaggatcggaagctttcctgcaaaataccggatcgccggaatgcagatgcccgcatcctccggcctccccggccccggtgagaggatcagcgccgctggctgcatcgcctcaatctcctccaccgtacagtcatcgtttcgtatcacccggatatccggatataccgatccgatcagctgataaagattgtaagaaaagctgtcataattatcaatcaatagaatcattccagtccctcctctgcctgcttgatggctgcacgcacggcccgcgctttgttgcagcactcttcgaattccttttccggtacgctgtctgccacgatcccggctccggaacggatacagatctcaccgttctttttgtagaccagacgaatcgcgatgcaggtgtccagatttcccgcaaaatccagatagccgattgctcctccgtaaataccacgcttgctctgctccagctcctcgataatctggcaggcgcggaactttggcgctccggataaggttcctgccggcaggatcgcatcaatagcatcgaccgcatccttgtcatcccgtatcacgccggtaaccgttgaaccgatgtgcataacgtgggaaaagcgctcgatctccatatatttttccacctgcacggtcccgattttgctgatttttccgatatcgtttctgcccaaatcgacgagcatattgtgttccgcccgctccttctcatcagccagcagccctcgctccagatcctcatcctcctgccgggtcttgccacggggtcttgtcccggccagcggaaatgtactgagctgacctctgtcgagctttgccagtgtttccggggaggctcctgccagctcgatgtcgtcactggaaaaataaaacatatacggagacgggttcgtcgcacgtaatgcgcggtaagtgtcaaacaggctgccctccgcctttgcccgcatcggattcgacaacaccacctgaaagatgtccccctcatggatataatgctttgccttttcgaccatctcacagtatttctcttttggaaattgcggctggattttggatgtcagcttcagctttttaaactgcttcggctctccattttgtaaaagcgctgccatctcagcaagtttttgtacggcacggtcgtacgcatgtttcagtggctcctctcctgtcagcacaccggtaatcagcaataccttctgtcgataatggtcaaatgcaatgacagaatcaaacagcatcagatccatgtcccggaagtcctgctgctcatgatccgtcagcttcagctttggctcactgtacttgatataatcgtaagaaaaatatccgaccagccctccggtaaacggcggcatcttttccagaatcggacttctgtactgagccagtatgcttcgaagcgtatcgcccggatgcgttaccgtaaacccgtcctgctgcgtctgtccatccggccctgttttccggattttcatctgtccgtccgtacaggtgatttccatcgtcggctggtatccaagaaatgtgtagcgtccccacacctctgtctgactggcactttccagcataaagcaatggcggctcgcgccacgcagtctgcgcatgacctccacaggcgtatagcggtccgcatacagctcccggcaaatcgggattcttcggtactgaccactatctgcaagcgtctgaatttcttccaatgatggataatacatatgtgatacctcctgcatattttctgcaaaacaaaaagtccctgacagaatctaagttctgtcagggacgagaatgtactcaatgatatacttgaccacccgcggtgccaccctgattcacgacaggaatcgtgcgcttatcggaatacctttatattcccggcaactgacgtatgccctacgtcgcagaatactcggatcactccatcctttgactgcgccctccgcggtccatttagtaaactgcttttcgacccggctctcaccttcccggactctctgtgcgcgcatgattacttttatctccgcttcatcggtttaacggattaaattttttataaaattaccacaaatcccacccattgtcaagtatcttcttatcattttttctgatggcttcctgcctgaggtaaaaccgctgccatcgtctccatcagcaccggaagctcgatcggctttaccacatatccattcatgccaactgcaaatgccgctttccggtcttcctcaaatgcatttgccgtcatagccacgatcggcgtctgcgaccgctcatccggcagtttccggatctgtctggtactctcatacccatccatgcacggcatctgaatatccatcagaattagatcataatagcccatcggagccttttctaccatggcaagcgcctgcgcgccatttattgcatgctcgactatgattcccgcatcctgcaaaattgtctctgcgatctctgcatttaaggcgttgtcctccgcaagcaaaatccgtatgccggccagcactgctgcatccaatgcttccttttgggtatctgccttcttggtcccggcatgctctgcaatccgatgcgtcaaagtcaccgtaaaggtcgtcccctcatgaagtgtgctctcaaccgaaatacttccgtccatcagatcgaccagtgattttacaatcgacagtccaagtccggtacccgtgattccgctctctgccgaattctgttcccgtgagaacctttcgaacagatgtgggagatattccttgctgataccaatcccggtgtcttttatcagtgtccggaaggtcgcatagccctcctgttcacagtcaatctcctcgatatccatcgatatcttccctccggcaggtgtatatttgatcgcattgctcagaagattcataaaaatctcacgcaccttcaatggatcacacagtatctgttcatgctgaacccggaatttccgctcaaactgcagctgtttctcatgaatcacaccctccataatgacatccacattgtcattgaactcctgcacactccactcggtctctctcaacacctctttaccactctcaatccgtgccatctccagtacgttattgatcagagaaagaaggcatcggctggctttcttctgtttgcacaaataattccatgtaatctcttcttcaccccaatgtcgttccatcaggcttccataaccgataatggcattcatcggcgtccgaaggtcatgcgacatattgaacagaaaggcggacttcgcccggcttccctcttctgcctgctgtagtgccttttgcagaaggatcatttttgatatatcaataaatgtcgttacaaccgcccgctctcctgccggtgtcataaatatttttgtttttgccatgatatggcattcctgctctgtccctttatgaataatacattcataatccaccatatcatttacttcacgaagccttgtcagtctggaaaccgtatccggatccggataataaagcttcttcagaattttcccgatattctgctgcgcctcttctatatcagagcatcgatacatccgcagcgcctctgcattcatatgaatcagcctgtgttccggcaacgtataggccatcagcccgcagttctgaatgtccagcagctccctgtaataatcctgctgcagtatgtgctcctttttcagtgtttgattcagctcagccaggcgccgttccgcctgtttactcttttccagccgagcggtatctgagatatcctgatgagtgccaacgatgcgaaccgtatccgcgctgccggactctctctttccgccacaacggacatacatctcaccggttatgggatgtataaagcgatagacgatctccgtcggttcctttgcaagcttggccgcatactcttcaaagagctcctgatcttctttgtggatatgtgcccgatggtataaaaaacgcttctccggcgtgacatcccctgatatgccgagcaactcatccatcacccgatccgcataaaatcttggcgccctccccgcttcaaattccactctccagactccgattctggcagaccgcaaaatatgctgcatatcattacaacccaaatactccatatgcatccctccgcaccagattgcttcactttcctcattttttattgtagcttctgttttgcacagtgtcaagcaatgcaaacttgcctgattcacgtcaagcggatattcgcaatccatccctgcagctctgctgacagggcctagcttcgctacttgcaggatcacaaggaatttttccggacatctctggctatttccataaatatatcgtataatttaaccgaatcaagcaagtcccctgctttcaattgcgtaaagcaataagcagtgggttgggacttgataagctacgaagcaatccgtgtatcatagtgggcaaaataccttttgaccccaacatcatcatttacatactggaggacgatcatgaaatacgattttaccagcatcctggaccggcacggcaaggatgcgattgcagtggacgccattggttccggcgaggggatggctcccggagcaccaaaggagggctttgatgcgattccgatgtgggtcgcagatatgaattttccaacggttccgaccgtacaggaggcgatcattgagcgggtacagcacccggctttcggctatttttccctgccggacgcctacttttcttccatcatccgctggcaggaaacgcgaaaccatgtcaccggtctgacaagggaatgcatcggctatgagaatggtgtgctgggaggcgtcgtcgccgcagtctcttcgttcgctgcaccgggcgatgctgttctgctgcacagcccgacctatatcggctttaccggctgccttacgaacaacggttttaaaatcatccacagcccgctcgtaaaggatgaaaatggtatctggcgcatggactatgcagatatggatgcaaagctcaaggcaaaccacatccatgtagcggtcttctgcagcccgcacaatccatgcggccgtgtctgggagcgctgggagattgaaaaagcaatggaggtctacaaagcaaatgactgtatcgtcatctctgatgaaatctggtctgacctcactctggacggacaccagcacattccgacacagtcggtcagcgaggatgccagacaccgtacgctcgccttttatgcaccgagcaaaaccttcaacctcgccggtctggtcggcagctaccatattgtctacgattcgtatctgcgggaccgtctgcaatccaagagcagtaaggctgtctacaatgagaccaatgttctctctgtccatgccctgatcggtgcctaccgcgctgagggctatcagtgggtagatgagctccgtcaggtcttaagtgaaaacgtccgctttgcctgtgagacgatctggtcacagtttgaagggattgaggtttcccgtccgcagggaacctatatgctcttcctggattgtgaaaaatggtgtctggcgcatgggaaaaccatggatgagcttctgaaggccggctgggatgtcggtgtcggctggcaggacggacgccccttccacggtacctggagcatccgcgtgaaccttgcgcttccgttctcacgggtagaagaggcattccgaagactgaaggagtatgtgttctgatatagcctccggcattcttgaagtttcgactcacaaaagcatagggtgcggcaattcgccgcacccttactattttggatcgcttccgtctataaaattttcctcatcttagcttcttttctgttcccacataaagactgatcgccagcagcgccgtcagcacatcggccgtggcctgcgcacagatcacgccgtgatagcccagcactgcagacaaaatgatcaggcagatggcgaagagcacgccctgacggctaactgagagtaaaagcgccggtacggccttcccctctgcctgaaacagtgtcgtaaatacaagcaccacaccaatcaatggtgtcgagatcagcatgcagcgcagcatcaggctgccggattctatgattgcggcatcatgcatgaagagatttaccgtctgcggcgcgagcagcgcaaggatcgcagccacaacaacagaaaatccgatttccaccatcagatcaaaacgcaggatttctttcaggcgttttgtattttttgcgccataattgtagcccagcagcggctgtgcgccgaatgcaaagccaaccataatgagaaccacaatcatattcaccttcatagcgatacccatcgatgcgaccttgtcggtaccgtactgcacaagataacggttcgtcaaggtgataccgaagctctgcatgatattcgtaatagaagccgggatgccgatcgccagaatcccgccaagcgtcaccgcctcaatccggatctgttttggggatatagtcagcttatggctctttgttttcacaaaataaatgagcaaaatatctgtagccacatttccaagcaccgtagcgatcgccgctccgcccgcacccatcccaaaaccaaagataaagaccggatccagaataatattcacaatggatcctgtgactgtcgcgatcatcgactgtacggcaagtccctccgtccggatcagattgctcggtgtcagcgagacaatgatgaagggcgcaccatatgccatataccggtaatactgccgtgcatactccatcgtatcctctgttgcacccagcagccgcaggatcggcatctgaagaaacagcatcagcagggtcacagctacaccacataagattgcggcgtaaaagcaaaagccactgaccctctttccctcttcttcccgcttctctccgaacagcctggagatcacagagctcccgccaaggccaaaaatatctcccagtgcaatcatcagtgtaaagatcggcgcacacagggatacacctgccaccagattggtattctgtgtccgtgcaatgaagaacgtatcaaccatattgtaaatcaggctgacaaccatccccatcacgaccgggagcgccattgtgaaatacgccttcggcaccggcgccttttcaaacagttcattttccattactttacatacctcgcaatcatctgggcaccctcctgcgtcacgcagattttatcaagactttttacatatttgttgaactgtgcataaccgtagtcacggatcttaaaatccttgttcttttcatagaccttattcccgatcatgctaagctccatgccatcctttccggcactgcgcaccaggttcagcacataggcatcaatcacgtccttctgtcctgcattttcccgcaacgccacattgatgatatgtccatgcttcacgagctgaatccgcgaaaattgctccagaaatttagacagcatattgtagccatagctgcggacgtcaaaatccggatacaggctgaccagacggcttccgacctcgccaagcccggtcgctttgttgctgtcctgattttccagcacgatcttgatgatctcatcttcgatcttctcccggctcaggccctcatgcgccagatcctcatccgtcgtccccggattctgctcctgcagcagattttccagaattgtaaatttatcacaggctttccgaaatggctccggtgttttattctcgcccattccgatgaccatcttcccgctctctctcaggcgactcacaagacgggtaaaatcgctgtcactggaaacaatacagaatccattgacatcatttgcatacaggatatccattgcatcgataatcatcgctgaatcggttgcattttttccggtcgtgtagctgaactgctgaaccggcgtgattgaattcgtcagcagctcctccttccacgcggaatgcagggtgcttgtccagtccccgtaaatgcgcttgtaagtaatcacgccatatttggaaagctctgtcagaatgggcgtgatatatttcgcagacacgttgtccgcgtcaatcaacagagcaaaatatcgttcctccatattgtatcatcctccttcccgaatctcataccaccggatctcctttaccgcaagcgtcagtgcaaagccgcttccgtcgcctttatacaccgtcgttgactgaggctcgtacgtatattgaccacgcagtactttccgttttccatgtatgcatacacaactattataacatagctttcactgaaaaacacgcagttttcgttctgaatggagtgtccaattcatatacataatactgactttgaaataatggcaggatataagatgcataaccaacaaaaagcttttattgaaaaaatcctgcaatatggaatgctggctgtcctgctcctctgtgcctttttccttcctggcttttccgcccgtcagaatacggctgacgatgcttccgcttcactggctcccgtatctgcgcaggatcacggcaaaggaacgatcgtcctcgatccgggacatggcggcgatgacccgggaatgaccggaaacagcaaaatcacggaaaaaacactgaacctcatctatgcaaaaaagctggcgcagctttttacagatgccggctaccgtgtcgttctgacccgggagacagaggacggactctatgatgcggactcctcccacaaaaaggcacaggatatgcagcgccgcgtcgccatcattgccggggaagagccgctcctgaccatcagcatccaccagaacagctatcaggatccgtctgtctgcggccctcaggtcttcttttatgagcactccgccgctggagaagcactcgccaagtgtattcaggacagcctgaacacagagcttgccatcgcccgcccaagagtacataagggcaatggaagctattatattttgaagcgctcggaaggaacgaccgttatcgtggaatgcggatttctgtctaatccgcaggaggaggaaaagctgcagcagaccacgtaccaggatcaggtcgtacaggcagtgtttgatggaacgatggcatatctttcagagaaaaatgcgggtagctgagcctcgccaagcgcccgtaaagtaaataatggctgtcacacccggtcagtttttattccggggcatgacagccattatgctttattttttacagccggattaccattgtcccatacccgtccagtgtctggctgccttcgatttcatttcctgtataaagatctgttcccttccggtgcagggtaatctccaccggatgcttttcataattcagtacaaagaggtagcgcaccccatttttgctgcggactgcgatctcacattcctccggaaccgtcacgatatcgcgatacggattcgccgcaccaagcttctgaaggaaaatctcagccgacatctcattccatgcacttccatagtagtacgcctttccttttccataggaattacacaccagcgccccggagcctgaataataatctgaggtatacgttccctcaagcttcgcatcaccaagcggctccaacagatctgcaaatacacttgcctcgatcatcgtgccatcccagtcgaccgtcaccattccggcatccggcgcgataaaggaatactccggaatgtctgttcctgtcagctccgaaagcagacccgggagcgtgtccatcacacactgtccggtgctgtttttatagccactgcggcaaccgataacaagcgttccacctgctgtcacatactgcttcagaagctctgcctgacgctctgtcacgatcgtcatatgcgggtagaacagaagcgaataccctgccagctcctccgcagttgtcgtctcagtcagatatacaaaatccagtggcgtatgtgtcctttgagccgcctcaaacagagccttctggctcgcctcatcaactctttgatgccatacatccagctgtgcatcccatatattatcataatccttcagcacaccgaccttcgcttcatagcgcgcgccagccagctcctgcataccctgcagcttttcatagacatcatgtacctcacggatacggcggttctcacggctggagtagtccagaatgccatgccagtaaatttctgtccccatcgtgcacgttctccagcggaagtagctgatgtaatccgctccatgcgcaatcgactgcatcgtccataaggtgatctgtcccgggcgcggcgtcggtgcctccatacgggtattccacccatttgctccggactgctgctccataatgccaaagaccggcgaaaccgaacgtgtctccgtcagattccggctccacttgcggtcgcgcagattcttcggattatctgaatacatatccagacagtatgcaaaattcggataagaatcatatgtaataaagtccagactttccctgcgcatcgcatgattatccagattgccaaacaacccgttggtcgtaataaaatcgcccggctttaaatatctgcgtatgatatcgctctgcatttttgcaaaccgccgcgcgctcaccgatacaaaccttgtgtagtccagcacctcatgtggatttgtagagtcactgatcgtcgtacgcggcacgtatacttccttccagtccgtataggtctgattccagaatgcggttccccacgcctcatttaatgcatcaatcgtcccatatttttccttcaggaaccggcggaatgcgacggtatcgctctccgaataaaagacatccacctcgcagttgatctcattgtccagctgccagccgatgatgcagtcgcgctttgcatagtgagatgcagactttccggtgatccgtgcactgagctcctgataaaccggtgaattgtaattataatgccttctggcaccatgccgcagcagcacaccatccatccgtgcatttaatacttccggatatttctcagtcagccatgcaggcggcgtcgctgtcggcgtacaaaaaatcactttcatcccgacctcatctgccagatccagaaactcatcgaaaaattcgtaagtaaacacgccctcttccggttcaattttgctccacgcaaattctgcaatacggatgacctcaattccggtctttttcatccgctccagatcctcacgccacatcgtcttcggccagtgctccggatagtagcacgtaccgagggtgaggttgtcaccgttaataatcttgctcatagtcacaatctcctttttgtatttttgtaaaacacacattcgcaatcaatcctcgctgctttgctgcataaccagcttcgccacttgtagattccatcttattctttaactgcacctgctgtcaatccatccataaagaatttcgacgcacacaggaagcagaccagaagcggaagtactgcgcaggtacttgccagcatcattgcgccataatctgtaccacggtcagataccatagaacgaagcagcagtggcagcgtaaacattttctcttttctcaggataatcaatgcctgtgtaaattcattccactgatttacaaactgcataatgccaagagatgcataggccggtttcagaatcggcgcgatgacacggaagaaaatcgtccactcactacatccgtcaatccgtgctgcctccatcagggccttcggaatattgttctggcaatactgacgcatccagaaaataccaaatgcatttgcacaccccggaataattaatgccttaaagtcattgacccagcccagacgactcatcatgatgaaccacggaatcatacctgctgttgccggaatcatcattgtgccaagcaaaattgtaaaaagcacttttttacccggaaaatcataaacactgaatgcataaccgccgattgagcagaaaaacaataccagaatcgtataggaaaacgtaacgatacagctgttcaggaatgcccggatcagatcgacctgcttgttcatgcttgcgaaattagcgagcaggttactgccaaaggtcacaattggcgggaaggaataaatctcattcgtcttcagcgtcgacataacaaacatcatataaaacgggagcagcataatcagagcaatcccaatcagaatcgcatacaatgcaattttctttccaaccggatgcacaatcgagatcacgatcaggacaattgcaatagctgccagtaaaatcaacagcgttttcatacttatcttctcccctttcttctcttctgcggtatctcatccttttctgcagttaccttattcagcgcaatagaaataataacgatcataatcgtgattacatatgcaaccgcagatgcatagccatatgcatttccaccctgcggagccttattcaggagatacatcatcaaagtcagtccaccattgttcgtaccgccggaccagctgctgtttgtcagaatgaatggttctgtaaacagattgaacataccaatcgtagactgaatcagcgtaaacagaataattggcttcagaagcggaatcaagatattgaatacgatccggacatgcgacgcgccatcaatctccgccgcctcataaatatcattgctgatgccctgcatacctgcaagatagataaccatgttccacccaatccacttccatgcgaacatgacgatgactgcaaccttgatcagtgatccgtcgccaccaagccagttgaccggagcctctccgaacaagctgagcagatagttgatcagaccatagttatacccaaacagattcatgaaaatgatggaaattgcaacggaactcgttaccatcggcataaaataaatagttttaaaaatgttctgtcccttcacaagcttggaattcagaatgtatgccagtacaagtccgccaagcaaaatcggaatatgggcaataataccgataaataatgtattcttcagtgctttccagaacagcacatctttaaaaagatttatgtagttatccagtttaataaaatgcatcggaccaagtccgtcccagcggaaaaagcttaacgcaaagcctgcgaccattgggaacagattaaacacaccaaacaaaatgaaaaatggagcgatataaacatatgcgactctgtttgcatacagagtaccgagaatcccctttttcttttttaaactcactgttttcaccttccttatcttaccggtgtaaagcagacgttcgcaatccgctttcaagtcttctcgattgagataaaaatggccggattttactccggccatctctttcctattttcttcaggattgacacaaagtgctaaatacatttcctatgtgtgatgcctgtcatgactgtctttttaatcagtctccgttccatacaccagcatccttcagattctgaatctgctgctccttcagctctgcacatgctgcttcgatatcgtttccaagtctctcgcggatctgctccggtgtctcacctgcctcaccacctgcgttgaaggagctgtacagataaccctctgccgttacatccatgatcgtattgtaaacaaccggtacatctgctgcgatcttagttgcgattgaattcggtgcctgtcctccgaagtaatcatcaccctccgtataaagctccggagctgcatcccatgccggcttgtatgccgggaagtagtcaactgccttgaacatggtgttctgtccctcagtcgttgccagcatatattttacaaatgcccatgctgcctctttattctcagactgctccgggataacaaggaaggaaccgccccagttcgttgcaccaagtccaccaggaagtacggttgcaccccagtgtcctgcgccatccggatcaatatcggtcttcaggaatccggagaaccaggaacctgctgctactgttacacagctgcctgccgcatatgctgcatatgcctctgaggaccacatatcaacgttcatatcccatccattctcacggatcttcaggcaggctgccaggcagtccagatcaccgtcgcgctccagcttgaggttcaggttctcatcatagtagtcacggttgatgaacatccactgatacggatatgctgcagacggaaggaaccatctctgtcccggaatagataccttttctgctacctcaagcacgccatcccaggtgctcatcagctcggccacctcatccggatcggtcgggagtccgacttcctcaaatacatctgtacggtaataataaagtgtcgggccaagatcccacggaagcgctaccattctgctgccatcatcggaaattgcctgattccatttgaattccacaaaatcatccttcagatcctctgcaccgaaatcatacaggttggtcaatgcggagctgttgcggtactgtgcaatgtaagcaccctctaccatcgctacatccggtgctcctgagcctgctgccagtgccgtctgcagtgactgatgatgtgcagtcgtatcggtaaatacaagctctacctcgacattcgggtactgctcattgaagccttccatagctgcttcaaacgcatcgtctcccgacggccagccacctacttcaattgttccggaaatctcctcgtctgcagatactgtcatctgtgcgcatgtcatcatagacatcgcggtcgctgctgccagggtccctgccagaaatctctttgcatttttcattcttacatcctccttttattttggttcctttttataaaatccccctgctttgctctcacagtgaggggtattttccttaacttatctgcgttcatacaaatcccgaacggtttcaccctccaatattttcattggaatttttgatacatagcggatcttttttccctgaatcatatccaaaagtacttccacgcatttctgcccctgcctttccggattcaccgccagcgaagttaatttctgatctgcgtattttctggcataggctccgtcaatgcctgctacggagacgtcctgtggaatccgatagcccagctttctcatcctcttgcagaagcccaacgccatctcatcattaaagcagaccgctgctgtcgcctttgactgtctttctttaaatagctcggctgccagttcacctttttcaaaataagtttcctcaatcagcggagccccccactgaatctcttccataagtccataactacgaatatcttgtttcaggttttccttattaacttcaaaaaaataatccttccagtgacttccgccacgttccttcataaaactgcaccatgcaaggctcctcgctgaagtagaatccatcggataaggcgtaaccagtgcaatcctccgatgccctttctcccatagatagtccagcattttattcatcccatcccacatattacactctatgaccggcatagatctggaaaaagaaatcgaatctccgtaggtggcagccacaaccggcaaatggtaatttttcccggtagcctccagataaagacctgcaattgtttcattcggcaaaatcaaaccatccgccataatcccttttacttttcgaaaatcaagcgtaccatttaccactaccatataatcctgctgtccggcagccgccagcattccacggtaaacctcaatattaaatgcattccgcatatctttacaataaaacaggatctgctttgtgcgctgcgtcatcagggacatggcaaccggattcggatggtagcccaactcctctgcaatctgtaaaatctgctctcgcttctttgcattcacatatccgctattattcaatgcccttgatacaactgaaacagaaacctgtgcccgctctgcgatgtctttccttgttaccatgtgaacctcacctttctctcccgaaaatattcttctgatttcaaatatttttctatgcgatttctatacgactataatacaggcattcatttcttatttcggttcacaaattgtagcatttactatccttgtatttcgttttgttttaccctcttttttgttttgtgcatattgcactagttttttaatgtttttcgttatgcatttacacatttattttattcatgcatttatattactttttatccgttattttcacaacacctcaatgtatggtcgcgcgtccacattgttatttttgctttttctgcagtcagcaattcatacaaagcaaaaaaagacagatcctttcggatccgccttctgttcttgcttccagctcagatacttttctgctatctcttcttccacctcgatcggcttctctgcgatgttctttacacgtttctcagcgactgtctaattcgctgccttcttctttccctcaaacagccggaagaaattccgcacacccggtcctgcaaagaaaatctgccagcaaagtgccatcgggaaattctgcacccacttctgcagccacagcgcgatgatctcttttcccggattcatgaacagcagggttgcaataaagctcatggtcgggcacatcaggcagacaatcatggatgaaatcgcgagcgtgataaaaatcggcttatcctgcggagacacgaaccgaaatgccagctttgcagcaagcttttctacaacgaaatactccagaatgcaggcaatcggccacatgatcggaatctcatgaaaggcgatgaggaaaatctcatttgacatatgtcctttgtcgagcgcgatgttgtagcataccatggcatacaccatgacaaacgccattacgatagtaaaaagaatgttctgtaactttgacttttgcataattgtactccttttttgataagatgttgaggggaagtccctcaattatgtacctgcggattgttcgtgcattgcatttacatcctcctggtatcctgataaatgggcgcaaaaaaacacatgtgtgttgttcgttatcagtgagcaaagcacacatgtgtcgtttccaattataccaaagttctctgttcaattgcggataatattttatcacattttcaaacagctgtaaagtgtctttttcccatttctcatgccatgactttttccgccttcagaacatccgtgatcttcttcaccggaacgatcgtcagcttctcctttacctccgctgcgacatcctccagatccggcatattgtccttcgggatatagacctttttcacgcctgcgcgctgtgccgccatcagcttctccggcagaccgccgatcggcatgataccaccgcgcaatgatacctcgccggtcattgcaatctccggattgaccggtttcccggacacgagagaggacaacgctgtcacaagcgtaatgcccgccgacggcccatcctttggtaccgcacctgccggaacatggatatgcaggtcgttcttcgcaaacagctctgctttctccgggtaaagctcctttacaagcgtcacggcgatcgccgcagactccttcatcacatcgccgagctgaccggtgatcgtcagcttgccatttccctttgtaaatactgtctcgataaagagaatctcgcctccggcctgtgtccatgcaagccccgttacgatacccggctgcggatgctccagaatccggtcatgctgcagcatgcagcgtccgagaaactccggtacccgctttgcactgacggaaatgctcttttcctcacccttcacgagctgcaccgccgcataccggcagagcgcatccagctgcttcttcagtccgcgcacaccggcctctgccgtatattctgagataatccgggcaatcgccttatctgataccttcagtccctgtgctggaatccccattgtctgcatggcgcgcggcagcaggtgcttcttcgcaatctgagctttctccactgccgtgtagcccggaaactggatgacctccatccggttcagcagcggctccggaattgtatcgaccgagttcgctgtgcagacaaataaaacattcgacaggtcatacgggacattcatatagtgatccgtaaagctgttgttctgctccggatcaagtacctcgagcagcgcactcgccggatctccgccataatcctttgccagcttatccacctcgtcgagtaccatcaccgggttcgacgcgccgctgcgcttcatgccttccatgatccggcccggcatcgcgccgatgtaagtccttctgtgtccgcggatctctgcctcatcccggataccgccaagactgatcctcacatatttgcggtgcagcgcccgcgcaatgctctgcccgatactcgtcttgccggtgcctggcgctccgacaaagagcaggattgatccggactgttttttattcaacgccatcactgcaagctgctgaattatacggttcttaacctttttcagcccatagtgatcctcatccaaaatccgctctgcttccttcagatcaatattctgcatctcctgcggcttccagtcaagactcgtgataaaatccagataatcatagagcatcccgtactcatgtccgtccttaccctcctgcttcatccggttcagcaccttctcggcttcctttttcgcctcttcattcattccggattcctggatcttcgtctcgaagcgacgcacatcagaaatattctccggatgcatctcatcgagctgcttctgcagaaaatcaatctgcttctttaaagcggcctcccggtagagctgctcgtttgcatccttctgtgcactctccgcctcctcgctgacgtggtaaaccgccatcagctcatagactgccttctcaatctgctccatgcgcagccttctggaatttgtctccagaagtgcatatttctcatcccacggaatattcagatagcttgacagcgcacacgccacctcggacaggctcttccagcgcaggatcattcctctcgcccacatgccccaactgaactcctttgcaaaattcagcagatcctctttgacttttccaaaatgttctttctcctcctgctccggaagatcatcaatctccgcacagatactggcatctgccgtcactccctccggtgtgatttcgatgtcagaaagctctacccgctcctttgcctgcacacgcacatttccttcgtcgtcgatcccttcaatctttccggatacaccgatcgggtaaaaatcatccggcagcagctcggacgctttcttctcctccttcagcatcataaacaatatatcttctccgacatcctctgccgtaatccgtctgtcgggaaacatatcctttttaaaatagaacatcacacctggaagcaataataaatcatgtaccggtattgtaatcatatatgtcccctcctcatttgtcagcactcttcttcatcgagtgctaatttgtattgaaataaaagggcgaactgcaagaattcgcctttttattttcctattctagcacgtattggggattttgcaagtggtttattacaatatccgcataccttccccccttacaagatggggcgcggtttgtggacagcttttttatcctttttttctcggcttttgttacctcgtgcgttgtccgtatgttatactgtggatattacttaaagttaaaaatttatatttttatgaaagtttccgactttataagttagaaactcttgtttttttcagacttttgggtatactaaaaccaaaactttcaggaggtgtactatgactgaccttattaatcgcccccaatacctgaaccagctgatacaaaataaagatgtagatctggtaaagatcgttaccggcatccggcgttgtgggaagtcctctttactggatctgtttcacaaatatctgacagaaaatggtgttccagatgctcacattatacacatgaatatggaatccctgcgctaccgtgacctgacgaattatcttttcttttacgattacgtcagcaagcgcatttccccggatggaaagacctacctgatattcgatgaacttcaggcggtagaacactgggaaaaagctattgaatcgttccggctggattttgatgtggatatctacatcacaggttccaatgcctatctgctgtccacagagttttcaacgctactgtccggcagatatgtggaaatccgaatgctcccactgtcattcagggaattccttgacttttatgaatttgcacctgatgtcagtatggaggaaaaattccaaaaataccttcagttcggcggaatgcctattctaagagaatacaaatttaatgaagcgagaagtaaccaggctctggaaggcatttattccaccgtagtgctacgggacatcctgcagcgaaacaacggtatcaatcaggcgatgctccagaagattatgctgtttttgtgctctaacatcggcagcatcacttctccaaacagcatcggaaatgtacttgccaatgagggcgatattccgactgtaaaagccaaaaacatcgcaggaaaaaccgtagaacgctatatctccatgctccgcaatgctttcgtgtttttctcagtggggcgctatgatgtaaaaggcaaacagctgctcaaaacgctgggaaaaaattacatcattgatctggggttccgcaatatgctgcttggttaccgcgatgcagaccgtggacacatccttgaaaatattgtgtttctggaactgctgcgccgggactaccgtgtgtatatcggaaaaatcggtgaaacagaaatcgacttcgtagcagaaaagccaaacgataaagtctatattcaggtaacagaaagcatgcagtctccggaaacccgtgaacgggagcttcgtccactgcgtatgatcccggataactacgagaaaatcgtgctgtctatggatcgaagttttattaattcctatgacggcattaagtcggtaaatctgattgactggcttcttcgaagctaagcaaaccaaaattatacttttctgccttccgcaggatcttgaagtaacattgacctgagaaaaaggagcagccaaaattccgactgctccttctccagactataaaagccaataatgcttattttacttgttaaactacttgactgtaaccacacaggtgcggatcacatttccggccttcaccgtgatagtcgctgttccttttttcttcgctgtcactttgccttttgcattgacggtcgctatctttttattggagctgcggtaggtaatcttggcttctgctccggacggcgtcagctttggcttgattgtgaaggatttgccctttttcagtgtcttgctttccggcactttgttcattccggtcggagccaccttctctaccgtcaccttcacggtaaccttcttctttccggcctttaccgtaatcttggcagttccggatttctttgcggtgatgacgcccttcttgctgaccgttacgaccttcttattcgaagagcggtagcttgccttgtctgctgtcgtgatcgggctgatcaccggagctaatgtgtatttctctccgcgcttcagcttcagtgatttgctgacattcgaaataccggaagcggctactttctttttctgtaccacgatcgtcacagtatcagaaacgccacttgcttgcgcctgcggcggtcgcttgcgacatcttccgcttacgccacagtgtgcatcctcgcgaagcgtttttactttacaggatgcaatttcctgtaaagcaaaaaaagaggatcagagatggtccgttactgaaaacttataaaaagttataaacttctatgttccattcctactttaacgagtatgcttttgatgatataaatatcaatctactcacaagttcctgtact

SEQ ID NO: 1637 - DNA, 8658 bp, Unknown
  16S sequences of unknown bacteria
cggcggctgccgtccgattttccgttgtatgaaactgttattttgtttcttctttttctttgagcaggtcgcgaatctccgcaagaagttcctcggtcgtaggacctttcggctcttcttccttggcttcctcttcttctttcttatgctcaaacttacgtcttacagtgtttatggcctttatcataaggaagataaccagcgcaataagcaggaaattgattattgcctgaatgaacgcgccgtagcaaaccgccacttccgcaacgcccgcggattcgtcagcctcggttatgacccatttaaggtcttcaaaattgaccttgccgattatgatgctgagaaacggcattattatctgatttacaagagaattgactatcgccgtaaaagctgagcccatgatcaagccgacggcaaggtcgataacgtttcctcttgttataaactctttgaattcggaaactattccgtgttttttagccattgtctttcaagtcctttcagttctatgccttttaaccgagccaatgaacattcgctacaagcgcggcaaacactatggacacgatggaaagaagttttatcagaatatttattgcaggacccgaagtatccttgaacgggtcgccaacggtatctccgacaacagccgccttgtggctgtcgctgccttttccgccgtggttgccgctctcaatatattttttcgcattgtcccatgcgccgcctgaattgctcatgaatacggcaagaaggaaacctgttgcggtagcgcccgcaagaagtccgataacaccagcaggtcccaaaacaagtcccacagcgacgggaacgataacggcaatgaccgtgggcgcgatcatctcacgaagagatgcgcgggtgcagaggtctacgcaggtcttgtaatcgggatcggcttttccctccataattcccgcgatggaacggaactgtctgcgaacctctttgacaacgctttccgcagctcgtccgacggaacgcatcgtaagagccgcgaagataaacggcagacacgcaccgataaacaaaccgccgagaacgacgggattcagaagatcgaccaagaagttttcaacgcccagtatcgaacagatctgttctttgtaagatgcgataagcgcaagtgcggtcaaagccgctgagcctatggcaaagcccttgcctgttgcggctgtggtgtttccgagagagtcaagcgcgtccgtgcgctggcgaaccgtttcgtcaagtcccgccatctgagcaataccgcccgcgttgtccgcaatgggaccgtaagcgtcggtggcaagcgttatgccgagagttgaaagcattccgaccgcggcaagcgcgatgccgtacattccgaagccgtcacccgaaacaaagtacgcgacaagtatagcagcaacgataatgattatgggtatggcggtcgaaagcattccgagtccgacgccgccgattatggtcgttgcggaactcgtttctgagtcctttgcgagtttgcgggtcggtttataagaatccgatgtaaaatattcggttgcaagaccgatgagtacgccgcccaaaagtcccgcaagtatagcaaaataaaggccgatatgttctttgccgagcaagaaccagattatcggaaaagcggaaatcgcaataagaaccgcgctgaaattcgtacctctgcgaagagaagaaagcaggctcttttgatctgcgttttcctttgttctgacgaaaaatgtgcctaaaatggagaacacaacgccgacagccgcaaggataagaggaattattatacctttaacagcctctcctcccccgaaagcgaccgcaccgagtgcgatggcagaaacaagagaaccgaaataagattcataaaggtccgcacccatacccgcaacgtctccgacgttatctcctacgttatcggctataacggcagggtttcttgcgtcgtcttcgggaatgcctgcttcaacttttcccacaaggtctgcgccgacgtctgccgctttggtaaatataccgccgccgactcttgcaaacagcgccatggaagaagctcccataccgaaagtgacaacggtcgcggcaataacgcttgcttccacgccgaaagcatatttcaaaagaataagccataccgaaagatcgagaagtccgagaccgacaacggtaaagcccataacgctgcccgcggaaaaagcaacgcggagacctttgttaagtccctcggtgcaggcttttgcggtacgcgcattggacgccgttgctattttcattccgataaaaccggaaagtcccgaatatatgccgcccgtcaaaaacgcaaacggaatatacggatttttcagaacgttaaacagcgtcaacgtttcaagaatggcaaacacgacaaggaaaaagaccgtaaccacggcatactgtcgtttcaggaacgcggacgctccgtcacggaccgcttttgaaatctttttcatcaagtccgttccctcatcgaatttcaagacacgtcttgcggtcaaaatcacatagaaaagcgcgataagcgccgccgcaagcgagatgaagggataatagttttgcaaaaactccaacataaagaccctcccgataatggcagaagtatgtagttttgtcttataattataactgaaaaaaaacgggtttgcaagttattttaacaaaatgcttaaaaaaagtcacaagcgtttttttgagatgaatttatgcacaaaagttttcttaaaccggtatatatttacagacaaattgtcaatctttttgttatcactgaataattttgaaaattaaaagtaatttttatttacttttatccgtgaattcgtaattatttgtgctgaatatattgccaaattcagacaaaaaccgacagacaaggtttccctctccgtcggtaaatacacatattgaattttattataatcaggaaagttccctgtcaaggatctcgacaacgtcgccgagcgttccctgcatatggtcacaaacgaccgtcccgtaatgtttcagttcctctgcggcgttttcgggaagaaataccctccctgcaactttgaacatcggttcgtcattgaaaaagtctccgaccgcaatcgtttttttcatatctattccgagcctcgacgcaaggtttgtcagaccgaagcccttgttgttgtcctttccgacaacttcaagaagtatcggtgtgcttctgacaaatcgcagatccggatagccgaaactctcgacaaacggttgaagttcgcgcaaaacagagtccttttcaacgcaaagtaccttgaaccacggaagaggcagatcatctacatttatcataactgcagggtttttcaacgcttcgacaacccgttggtcgcacttttcggatatgcaatacattttgtcgtccttgaaaacgacgagcatcatgtcgggatatttttcgattatcgcgtgcataagagaaaccatatcgggagtattcactccgtgttgctcgataacctcttcctttgccatatcgtaaagcatcgcgccgttgaagagtatctcgggagcgttctgcggaatatccgaggcaataatttttgcggcaaccgcacctctgcccgtcgcaagagtaaattttccgccgttttcaataaaatattttacggcttcaatgttgcggggaggaatatccgttccctcggcaaaaaaggttttgtcaaggtcgctgaccataagataaccgctgaattttcccatatcaaagcacctttttcaagaagttccgagcgcgttctgtctgcggcgcttcgaaaaaagctttcggatcggcatcctctagaacaacgccctcatctataaagaaaagtctgtttgaaacttcgcgcgcaaagcccatctcatgggttacgataagcatcgtcataccgccgtccgcaagacgctttataacgtcgagaacttcgccgaccatttcggggtcaagcgccgaggtaggctcatcaaaaagcattactttcgggttcattgccatggcgcggacaatagccgcgcgctgtttctgaccgcccgagagttgtgaggggtatgcgtccgctttatcggcaagtccgacggaagcgagcaagtccaatgcgttctcaaccgcctgctgttttggaatttttctcaatttttgcggagcaagcgttatgttttcgagtattgttttgtgaggaaacagattgaaatgctggaagaccattcccatttcctgtctcatcagatttatatctgttttcgggtcggttatatcaacgccctcgaatgtaacagagccggaggtcggcatttcaagcaggttcagacagcgcaaaaacgtgcttttgccagaaccggaaggaccgatgatagaaatgatgtcgcccttattgatagttttggttatacctttcagaacttcgatttcattctttttgccgaacgacttataaagattcttaacttctatcactcttacgcaacctcctttcgagtttgcccgaaagccaactcattatcataacgatggcaagataaataattgcaaccgttatcagcggaataaaatactgataggttctgcccgctattacgtttcccgccttggtcaggtcgataacaccgacataacccgcaacggaagtttctttcaaaagcgcgataaattcgttgcacagcgtgggtaaaactgtcttgaaagcctgaggaagaacaatgtgccacatcgtgcccacatagccgaacccgaggcttcgtccagcctcaaactgtccctcgtcaacggacataatgccgccgcggaatatttccgcgacgtatgcgccggagtttataccgaacgcgaaaataccgaccaaaacgccgttttgcgcggaaacaaagataaggaaataggaaatcatcagctgaaccacaacgggagttccgcgaataaccgtcagatagattttgcatattccgttcagaagtcccataaagaagcgacccgcgccgccctttttcttcaaatcttccttattcttgtcgtatgaagaacgtattgccgcaacaacgataccgataacgatacccacaagcaatgcgccgcctgttattttcagcgtatttccgagaccggtaaacatctgtttatatctgtccttttcgacaaagacaaaacagaactggtcgtaaatattgacaaaccagcccgaaatatccgtccacaagcgtgaaaagaacgctccgatgccttcaaacattatagatttaaccccttttataatacccgaaatatgggcggagatcatccgcccatattcattttgtgtttatccgccgtttatgcggggatgtatttgtcaactatcttctgcaaagagccgtctgcgataagttctttgagcgccgcgtctatggcgtctttgagttccggattgtctttcgaaaccgctattgcgtaatcttcatcggcataagacgtttcaagtatcttcaagccctcgttagcggcaacgtaagcctttgcgggttcgttgtctatgataacgcagtcaactttgcctgctttgagcgcttcaacggcaaccgcaccgttcgaatatctaataacgttgtcttcgccgaaatcactggaagcgtaaatatcgccggtggttgtttcctgaacgcctatcttcttgcccgcaaggtcatcaatcgattggattccggaatcctctttaacgataacgacctgaataccctttgcgtaggaggttgtgaagtcaacactcttcaagcggtcttcgttgacggtaagacccgccatacccatatcgtatttgccgctctgaacgccgggaacgaccgcgttgaagtcgccgtccacgatttcaagagtaagcccgagtttttcggcaataagctgagcaacttccgcgtcgatgcctacgatcttgtcgccgtcgtaatattcatacggcgggaactctgcgtttgtaaccatcgtaagaacaccgtcttttgcggtctttacggtagcctttgtctcaccgcttgttccctggggagccgtagtggtcgccgtgttatcgttttttgaaccgcaagcggtaagtccgagtgtcgcaaaaacagcgacaagcaaaacaactgcaataaactttttcattttctcatacctcgtttttgatttttgatgcatatatgataccacatatttatgcataagtcaatcaagaaaatgaaacaaaacgcggtttacgactgtgtttttgcaaactaaaagtgaattttatacattttatagcataaaaattaaattttatcatttatgcagaacttactcaaaccatcgaacacactatgcaagaagttcctcattgatttttccctcaacgatttcaacggtctgctcttttgtggtcaaaccctttgcatagttattgataacttccgtcaggtcggttattttgtcatacgtcttgtcaagaacattcacatccgtgccctgcccctgaaactgatgataaaaagtcacttcgccgtctttgagatatgcgccgcacatcgtcaacgaaaaattgagccatttaccttttcccgcaacccatttggttattgcctcggtcgttatttgagccataataagatcctccgaatatacatattataataactacaactgaaaaaaacagtttaattcgaaaaatccgcttttgtcaaaatcaacaaaagcggatttttcatggtccgagcgactggacttgaaccagcggcctcttgaaccccattcaagcacgctaccaaactgcgctacgcccggatgtcagcctaaatatattaccacaaattctcgcgatttgcaataccctttcttcatatttttatattttgtcaaaattacattttaaccttgatttttaatatcaggtatgttatacttgatttaattgagtacaactcaatcaagacaaaccaaagttcggttctccgaacgctgtaccgaaaggaaactaaaatgaacgaaacgccttttcgccgcatgggaacgatgcttgactgttcccgcaatgcggtcatgaatgtgaactcgcttaaaaagtggatagatatctgcgcaaagatagggttcaatacggttctgctttacaccgaagacacctatgaaattcccgaagagccttatttcggctatctccgcggcagatactcgcaagccgaaatcaaagaagttgacgctttcgcaaaagagcgcggcgtggaactcattccatgcattcagacgcttgcgcacgttaacggaatagttcgctggccggcgttcgcgcccattatcgacacggcggacatactgcttgcgggcgaagacaggacttatgaactgatagacagaatgttcgcgtccgtcgccgcctcgtattcgacaaaaatcgtcaacatcggaatggacgaagcgcatatgataggtcgcggcagatattacgatctgcacggagacaccgacaaggtcaagatccttattgagcatattaaaaaggtctcgggaataggcaaaaaatacggtctgactcttcttatttggtcggatatgttcttccgtcttgcggcgggagattattacaggtcaaacgcgaagattgatgaaagcgtaaaagaacaaatacccgacaacgtcgagctcatatactgggattattattcaacggacagaaaacactatgacaaaatgctttccgcgcacgcgaagataaaggacggaacgtggttcgcgggcggactttggacatgggtcggatatgcggcgcacaacgaatacagcatgcgttcgacgaaagcggcgctcggcgcctgtgtaaagcacagcgtcaaagacgtatttctgacgatgtggggcgacgacggcggagaatgctccaagttttcgcttctgccctcgcttttctatgctgcggaaatcgcaaaaggaataacaaataaagtgcagataaaagaggatttcaaaaaaacgttcggcatctcttttgacaggtttatgcttcttgacctgcccgacagcccgaacaaaaacgcggacggaattaaaaacaccgaaaaatatctgcttttcaacgacccgtttatgggcatacttgactcaacacttgtcggcgacgagggcgaaaaattcgcaaaggcggcaagaaaactcgtatacgccaaaaacgaacccgaatggggatatcttttcagaactctttacacgctttgcgatgcgcttgcaataaaagcgaatctcggtcaacgtatccgcgcggcgtatttcgcaaaagacaaagccgcattgcttgcggaagcggataactgcaaaaaactgcaaaagaaactcaacgcattccatgaagcgtacaaagagcaatggtacaaagaaaacaaaggtcagggctttgaagttcaggacatccgaataggcggtcttataaagcgcgttgaacattgcggacaaatgctccgcgactatgccgagggcaaaacagacaagatagacgaacttgaagagcctttgctcgatctccacggcaacggcgcagacttcaaaccgggcgcgatttgctaccaatcatggagaatgaactcatcggcaaatattctctaaaaagcatatatatatttacattatataatataaaagtc

SEQ ID NO: 1638 - DNA, 24187 bp, Unknown
  16S sequences of unknown bacteria
agctgcttgaacaatttttgatagaaatattgtctaactttttggggtcacttcaaatttatccgccggttttttgttttcttagaccccttctgtggcttccagctgcatccgggcgaaaaagtcctgggaggacagaccgtggggacggttgaagcgtcccaggagaaacagggaagaggggtctctggtaatgcgggacacccggctttcacagctgagggtgatctgatatcccaggctttttaaaatttcttcgctttgggcggtgtaaaaaccaaagggataagcgtacagcgtgggtgtttttccagtagcgtcggtgatggcctcatggatcttttgggtgtctgcggtaaaaatctgggcgtagtgtgcgtcggtttcgcccgatagccttttggcccctgaacgactttcctgtccggcggcgtcgtgcatattgtagctgtggctgccgatggatacatagggggattgggaaagggttttcacttggtcccaatccaaatgggaatagttcaggtggcggacggcatcgggctgggaatacaggtcggaatagcggccgatgacactgaccacggcaggcatctggtatttttgcagcaagggataggcattggcaaaaaagctctcgtagccatcgtcaaaggtgagcagaatggggttctgggggagttcaccttctccggcggcgtaggcgatgagctgatcgggggagaccggggtgtagcctgctttttgcagccattgaaggtcgctttccagctcctgacgggagatcacataatcccccaaaagactgctgtcctcttccaacacatggtggtacatcaccaccggcacatccacgccttcctggccattggccgggagaaagggggattttggctcaggccaggccagagcgaacagaaagcaaagaagggagaacagggctatgtagccccaggacttttgccaaaacttcttcaaaaaaaggcctccttttgaagcaatccatgggaaatggatatgcgccaaagaaggcctttatgtgtttcgaatcaggagaatggaaacttacattttcgctttttcttccacgatgagctgacggatgtgggcatccagatctttcagggcttcccgactgagctgggcagtgtgcaccggaggcaggaacttgatgcgcactgtggccggatgaatccagaagccgtgggcttccatcaccttgtaagagccgctgatgcacagaggcacaatgggcactttggctttggaggccgcccggaaagcgccggttttgaaggggcccacctgttcgccgcggctgcgggtgccttcggggaagatgagcatgctgtacccctcttccagaagagcggtggctttgcctaaggattccaccgccttgcggggattgctccggtccacaaagacgcagtggagcaatttcatccagctgcggataaaaggcactttttccagttcttttttggccagaacgccgcagggcttgggcagataacccagcatcaggggaatgtcgaaattgccctggtggttgcccacatagaccacggccccctggggaatgttctggagaccggtgatctccaccttgacgccggccgctttcagaagccgccgggcccatttccgcacggcctcttccataatggcgtcgctttctttgatgcgcccttgagcggtgagctttttgcaccggtagaacttgggcagcacagccaccagataggcccagaaataaataaaccaaaggattgttcgcataaaatacccccacaggttgtttttgttgcttcgcacattgtattgtaacccataccgccgcccctgtcaaaagccttgcctttttggggcagggggtttacaatgaaacaaaaagcgaaagggtggtatttttttatggacgagcagggaaagcgtatcaaagaatatgtggaagcccatgggcaggagatcatcggggatttggtggagctgaccaaagcccagtctcccaccacctgcaaggagctggccgatgcctgcggccagaagatccgggagctggtgaaagagcgggtgggcatcgatggcacgatctacccccaggaaaagcggggcgaccatatgagcttcactctgggtgagcagaaggaacagattctgatgctggcccatttcgataccgtgtgggacaaagacgctctgcctctcaagcaggagggggatgtgctctatggcccgggagcttatgatatgaaggccggactggtgtcggccatctgggctatgaagatctgcaaggagctggagctgcctttgcacaagcggttgtgcctgctgtgcaattccgatgaagaggtgggcagcggcacttcccaggccctcattgaagaaaaagccaaagagagtgcggcggctttgtgtctggagcccagccagggccagacaggcaatctgaaaaccgctcggaagggaaccggcaaatatgtggtcaccgttcatggccgggcggcccatgcgggaaatgagccggaaaagggcgtcagcgcgctggaagaggcggcccggatcattctgttcctccacagccttaccgatctggagaagggaaccaccgtcaatgtgggagtgactcacggcggtacccgggccaacatcgtggcggcccaggcggagatggagatcgatgtgcgcacctggaccatggaagaggctcagcgcatcgacggcatcatcaaggggctgaagcccagccgggagggaatcaccctggaagtggagggggatatcggccgtccggcgctggagtttactccccagaatcagcagctgtttgcactggctcagaaaaccgcagaagagatgggcctttctgtagaaggggcctttgtgggcggcggcagcgatggcaacttcacctcggccctgggtattcctaccctggacggcttgggagctgtgggacagggcgcccatgcccagcatgagcaggtgcagctcagtgcctggttggagagggtggctttgttgacccagctggtgacccggatataataaatatacatattatataatagggaagagacggagaagaaccatggacaatcaaacagtggggatcatcggcgctggtcatgtgggcagccatgtggccatgagcctggtgatccagggaatctgccgccggttgatgctcatcgataccgatgaaaagaaggctcgggcccaggccgacgacctgatggacggcctttgtcatctgccttggccggtggagatcaaggcggggagctatgaagatctgaaagacgcccaggtggtggtgatggccgcttgcggcgcggctatcgaggaggaccggctgcaggagctggccgacactttgaaagtgaccgaagaggtggcgtcccggctgaaggagtgcggctttcagggagtggtggtctccatttccaacccttgcgatgtgattgcccagaagatgtgggagatgaccggcttgcgggtgctgggcaccggtacggccctggattctgcccgcttcagccggagagtggctgctttgctgggcgtggctccccagaatgtgtgcgcctatatgctgggcgagcatggggacagccaggtggcggccttgtcccagatcacagtgagcggccagcccttggcacaatggatggagcggcatccggggaagatcacaaaggaagatctgaacaaagccgccagggagacggtggagaccggttggcagatcgtactgggcaaaggttccactgagtttggtgtggcctcggcggccgccgccatcacccgggccatcctgcgggatgaaaagcgggtgatgccctgctcggcccttctcaccggacagtatggccaggagggtgtctttgccagtactctgtgcgtcataggccgggacggggccgaagaggtgtggcagcttcctttgaaccaggaagaggaagaagctctggttcgctcctgtgagatcatccgccgctttgtgaaagaaaattaaacgggataagagccttgggaaccactctcccaaggctcttactttagactcttatttttactcaggcgctcagttcgtccagggtgccgaaggtgtagcccatatcctcccatttggtgagcagttcatccagaatatctgcgttggtctgggaggtgctgtggagcagcacaatggcgccggggtggatgcggggcagcagcttgtcgtaggcctcctgcggggaaggctgtttgtcggtgtaccagtccacataggccaggctccagaaaatcgtttggtatcccagtgtctgggcttgctccaggttgctttcgctgaatttcccctggggtgggcgatagtattttttcatctcttccccggtgatctccttgtatttttcctccacagcggtaagttccccacggaaactgtccagatcggcgatttgggacatatccgggtgatgataggtgtgattgcccacaatatgcccttcttcggccatccgctgcaccagttccggagcggtctccagataattgccgactacaaagaaagtggctttggcattgtgctttttcagcgcatccaggatgggggcggtacagccgttttcaaagccgcagtcaaaagtgaggtaaatggtcttttgctgggtatttcccaggtaacgggcgttgtagcccgctagatattcgctggtggcattacccaccggcgcttccccttctttttggaaactcaggccccagttggtgttggaggccgaagccgtcaccgccggaggggaggaagaaaagaaagagagcaccagggcaaaggccagggcggcagggagcagaagcagcgctggccggcgaaggatttttttcagcaaaacacatcccacctgtctgtcaagatggaacatctctatgaaaaaatccgtctatgtatgcgggaaagtgtctttcttacaaaatattcacacaaaaacagatgggttatggtatgatgggaaaaatccgtcgaaaaaggaaggaggggatggaatgaagctgtggggtggcaaaggccgtcggaagccttctcccaaaaagatcgaaagccaaaaggaaccttttgagatcgattgggagcaggtgtgggagcgggaagagcaggaaagaaaagaacggctgaccggccacccggcatcaaagggcaacaagcaggggaagaaggccggaaagaaaaaggggcggttttggaaaaggagccttgtggctttgttccttctggccgggctttactgtgtggcggtcttttcgcccatccccttcatcgccaaatggcgggccatctacattgaaacggctatgggcaccatgacccaccagtggctggccaccgctttcatcccttcctttgtcatcgacgatgtgatggggcagcgggaacaggtggagaaggaacagcaggggctggaaagccagtggaaggaagagggcttcggtgagagccaggccactccctgggacaaactgcgaaaggactttttccagcagtatcctcagatcgaagaagcttcctttgaggaatatatgaaggaacacggggaagaggccattgacgaagagggctatcttctcatcgataaagcggggctggaggacgaggacaccgggatccgcaccaaaaagggagatcaagtgctggtggtggacacccgcaacggcatcatcatctgtaaggtcaccggggaaggctatgtgggacggctggctctggtgcgggacccttcccaggtgggagtagccctggcccccagctacggcagcgtggggtctctggcggcggacatcgccgaaaagcgggatgcagtgcttctgaccaatgccagcggcttttatgacccggacggccacggcaatggaggaacggcccacggccttgtgatctccgggggcgaaaagaaaaacgacgccgtaggcggcacttataagaccattggcattgatgaagaaaaccggctgcacatcggcgcttcggagagcacctaccgggatgcggtggagttcaagccggctctcattgtcaatggagagcaggtggtggagggcagcgccggttggggcgtgcagccccggacggccatcggccagacccaggaagggaccatgctgcttttggtggtggatggccgggcgccggggtattccatcggctgcactgtgggagactgcgccgagatcctggggcgctatggggctgtgcaggcctgcaacctggacggcggctcctccagtattatggtctaccggggaagggagatctcccggccctcggcggccaacaagacccagggtcgccatatccccaatggcatcgccgtctatggagactgaaaaccggcccttttcccggacattgcccgggaaaagggcaatgtgccagaaattttgaaaaaatttttgtacaatctattgacacaaagctgaaaatgatgtattctagttaagcgcctggaagagaatactgtcctggcgtgaacatatacaatgcgatgaagctggagattgccgcctttggcgggtaactttggtggagtatgtccgacaatcgggcggctgggaaacaaacagcacgcgagtatccgcggatgggaactgcctgcatcgtgcaggaaagccctttcgggaaaccaacgggtgcataaaatgccggaagattgcgtctatgcagccggcttctttcatgcccaaagcgagatacacacggaagcgttgcgaaatttcccgccgaacgcggtcaacaaaatttgattacgttcgcaagtcaaggaggaacacacagtggcaaacacagagaaaatcagaattcgcttgaaggcctacgatcatcaggtgatcgatcaggcggcggagaagatcgttgagacagccaagcgcaccggcgtggaagtctccggccccatccccctgcctaccgagaaagagatcgtgaccatcctgcgggccgtccataaatataaggacagccgtgagcagttcgagcgccgcacccacaagcgccttatcgatatcctgaagccctcgcagaagaccatggaggctctgaccaacctggatctgcccgctggcgtcgagatagaaatcaagctctaaaccaaaaagagcgaggaagaaaacgcgcagtacccgaaatgcccgctttccggcgggagggtcaagttaagggcaggacccccttaaccaataacctgtaaggaggaaatacaatgcagaaagccatcattggcaagaaggtcggcatgacgcagatcttcgatgaaaccggcaaggtcatccctgtcactgtcatcgaagccggcccctgcaccgttgtgcagaaaaagactgtggacaaagaaggcttcgattccatccagctgggcttttccgatgtccaggagaagaagctgaccaaggctgaagccggtcacctgaaaaaggccggtgtcagcatgaagaaatacctgaaagagttccgtctggacgatatctcttcttacaatgtgggcgatatcgtttacgccgatgtgttcgccgaaggcgacaaggtggatgtcactggcatcagcaaaggtaagggctacgccggcatcatcaagcgctggaacgcccattcccaggagcacacccacggcgtgggccctgtgcaccgctccgtcggctccatgggcgccaacaccgatccttcccgggtctttcccggcaagaagatggccggtcacctgggctgcgagcaggtcaccatccagaacctggacatcgccaaggtggacaaggaactgaacctcatcgccatccgcggcgcagtccccggccccaagggcggcatcgtgttcatcaagaacaccgtcaaggcgtaaggtcgagggaaggaggaagagacaatggctaaaacaaatgtttacgatatgagcggcaaggtcgtgggcgagatcgagctcaacgacgctgtgttcggcatcgagcccaacaccgccgtcatgcacgaggccgtgaagaactacctggccaaccagcggcagggcactcagagcaccctgacccgggccgaagttcgcggcggcggccgcaagccctggcgccagaagggcaccggtcgggcccgtcagggttccacccgcgctccccagtggatccacggcggtatcgccctgggccccaagccccgggattacggctatcatatgaataagaagtcccgccagctggccatcaagagcgccctgagcgccaaggcggccgccggcaacatcatggtcatcgagaacctggatctgagcgaagtgaagaccaagaacttcgtcaagttcctcagcgatgtgggcgccaccggcaagtccctggtggtcactcctgaagtgcgccggaatgtggtgctctccgcccggaatatccccggcgtgcgtaccaccatctccagcatcatcagcgtctatgacatcctgcgggccgacaagttcatcgtcgacaaagccgcggtggccaagatcgaggaggtatacgcataatgaaaactgcatacgatgtgatcctccgcccggtcatcaccgaaaagagcatggctggcatcgccgacaagaagtatgtctttgaggtggccaccgattccaacaaggtggagatccgcaaggcgatcgaggagatcttcaaggtaaaggtcctgagcgtcaacaccatcaatgttcggggcaaggaaaagagagtgggcgtccacaccggctacactgcgaaaaagaagaaggccattgtgcgtctgaccgaagattccaagggcattgagatcttcgagggcatgttctaaataaagaacagcctggggcatcgttcccccctctgaatgtatgccgcttatggcggcgcaaaacaaaaagacaataaggagtgaaacacagtggctatcaagaccttcaacccgacgactccgtccagaagaaacatgacggtgatcgactactcgggcctgagcaaggttaagccggaaaagagcctcctggagactctgaagaagaattccggccgtaacagctatggcagaatcactgttcgtcaccgcggtggcggcaacaagaagaaatacagaatcatcgacttcaagcgggacaagatggacatggctgccaccgtcctgactctggaatacgatcccaaccgcagcgccaacatcgccctcgtggaatatgaggacaaagagcgccgctacatcatcgctcccaacggcctgaaggtgggcgatgtggtctattcctccgccaacgccgatatcaagccgggcaactgcctgcccatcgccaacatccccctgggtaccatcatccacaacatcgagctgtatcccggccgcggcgcccagctggtgcgctccgctggcggcgctgctcagctgatggccaaagagggcgaagccgctcaggttcgtctgccttccggcgaagtgcggtacatccgcatgaactgcaaggccaccatcggccaggttggcaacatcgattatgagaatgttcagatcggtaaggccggccgtacccgccacaagggcttccgtcccaccgtgcgcggctcggtcatgaacccctgcgaccacccccacggcggcggcgaaggcaagagccccatcggccgtcccagcccggttactccctggggcaagcccactatgggttacaagacccgtaagaccaagaaccgtactgacaagcagatcgtcagacgccgcaacggcaaataaagaaaggagacacaacttatgggcagaagcgttaagaagggcccctttgtggctcccgagctgatcaaaagggtcaacgaaatgaataagactggcgagaagagagtgctcaagacctggtccagagcctccaccatcttcccccagttcgtcgggcacaccattgctgtccatgacggcagaaagcatgtgcctgtgtatatcacagaagacatggtcggccacaagttgggcgagtttgctcccacccggacctatcggggccacgcgggcagcaaaacatccaacaacggcaaataagccttaggaggaaagacagatggaagcaagagcttatttgaagcacgtccgcatctctccccggaaggtcaagatcgtttgcgacctgatccgcggtaaggatgtcggggttgccgctgccattttgatgaacactcccaaggcagcctgcgaacccatgctgaagctgctccggagtgcagcagccaacgctgaaaacaaccacaacatgaacaccgatctgctgtatgtggatcaggtcttcgtttgccccggccccgtgatgaagcgggttcgtccccgcgctaagggcagagcgttccgcatcctcaaaaggacatcgcacatcacgatcgtcctgaaagaaaaagaataaggtcaggaggttagttatgggccagaaagtcaatccccacggtcttcgcgtgggtgtcatcaagggttgggactcccgctggtatgccaaagacaacgccttcggcgacctgttggtagaagactataacatcagaaagttcctgaagaagaagctgtatgctgccggtgttcctcagatcgagatcgagcgcaacagcaagaatgtgaagatcatcatccattgcgcccgtcccggcatcatcgtgggcaagggcggcgctgagatcgaaaagctccgcgtcgagctggagaagatgatcggcaagagcgtcaacatcagcatcgtggaagtgagaagccccgacctgaacgctcagctggtggccgagaacatcgccgctcagctggagaagcgcatctccttccgccgggccatgaagcagtccatcggccgggccatgaagctgggcgccaagggtatcaaggtgtgcgtgtccggccgtctgggcggcgctgaaatcgcccgtaccgagcactatcacgagggcaccattcccctgcagaccctgcgggccgacatcgactacggctttgcagaggccaacaccacctacggccgcatcggcgtgaaggtttggctgtacaagggcgagatcctcaccggcggtcctcggaccaccgaagtggaagctccccgtcgtgaccgccgcgaccgtcgggatcgccgggatggcgaccgccggggcggtgatcgccgcaactacaacaacaaccggggctataacaaccgcggccagggcggctacaaccgtcagggcggttacaactctaatcgcggccagggcggctacaatcgtcagggcggcgcttcggcccccagagctcccaaaacggaaggaggcgcccagtaatgcttctgcctaagagagtaaaataccgcagagtgcacagaggccgtatgaagggcaaggccaccagaggcaactttgtctccaatggcgatttcggcctgatggcgactgagcccgcctggatcaccagcaaccagatcgaggccgctcgtattgccatgacccgttatatcaagagaggcggtcaggtgtggatcaagatcttccccgacaagcctgtgacagagaaacccgccgaaacccgaatgggttccggtaagggctccccggaatactgggttgccgtggtcaagcccggcagagtgatgttcgagatcggcggcgtcagcgaggaagtggctcgtgaggctatgcgcctggctggctacaagctgcccgtcaagacaaagtttgtgaagcgtgcggactttgatgagaaaacaggtggtgaagtatgatgaaggcaaatgagatccgtgagctgtcggccgaagagctcaacgcaaagctcggcgatctgaaaaaagatctctttaatctcagacttcagcacgctatcaaccagttggataaccccaacaagatcgccgaagtcaaaagagatatcgcgaaagtcaagaccatcatccgcgagcgcgagcttgcggcccggtcctaagcggtaaaggaggtaacgcaggtgagcgagagagctttccgcaagacgagggtcggcaaggtcgtctccgataaaatggataagaccatcgttgttgcgatcgaagacagagtgcagcatccgctgtataagaagttcatcaacagaacatataagctgaaagcccatgacgagaagaacgaagctggcgtgggcgaccgcgtgaaggtcatggaaacaagacccctgtcccgggacaagagatggcgtcttgttgagatcattgagaaagcgaagtaaggagggtttgccgtggtacagcaggaatcttatctgcgcgttgcggataacaccggcgcgaaagaactgaaatgcatccgtgttctcggcggctctacccgcagatacggtaacatcggcgacgtgatcgtcgcttccgtccgcaaggcagctcccggcggcatggtgaagaagggcgatgtggttcgcgctgtcatcgtgcgcaccaagaagggcctgcgccgtcaggacggttcttacatccgcttcgatgagaatgcggctgtaatcatcaaggaagacaaaaaccccagaggaacccgtattttcgggcccgtggccagagagctgcgcgagaaggattatatgaagatcctctccctggctccggaagtactgtaaggaggacgctatgaatacactcaatgtgaaaaagggcgataccgtcatagtgctttccggcaaagataagggcaagaagggcaaggtcctttccacccatcccgccgctggcaaagtggtggtggaaggcgtcaacttcgccacaaagcatgtgaaaccccgcaagcagggcgatccctccggcatcatgaagcaggagacccccatccgcgcttgcaaggtgatgcgcgtttgccccaagtgcgataagcccaccagagtcaaacatcagattcttgcctccggcgagaaggtcagagtctgcgcaaaatgcggcgagaccatataacgggaggaggaagagacaatggctaatatcgctgaggaaaagtatgtgccccggctgaaggcaaagtaccagagcgaaatcgctccggccctgatgaagaaattcgcctacaagagccccatgcagatccccaagctggataagatcacagtgaatgtcggctgcggcgaagcccgcgacaactccaaggctctggacgctgtgtgcaacgatctggctaagatcaccggccagaaggccctggtcaccaaggctaagaagtctgtggcgaacttcaaactgcgtgaaggtatgcccatcggtgccaaagtcaccctgcgtggcgaccgcatgtgggagttcctggatcggttcttcaatgtggctctgccccgtgtccgcgacttccgcggcatcaatgccaacggcttcgacggccatggcaactatgctgtgggcgtgaaagagcagctgatcttcccggagatcgagtatgacaagatcgacaagatccgcggcatggacatcgtgtttaccacaaccgcacagaacgatgaagaggcaagagagctgctcacactgcttggcgctcccttcgccagataagagggaggattgttggcatggctaaaaagtctatggttttgaagcagcagcgcggcagcaagttttccaccagaaactacaacagatgcaagatctgcggccgccctcatgcctatctgcgcaactacggcatctgccgtatctgcttccgtgagctggcttacaagggccagatccctggcgtgcgcaaggccagctggtaaaaaacgaggggtaacccccgtttgtatgtgaaaggggccttatggccccgcccaaagaaaagtggagatggcaagccaatctctaacttctgcaaggaggataataaatggttattacagaccctattgccgatatgctgacgcgtatccgcaacgccacatccgcccgccacagcactgtggatgtgcccacctcgggcatgaagcgggccatcgcccagatcctgctggacgaaggctacatcaaggccttcgaactggtggatgacggcgcccagggcatgattcatatcacgctgaaaagcaacaaggaaaaagcgatctgcggcctgcgccgtgtgtccaagcccggcctgcgcgtctatgccggcgccgatgagctgccccgcgtgctcaagggcctgggtattgcgatcgtttccacatccaagggcatcatgaccgacaagaaagctcgcgagctgaatgtcggcggcgaagtcctggcatttgtctggtaagggaggataacggaatatgtccagaattggtaaactgcccgttagcatccccgccggtgtcaccgtggatgtcaagggtaatgtggtgcatgtgaagggccccaaaggggaactgacacaggaaatgcacaaggatatgctgatcgctgtggaagacggccatgtggttgtcaagcgccccagcgaggctaaactgcacaagtcgctccatggcctgacccgcaccctgatcgccaacatggtggaaggtgtggaaaagggctacagcaaggagctggaagtcaacggcgttggttatcgtgtggccaagcagggtaagcagctggtgatgaacctgggttattctcatcaggtgatcatggacgagatccccggtatcaccatcgatgtacctgcccccaacaagatcatcatctctggccccaacaagcagatggttggccagttcgccgctgaagtgcgggaaaagagaccgcccgaaccctataagggcaaaggcatcaaatatgctaccgaggtcgtgcgccgcaaggaaggcaaggccggcggtaagaagaaataaggggggtgcgcatcaatggttaagaagatcgataagaacgctcagcgcctgaagcggcacaagagagtgcgcgccaacatttccggcaccgccgagagaccccgcctggatgtgttccgcagcgcgaaccacatctatgcacaggtcatcgatgatgccaacggtgtcactcttgtttctgcctcctccaccgaaaaggactttggttcttacggcggcaacaaggaagcggccagaaaggtcggccagatcgtggccgagcgcgcaaaagccaaggggatcagcgtcgtggtgttcgaccgcggcggctacctctaccacggccgcgtcaaagaactcgcagagggcgcccgcgagggcggactccagttttaatgggaggtagaatatggctcgtatgatagatgcaagcacattggagctgcaggagaaagttgtctccctgaaccgtgtttccaaaaccgtaaagggcggccgtatcttcaagttcgcggctctggttgtggttggtgaccagaacggtatcgtgggctacggcctgggcaaggcttccgaagtgcccgatgccatccgcaagggcatcgaagatgccaaaaagaacctcgtccgcatctccctggagggcacaaccatcccccacgaggtgctgggcaccttcggcgccggcaaggtgctgatgaagcccgccgctcccggtaccggcgtgatcgccggcggcgctgttcgtgccgttgtggaaatggccggcatcaaagacatccgtaccaagagcctgcggagcaacaacccgcagaatgtcgtggccgccactatggaaggcctgaagtcgctccgggatgcggaacaggtggctgctgcccgtggaatccccaccgagcagctggcgaaataaggaggggaatctgaatggataatctgaagatcactctcaaaaagagtctgtccggcagactgcagaagcatatcgccacagccaactccctgggcctcaagcgccccggggatgtgactgtgcagcccaataacgctcagacacagggaaagatcgccctcatcggctacctgctctctgtggagacctgcgaataggaggtgcgccccatgaaattgcatgaactctctccggcgcccggctccaaccaggagcccaagcgcaagggccggggcatcggcaccggcaacggcaagactgccggccggggtcataaaggccagtgggccagaagcggcggcggcgtgcgccccgggtttgaaggcggccagatgccgctggcccggcgtctgcctaagcgcggcttcaacaacaaggtgtttgccaagcattatgccgaagtgaatgtggcagccctcaacgcctttgaagacggcgagaccatctgcgtggtggccatgctggaaaagggcctgatcggcaaagcctgcgacggcgtgaaagtgctgggcaacggcgaactgaaaaagaagctgactgtcaaggccgccggcttcagcaaatccgccaaggagaagatcgaagcagccggaggcaaggcggaggtggtataagccatgatagaaaccattaaaaatgcgtggaagatccccgatctgcggcggaagctgctgtttgtggtctttgcgctggtgatctttcggtttggctatgccatttatgtgccttatgtagataccgaggccctggccgatgtgttcaaacagtacagcgacaccttgctgggctatttcaacactctgtccggcggcggcttttctcaagcctctatctttgccctgtcggtatatccctatatcaactcttccatcatcatgcagcttctgcaggtggccattccggccctggagcgcatggtgaaggacggcggtgaggaaggccggaaaaagctggcttccatcacccgttatgtgaccatcgccctgtctttgctcatgggctggacctattatattatgctgcgcaccagcggcgttctgacccgcaccgacctgtggagcgccatcgttatcatcctgaccttcacagccggttccagcttcatcatgtggctgggtgagcagatcaactccaaaggcgtgggcaacggcatttccctcatcctgttcgcttccatcgtttcccgcggtccttccgcggtgatgagcatcatcaacggtctgaagagcggcagcatgaatgtgatttcggtcatcgtcattttggtggtggccgtggccatgatcgcctttatcgtgttcatcacaaacgccgagcggcgcatccccatccagtatgccaagcggatggtgggccgcaagatgtacggcggtcagtccacccatctgcctatgaaggtgaatatgtccggcgtgatgcccgtcatctttgcttcttccatcgtcaccttcccgggcaccatcatccagttcctcaatccggaggaaggctccttctggagcaatttcggcaaggccttcagccagggcagcctggcctatatcatcgtctatgccttgctcatcgtgggctttgcttatttctatgccaccattcagttcaaccccatcgaggtcagcaacaacctcaagcgcaatggcggctttatccccggcttccgtccgggcaaacccaccactgatttcattgccaaagtgctgggtaagatcaccctcatgggcgctctgttcctgggcatcgtggccatcctgcctctgatcatgagtaacatcaagggtctgggcggtctggccatcggcggcacttcggtgctgatcctggtgggcgtcgcgctggaaactgtcaagcagatcgaagcgcagatgctcatgcgtcactacaagggcttccttgaataaaacgcgcccctttatgggacagtggaggctttgaaatgaaacttgtgattctcggggcgcctggcgccggaaaggggacccaggccggcctgctggcagaccggctgggaatccccaccatctccaccggcaatctgctccgcgctgccatgcagcagggaacagagttggggaaacaggtgaaagaggccatggatgccggcaaactggtatccgatgagctgatcatccagctggtgaaggagcgtctgggtcaggaggactgtaaaaacggttatctcctggacggcttcccccgcacgctggctcaggccaaggcactgagcggctttgcgaagattgacggtgcgctgtccatcgaggtcagcgattcggagatcgagcatcgcatggaaggccggcgcatttgttcccaatgccaggccacctaccatgtggaagacaatccgcccaaagtcgaagggatttgcgacaaatgcggcggtcagctggtcatccgcaaggatgatacccacgatgtggtggaaaaccggctgcacatctaccatgaggaaaccgaacccgtgaaggaatattaccgtcaggagggacttttgctggcggtacgtggacagaaaaagctggcggataccacgcagttggtgttcgacgcattggggatatccttatgatcaccatcaaatccaaacacgaactgaaaatcatgcaaaaggcgggacagatcagcaaggcggcactcctcgccgccggcgatctggtcgcgccgggtgttaccacccgccagctggacgaagcagcccgcagagtgatcgagaaggctggggccaaacccgcctttctgggttacggcggctttcccgccaccatctgctgctcgatcaacgatgaagtgatccatggcatcccgggtgaccgggtgatccaggagggcgacatcgtcagcatcgatacgggtgcgatctatgagggctattatggagacaacgccgctactttcggggcggggaagatctcggaagaagcccagaagctgatcgatgtaacacggcagagcttctatgaaggtatcaaatttgcccggaaagggcaaagaatctccgatatttcccatgccatcggcgcttactgcgaagcaagaggctatggcgtggtgcgggagtttgtgggccacggcatcggaacaaagatgcatgaggcaccggagatccccaactttggggcgccgggccacggtccgcggttgatgcccgggatgaccctggccattgagcccatgatcaacatgggcacatggaaggtgaaggtgctccccgacggctggacggtcaagacattggacggcagcctgtcggcccattacgagaacaccgttctcatcactgagggcgagccgatcatactgacttctgtgggagactgaaatggccccggatatggaaagatcggacattgtgctgtcgcagcagggccgggataaaggccggctgctgatggtgcttgatacagatgccgaatatctgctgctggccgatggccggcgccgcagagtcgaacgccccaagcgcaagaaaatacgccatgtgtcctttgtggccaaaagccgcagcgaagagggccggcggctgcgtcagggcgaaaaattgtcaaacagtgaagtccgcagggcgctgcgtcaagaagaggcgcccaccaatgcagaataaccgaggaggtaatttcgtttggcaaaagaagatatgatcgaagtggaaggtaccgttatagaggcgttgccaaatgctatgttccaggtggagctggccaacggacacaaggtgttggctcacatctcgggcaagctgaggatgaacttcatcaagatcctgccgggcgataaagtcaccctggagatgtccccctacgatctctcccggggcaggatcacatggcggttcaaataagggaagctttctcccatcatttgccgctgagacaggaggtatacagattatgaaagtgaaaccgtcggttaaacccatctgtgaaaagtgcaagatcatccgcagaaagggccgcgtcatggtcatctgcgagaaccccaaacacaaacagagacagggctgataaatacacaggaggtgctgaaataaatggctcgtattgccggtgttgaccttccccgcgaaaaaagagtggagatcggactgacttacatctttggaatcggccgctccctttccaatgaaatcctggagaagaccggtgtgaatcctgacaccagagtcaaggatctcaccgatgacgaagtggccaagctgcgtgacatcatcgagcacagctatcaggtcgaaggcgacctgcgccgcgaaaacgcaatgaacatcaaacggctggtggaaattggttcctatcgtggcgtccgccacagaaagggcctgcctgtgagagggcagcgcaccaagaccaatgccagaacacgcaaaggtcccaaaaagaccatcgccaacaagaagaagtaaggaggggcgagacgaatggctaaagcacaagctgcgaagaagggcgcgactaagaagcgccgcgaacgcaagaatatcgaaaagggtgcggcccatatccgcgcctctttcaacaacaccattgtgaccatcaccgacctgggcggcaacgccctgtcttgggcttcctccggcggcctgggcttccggggttccagaaagtccactccctttgctgctcagacagcagcagagaccgcagccaaggctgctatggagcacggtctgaagaccgttgaggtgtatgtgaagggccccggttccggccgtgaagccgccatccgtgccctgcaggccgctggtctggaagtcaccatgatcaaggatgtgactcccatcccccacaacggctgccgcccgcccaagagaagaagagtttaatcggaggtgttttgatcaatggcgagatatacagacgcaacctgccgcatttgccgcagagagggcgagaaactctttctgaagggcgacagatgttatagcgataaatgcgctctggcccgccgggcctatgcccccggccagcacggccagggccgtaaccggaagctgagcgagtatggcatgcagctgcgggagaagcagaaggccagaaagtactatggcatcctggaaggtcagttcgagggctatttcgagctggctaccaagaagcagggcatgaccggtgagaacctgctgaagatcctggaaagccgtctggacaatgtggtctatcgcgccggctttgctatgagccgtcccgaagcccgtcagctggtgaagcattcccatttcactgtcaatggcaagaaggtcaacattccttcctatctgctcaaggccggcgatgtggtcgccatccgtgagaagagcatgagcctggataagttcaaggctgtcattgaggccaatagctccaagcccgctctgaactggctgagcgttgaccgggccaagggtaccgctaccgttgtgaacctgcccaaccgggacgagatcgatctgcccgtgcaggaacacctgatcgtggaattgtactccaaataacccgaaccctcattgacaatcacacaggcaactttaacgataggagggtattctgatgatagcgattgaaaagccccgcattgagtgcgccgattctctggaggatggttcctacggcaaattcgtcgtggagcctctggagcgggggtatggcaccaccctcggcaactcgctccgccgtatattgctctcctcgctgcccggcacagccgtgaccaccatcaagatcgatggggtgcagcatgagttttccacgatcccgggcgtcaaagaagatgtgacagagatcgttttgaatgtgaaaggcattatcgccaagctgcacagcgaaggcgaaaagaccgtttacatcgaaagttccaacccggggctggtgacagccggcgacatccgctgcgacagcgatgtggagatcctcaacccggatcatcccatctgcacgctgatgcccgacgccaaattcaccatggagctgaccctcaatcacggccgcggctatgccctggccgagcgcaataagcccgcccagccggtgatcggcctgatcccggtggattccctctatactcccgtctataaggtcaattatgtggtggaaaacgcccgcgtaggcgatatgaccgactatgaccggctgacactggaagtatggactgaccggaccattgccgcccgggacgcggtttcgctggctgccaagatcctcacagaccatctgagcctgtttgtggatctctccgatgagatcggcagcaagacaacggtggtggaaaagagcgaaaccacccaggataaagtgctggagatgaccattgaagagctggatctgtcggttcgttccttcaactgtctcaagcgcgccggcatcaacaccgttgccgacctgatcaatacttcggaagaagatatgatgaaagtgcgcaacctgggccgcaagtccctggaagaggtcatcaaaaagctggatgatatgggcctgaagctcagctccggcgacaacaactgatcgacagcgccggcatcggggctcaaggccccgatgtcgggagaccgccccctccaaagccttggggctttggggcggagcatataaggaggtaaaattatgccaggaacccgcaaactcggcagacccaccgaccaccgcaaggcgatgctgcgcgccatggtcacctatctgctggagaacggaaagatcgagaccaccgtcactcgcgccaaagaggtgagacctctggccgaaaagatgatcacactgggcaagaagaacactctggctgccaagcgccaggcttttgcctttatcaccaaggaagccgtcgtcaagaagacctttgacgaaatcgctcccaaatatcaggaccgcaacggcggttatgtgcgcatcacccgtatcgggcccagaagaggcgacggcgcggagatggccattatcgagctgatctgattctttcgcagaaaagccaggaagggattgtcccgagcatgatgccatcgggacaatcccttattttatgttcccaaacaaaaaagacgctttctcttgaaagcgtcttttctttatcgccgggcgtctttgcgtacaaagggcggagaaaccttgggggaggtaagggcttggtatagattgggacggcggtaggcgttgccatgcacttcggtttcccggtattggcgcatctgatccaaggggaagggggccagataaatgccttcgccttctccggcctccaccaccagggtgtcccggccctctacctgaccgttttcccgctccaggtaggccatgccgtcaaaagcggtggaatggccgttgcagtccggatgccccatgggatagttgattgtggcgatgcccagcatattttcataggcccggccccgcagctgggaaatgcggttgatctccatggggcaggcattgggggtcagaatgatttctgcaccgcccagcatcagcagccgggcgctttcgggaaattcccggtcatagcagatcatgcatcccacttgcacggggcctttgggtgtttccagagtggtcacgggaaaagaatccccaggagtcagagcacattcttctccaaaatcgcaggtgtgtaccttggcgtaatccagcactctccggccctggaaatcaaagagggcaaaactgttgcggggaaggggagaaaactcctccaggtaggtgatgccgatggccatggaaagctccttggctaagctctggaaagcctggagaaaggagtggtctttggggatggctggtccatctccctggggaggaaactgatatccggtactccacatttcaggaaacagggctatatcggcccccatgctccgggccttccggcaggcagaaagtcccttttccaggttgccttccaatgtgccggtgggcagaagctgaagcagtgcaacgataagttccatgggcttttcctccttttttatattctgatggtatcatttttcttcctggagttcaatacactcttttccgtggaagaaaagaatggtatactgaacaaaaggagggagaaacaagatgaagatcgatttctctttgctctatgaaaaggcccgtcaggcggcgggacatcgggttttgaccccttataccgaagccggcagcgtgggggcagccatcctgaccaaaagtgggaagatctataccggtgtcaacattgatacggcctgctctatgggattttgtgccgagcatgcggcggcggccgccatggtgaccgctggagaatgtgagatcgccgctgtggcagcggtggacgacaaaggggatgtggtacctccctgcggaagatgccgtcagtttttggtacagctggggccggagaatgaaaaggcccaggtgctggtggaaaaagacaaagtgatgcttttggaagaactgctgccctacgattggcggaaagttcgtcccagagattaaaaaaacggagaacccttttgaagtgaccccaaaaagttagacaatatttctatcaaaaattgttcaagcagc

SEQ ID NO: 1639 - DNA, 18878 bp, Unknown
  16S sequences of unknown bacteria
cccggtcgctcattgttgcggcttcgccggtcgtcgcgcagacggcaacggcgctgatgcctgcctggatctggcgcgccagcagggtatcaaatagcttgtagttgatttgattttccgcaaaaggcgtaatcagcgcggtacaagttccttcaaatactggctgtttcatagtgctacacctccgtgttattctattgcccagttttgtgggcgtgcatactctttgataaatctgttgcaatttctgcttcctttctattataatagataaacgacaagaaatcaatgccgggaaatggcagcgcggctgcgctgcggattgccggtgaaaggagccagaccttttgaaaacaaaggatttttactatgatcttccgccggagctcatcgcccagacgccgctggcgcagcgggacgcctctcggatgctatacctggaccgccggaccggtgcgctgcagcaccggcactttacagacctttgcgattatctcgcccctggcgactgcctggtcatcaacaattcccgcgtcctgccagcccggctgctggggcaccgggagccctccggcggcgcagtcgaggttctgctgctgcaggataaaggcgacggcctttgggagtgcctgacaaagccgggccggaagacgaaggaggggacggccctctcctttggcgacggcgccttgacggcgacggtcgagcaggtcctggagggcggcaatcgactggttcgcttccattataccggaattttcctggagattttggagcacctgggcaagatgccgctgccgccctatatccgggaggagctggaggacggcgagcgataccagactgtgtactccaaaatcaacggctccgccgccgcgccgacggccgggctgcattttacccaggcgctgctggaaaagatcgcggcccagggcgtccgaatcgctccggtgacattgcatgtcggcctgggaacgttccgccccgtcaaggcggaggagattacggagcaccagatgcacgcggagttttgtatgctctcggcagagtcggcggagattttgaaccagacgcgcaagtctggcggccggattatctgtgtcgggacgacgtcctgccggacgctggaatccctggtcgagccggacggctccttccgggaaaaatccgcctggacggatattttcatctaccccggctaccagtttaaggccatgcaggggttgattacaaatttccacctgccggagagcacgctgattatgctcgtctccgccttcgcaggctacgaccatgtgatggcggcctaccgggaggccgtcgcccagcggtatcgctttttcagctttggtgatgccatgctgattttatagaaaatagtttccgcttcctgtgctgcggcgcgggaagcggatttttctacgaatgtcatactttggggggattgacaaaaaatgtaacatatggttaaataactataactgggaagctatatctatggcccgctaccatagataggagcaaattgggagcggtgccgacaaagccgaggggaggggtgtaattccgattatgcggcaaattatagaagcaatcagaacgcatcatagccccacagcgttgctttgtgggtgactaggtcaaaaaaggagaagtgtttatgaagaaaagactggtaagctggctgcttgccgtgtgcatggtcgtatccttgctgccgtcggttgtcctggccgataacagcgcatggacgacttggacaacggcagacagcacacatgttcaggtggagacgccggcgagctacaaagcgacgattaccgaagctgcggttcgcgcggtcggcttcacaggagaccttgcggatgttgatcatttttcgtactcaacgggcaattacctctgggatacaattgatgtaacgtcgggttcgacaatacacagcgacgtcctgtacatgcaatggctggataaagcaggagaaaagcatgatctgcaggatggcgcgaatttgatgccgtccctgaagaacatggggcacgctaccctggaagccgaggccgtttattcggcgacgcttccgtcggacgccgcagtctacagcgttatgctggacgactcgacggacatcgtgcagtacgctggcggcagcaaattgacctttgccaagcaggtgaaatttgcgccgatgggcgcgccgcaggaagatacctatgcggcagcctatgttgaccagaatggccgcgtcatcagcatggagcaggtcaaggtcggcgagcagcctgcaaacgcgccgacgcagacagcaaacggctctgccatcaccggctgggatccggcgctggatgccgtggaagcgacagcgggcagctatgttatctacacggcctagtatgcgacctaccgcttgagcctgaacgcgacgcacgcggtcatcacgggcgttgatgtcaaccgggcttacgaagcaggcgaaacggtcgactactatgcctatccggaagcgggctacgagcttgcgaatgcgggcaagaatacttacaccgtcgttgcaggagaaaacgccatcatagtgacggcgacggcgatccctgtcacgacgtacccggtttctgtccaggtcagcaacaacgcctatggtacggcttcggcggaggccacggcgtatgctgcggggcagacggtctatgtcagcgccaaggcaaaccagggctattatattgctggctatgctgtgaccagcgatgggcagaaggtgacctacacgcagacgtccgacggcatcagcttcacgatgcccgcggcgccggtcgaggtcctggtcctcttccgggccgatgcggtctacacggtcacgtatgatgtgccccacggcgcggcgatcgacgcagcccaggtcaagggcggcgaaagcatcaccctgccgacgccggatctggatgacggctacagctttgtcatctggaaggacggcaagggcggcttctaccaggccggcgacgaggcggtcatcaccgagaacacgaccttcaccgcactggtacgcaaaaatgaatacaccgtcaaatttgtcgcggacgaccggctggtcgatctgcagctggtcgaggcaggcgagcaggtcgctttcccgcagctgacgaaggacggctatgatctttcctggcgcattgccgactgcacctgcggcggcgatcacgatgtccaggatccgtacaccgtcaccgaagacatcaccttcgagctgcagcagacgccgcagaaggtgaagctcaataagattgtctatgtggacggcgtagaatacaacggcgatgtgtcggcagtctttggcagcggcgtgaatgtcatcgccgaggcagagacggggacgacggtttcgttccagctgacagccaagaccggctactatttcaaggccctcacggtgatggctggcgatacggccctcacggcaaatctgagtgacctcgaggagacggacggaggctatacttacacctatcaattcaccatgcctgcagaggagacgacgatctccctgtacttcgtcacggacatgaacaacaccagcatggtgaaattcatcgacagccagaccggtgctctgctggatctgcagctggtggcctacggcagcaccccggtgcagccggctgacccctttaaggcgggctatgaatttaccggctggtataatgaagctggtgagccctttgattttgcgaagaccgtggacacggctgtgaccctggtctatgcaaaatttgcggcagagaattacaccctgcagtttgacaccgcaggcggtacgccaagctatatcgcagcgatccagacccagtacggtgccctggagcagctgccggcagatgtccccacccgcgacggctacaccttcctgggctggaaggacaaggcgaccggctttgtctacgacgctggtgcaacgtatcatgtgacggcgtccgccgagtttgttgctgtctgggaaaaggacggccaggctattgtcaaattcgtggatccggacggcttcctgtatgactggacgtttgcagaaggcggctctgcgatcaccctgcctgcagagccgaccaaggccggattcaccttccggggctgggagcgcgaaaatggcgacgtctttggcgctggccagacggtcacggtcaatggtgcacccggcgaagtgattgtattcacggcgaaatggaaaggcgcagcctacaccctgcatattcagagccgcaatgcgtccggcaaactgacggcagacggtgcaacgtatgacatccccgatgacagcgttgcgagcatcgtggccggtgagccggtggagctgacggtcgatccggatgcggattatgttgtctccagtgtgtactataccacaaaggtcggcgctgttaccaataaggtgctgatcgaggccgatgagaacggcgtttaccgcttcacgatgcctggcgcagacgcttggctgcatatcgaaacgatgcggaacgtcttccggatcaataccgcaagcgacggtcatgcgactgttacggcggcatcgcagaatcccgccgaccggattggtacggcaactgctggcagcatggtcgtggtcaatgtgaaggccgacgacggctacgccattgattccgtcattgcaacctccgaaagcggctttgtctacctggtttatggtacgaccctggaggatggcacaaagcaatatgcgttccgcatgccgaattccgatgtctccatccgggccaatacggtcaaggctgcctacaccctgcagctgttggattatgacaaaaacctgatcttcagccaagctgtccaggcgggggacacggtggatctgaccacttatatcgcgcagatccagcgtgaaggttatacgttcaacggctgggaagtgctggaaggcatgaacaagggcacgatcctgtcgggcgcagcggcagatgccattgcagttacggcggacacggtcctggtcgccagcggaacggcggagaattgcacgctgcagtttgataccgcaggcggcgagcctacgtacatccccgcgatgacggtaccttatagcacggtcgcaacgctgccgaccactgagctgacccgcgagggttataccttcctgggctggcgcgacagcgaaacgggcattgtctatatggcaggcgcccagtacctggtcaaggggaacgcacagttcgtggcccgctgggaaaagaacgacgatgtaatcgtcaaattcgtcgatgaagacggccacatgtatgactggttcttcgtcgaggacggcggtctggtgaccgcacctgcagcgccggagaagacaggcttccgcttcctgggctgggaaaatgacgactatgccctgctggccgctggcggcaaggagcagatccacggcgcgcccggtgatgtggtcgtctttacggcgaaatgggccggcgcggactatctgctgcacattcagggccgcaacgcggacggcacgctgacggcggctgggaatacctatgagatccccgatgccgatgtcgcgacgatcgcagcaggcgagcagattagcctgacagtcacgccgcagaagaattacgccatgaccagcgtgtattacacgaccgtcatggacaatgtcacgacgaaggtcatcctggagccagacgcgaacggcgtctacaacttcaagatgccggctgccgaggcgtggctgcatatcgaatgcacgcagaacgtgttcaatgtcacgacaaagggtgacggcaacgagacggtaacggctgtctcccagaacccggaagacgccgccggtacggcgacggtgggcgagctggtcgatgtggccgttcggcccaacaagaattatgtgatcgatgcggtcactgcaaagtgcggcaacagcttcgtctacctgacgtacctcagcacggacgaagacggcacgatgcattattgcttcaccatgccggcaggcaatgtagtcgtgacggccagcgcggtcaaggcctcctacacgctgcaggttttggattataacaataatctgatcctcagccaggcagtcaaggctggagagactgtcgatctgacgacgtacattgcggcccttgcccgcaccggctacgacttcgaaggctggttcgtgatcgcaggcgagacgccggacgttctgctgaccggtgccagcagcgaatctatcacggtcaatgcgaatacgatcctcaaggcgtcctatcaggcgcagcgctacacggtcgcccgggcggacgattgcagcgagcacctggagaagctggtcgtctccgacccgcggacgcccagctctgtggacttctcgaccgaggataattacggcatgactgttgcctccgcgacggataacaccgtcagcatcagcgtcaagccggagtttgattacaccatcagcggcctggcgatccggggcacggattccgatacagtggtccagtcctatctcaagcgcttcaatgcgatgacgggcgtgtatgtctatgaattcaccatgcccgcagaaaatgtagaggtcgcggtctatacggagcccaagtcctttgatgtcagcgtcatcgagacgccgggcgagggtggcacctatacgatcaacggctacaccacgacgaatctgcccgtgaaacagggcgaagacgtggcgattgacgtccaggccgagcagggctggtatgtggagagctacagcgtctactacctcaacggcgcaggcgaaaaggtttacgtcctgggcgcggatggcgagcatctaatgaacatccagcccggcacgtccgaagcgaccatcgcattccgcatggtctcctaccatgtgaccgtggaagtgaactatgccaagacggcttataccgtcacgccggatacggccgctgccaatgggcagatcggcgtacgcctggcggatgaccccaatgagatcgtctacggcacagtccttgatgcgacggtcggcgatgaggtcgagatcggcctcctgccggatgccggttacgaggtcctgcgggataccctccaggtcctggacgagagcggttctcccatcgcggcccgctttgtccggcgcgacggcgacacctattactaccgcttcaccatgccgtcctccaatgtgacggtcagctgtgaatttggtcagaagacctaccgcgtcattgcagaccagcgctacactggcggccaggtctgggtcggcgataccaacagcaatgtggccacctttgcgaaggacaccacggcgacggtcacgcttgttccggaagatggctaccgcgtgacgcagatcagcacgcaggtcaccgtcggcggcgttgcgcgcgatgtgatcgcggacaacttcatcctctgcgatgcagacgggaacgaagtttacaacgctgtggaagcagcaaaggaagcaaagcgccaggagatcctcgaacccgagggcggctatgtgcctctgtacacgccgatcctggaggcgactgccgttgatacggacgaaggccgcgtttacagcttcctgatgccggattacgatgtctatgtgacgacgtcctttgaaaaggtcgacctcggcgttgacgtcgagatgaccaacaccgccaacaccgggaagggcaccgtctacaccggcatcaaggcttctgccaatgccaccagcgataagaacatcacgacccatgtcaacgataatgtctatgtgcgcgttgcaccggaatacggctatgtcctgaaggatctggtcgcggtctataccgatgccgagggcgacgaagtcgagctcccgctgacgatggtcagccagaagtacgacaagcacgatatctactggacgagctatgttgcccggttcacgatgccggccagcagcgtgacggtccgcgccacctttgtggaggactactacgccgtcgtcttccaggattgggacaacacccagctccaggtccagaatgtggactacaaggccaccccgaacctgagcgcccagttcccggcagtgacgggccgtcccggctatcacttcgtgggctggtccagtgctgatgttgagacgcctgtgacggctccttccgttgacccggcagactttgtcatcgtcaaggatacggtcattcgggccgtctatgagaaggatagctacagcatccactacaacgcaggcccccacggcagctttgctgacggcaagacggagcaggcggaatacctggatgtgtgcagcttcacggcagtcccggagaccggctacatggtcgatactgtttccgcgacctatgtcaacgaggcaggcgagacgatcgcaattgagctgatccccggcgcgaagaccgtcaaggatcacgcaggcacaacggcggaagcttactccttccggatgccggcctgcaccgatgacgcgggcgtgacggtcagcgcgaccttcaagcctatgacctatgatgtcaccagccagtataataaggcccagggtgcgctgcgcctgaacggcgaagacgtcgacacgatggcggcgaattacaccgacacgatcagcgtcaatgtcactccggccacgggctacatgctgacgcagctgtactacacctacaccgacccgctgtccggcgattccaagcaggtgaacctgctgacaaacggcagccagaaggaaagctgcgactacaccttcaccatgccggcgtccgatacggttgtgcatgcagtgtttgcccagatcacgtacaaggtgatcaacgataccaccgatcccaacggtgtggtgaccatcgcgaagacggatgttgcgtatctggacaccgcgacctttaatgtcaagcccaacgaaggctaccgcattgatactgtcacggcttactatgtcgacgagctcggcaaggaccagaccatcaccttcacggatgtacagcccaatgcgaccaccggcggtgtggactacagcttcgtcatgccggccagcgatgtgcatatcgttgcgacgtttgccaagctgacctacctcgccagcgtcaatctgaccggcgaagcgacggtacagctggacggcaattacacggatgcgctttactacgactttgccgataccgtcacgattacgatcaccccggcttccggctgggagatctcgtctgtcgtggctgacggcaagacgctgacggccaatgccgacggcaactacaccttcacgatgccggcccatgatgtcaccatcgacatcacggtcatcaagaccggctacactgtgaccggtgtcgtcacaggtgaggcagcgggcggcacggtcaagcccagcgtttcgctggccaatgtcggcgatgtcgtctccgcggaagtcacggcagcctacgggtatgatctcgtgaatgtcgtcgtccgcggcgagagcggcaaggtctacaatgtggaccgcgtctccggcaacttctacttcttcaccatgccggccgaaaatgtcacggtcacggcagaatttgcaagacacctcttcaccgtgaccttccgcgattacgacggcaagacgctgaaggtcgaggaagtcccctacgaaggcgctgccaccgctccggcgaccccggcccgcgaaggctacacgttcctgcgttgggacaccgcatttgattgcgtcacccaggacctgacggtcacggcgatctacgtgatcaattcccacggcttccagacccacggcatctccttcaccggcgtggaccacggcaccgtcaccatcgccaacggggatacggcgaactatggcgataatgtcctggtgaaggtcgacccggacgacggctggcgtgtggagcacgtcgctgttgtgacgaaggccgggcagtcggtcagtgtcacccggctctccaacgaggcggactatgagcaggcgtacaccttcgtgatgcctgatgacgatgttatcgtcacggtgacctacacgatgcattccccgtctcagtttaccgacgtcagaacggatgcttggtacttcgaagctatcaacttcgtgacggatcgcagctacttcgtcggtgtctccgatacgctgtttgggccggagattcagatgacgcgtgccatgttcgtcacggttctgggccgcgtggccgggatcgatgccggcaagtacacgggcaagagcgaatttacggatgtggctgagaaccagtactatgcaccgtatgtcaagtgggcagcggaaaatgatatcgtcgccggttatccggagggcgtgttcaagccggatgagaatatcacccgggaacagatggctgcgatgatgcgccgcttctgccgctacagcggcatgaacgtctcggtcagcaatgccaactggatggcccgctatgccgatgtatacgccatcagcgattgggcttatgaggatgtctgctgggcagtgggctgcggcctaatgcgtggcaagtccgacagcacgatcaacccgctggagctggcaacgagagcggaagttgcccaggttatcaagaacctttgcgacaagctgatctaccaataagccaatcaaaaacggaaaagcgcccggcgttctcgccgggccgcttcaaagcctgcctccgcaggcgctgaggcagaaacgaaccgggctgacgtgtcagcccggttttttctggtgattgcgggtgtgctcccagcgtccggagggggcaaacgcaaaaaatcgtgccggggatcaaaccggcacgatttttttgttgcttatcggttgggcgggtgtgttgttcctatcatgcagctggctgcaggcgctcgtgcttttttcagcagaaaaaaccgtagagatcgttcagaaagaagaacgcaaaatacaggaccatggggagatagcgcgggtcctgcagggctcccaggctctataggacgatgcgcacaagatcacgtaccccagggcgtagcaggaagagcgcagcatcatgaatgccgtggccagaaagctagtggtgacggagacggtgctgaacaggagatttggtgtatccagcgctcgcaggacgaaatagaatgcgcctgttactggcaggctggcgccagataccccagcatctgcaagctacgcagatgccggatgacggctatgtttgcttcagcgtgccggcaccaggtcacggcggaccacaccgccatgggcagcgatataccaagatagaggatcatctcgccccaattgtgaaaccgctgagagattccgccataaagagggctgaacacgatcctcagcagctgcgccagccctgcaccttcgcggcaaagtgcagggctgtgataccgacccaggcggctgccagcgtgcgtggatctgggcggcctgctgcaagatttgcgccggtcaccaggaaaagtgacgagccccacgcgttgcgcgcccgccgggtcaaaacccacagcaggtgcaaagggcgattccgatgattcagttgcagtatcccttctttgatacagaaaatgcgaaagcttcgttgtaagaaagaagctgctccgggtctaggatcggaatgcggcggttttgaaatgacattggcgcctctgaggccggtgcagcagcttggtagaagtgtaaaaaaatggggcggattgtcaatccaaagtgcaggaaaatccccactgcgctgggtggcgcagcggggaagggggggtgtgatacgggtgggataggctggtgcggtgcttagaggacctcgttggaacgggctctttcgaactcgtccatcacgtcctgcgccggggccttggtgcagaggctaacgatgacgatgaccagcaatccgaccaggaacgcgggcagaagctcgtatacaccgaacacaccgcccaggggcttgaccaggtatttccagataaagaccattgcgccgcctgcgaccatgccagcaatcgcgccggggagcgtcgtgcgcttccagaacagggagcagatgaccagcggaccaaagccagcgccgaagccggcccaggcaaaggagacgatgccgaacacggagctgtccggattccgggcgatgatgacgcccagaatggcgatgatgaccacggtgatccgggcggccagcatgctctttttctctgagatgttcagatgcagcgtctcccgcagcaggttttctgatacgctggaggacgcggcaagcagctgggagtccgccgtggacatggtgctggccagaatgccggagagaacgagaccggccatcagcgcgggcaggatgccgtgcttggagagaagatcggcgactttgacgatgatggtctccgtgttgttgccggagagctgtgcgatcgcaccggtgttgctgagctccttgccgacgatgccgatgcagacggcgatgcccatggcgatggtgacccagatggaggcgacgcggcgggagagcttcaaattcttctcgtcgtcgatggccataaaccgcagcaggatgtggggcatgccaaaatagcccaggccccaggagacggtcgtgataatatgcagcaggttataggactggctgctgccggagtctgccacataggtggaggtcaggctgaggtagccgggcagcgccttggcgttttccatgacggcgtccacgccaccggcggagaccgtcgcaaaaaccagcacgaacagcagcgcgaccgtcatgatgatgctctggatgaagtccgtcatcgaagcggccaggaagccgcctgctgcggtgtaggcgacgataacgatcgcggagatgatcatcgtcgtcatataatttgcgccgaatagggcgtggaacagcttgccgcaggcggcaaagccggaggccgtgtaaggaatgaagaagatgataatgataatcgcggcgatggccgagaggatgctcttttcatcccggtagcggcgggagaagaactggggcagggtgaaggagccggtgatgtgggtatagcggcgcagccgctttgccgtgaagagccagttgagatacgtaccgacggcaaggccgatggccgtccagccgacgtcggccaggccggagagataggccaggccaggcaggcccatcagcagatagctggacatatccgaggcctcggcgctcatggccgtcaccagcgggcccagcttccggccgccgagatagaaatcggaggaggattcgttcttcttggcatagtggaagccgatgagcagcatcccgaccaagtagacgaagatcgtgatcataatacagatggttgcgcttgacataatttctttctcctatccgagggctgcgccggatacacggcgtttgccctcccaaattcgccgcgcaggagccaattgcgcggcccacgcatggcggcgagccccggcgaaaaagcgcggcccagccccttgcgttctattggaaagtattgtatcatagagtaaagcatttgaaaaacgaatatttatcataatgaacagcacaaaacgtaatgaaaacgatggggaagcagggggtggcacgatgcagccgttaaaatatctggcatttctcaaaaccgtggagtacggcagctttacgcgggcggcggagcggctgaattactcccagtctggcgtcagccggatgatcagcgacctggaacgggagtggaacctgaccctgctggagcgcaaccggtccggcgtcaagctgaccagtgacggctcccagctgctgccctttgtcaagaacctgtgccagagctacgaggagctgcagacccaggtggacagccttcacggtgttcaatccggcatcatccgcatcgggacgatctccagcatcgccacccactggctgccgaatatcatccgggcctttcagaaggactatcccggcatcgactatgagctgctgctgggcgattatacggagatcgaggagtggatcaaggagggccgggtcgattgcggctttgtgcgcctgccgacctgcccgacctttgagatcatccccctggagcaggaccggctgctggcgacgctgccggtggatcacccgctggccaagctggagaaggtccccatcgccgcgctgtgccaggagccgtttatgctgctggaaaagggcgcaaaggcggagatctccgaggtctttgagcgcaatgggctgacgccccgggtccatttcacgacctgggacgattacgccgtcatggcgctggtggagggggggcttggcatcagcatgctgccggagctgatccttaagcatacgccgtaccagatcgtcgccaaggagctggatgttccggcataccggcagatcgtcctggcgctgcgggataaaaaaaccgcctcgatggcggtcaagcgttttttggagtatctggattatcgcaatgcgtaacgccgctgggcggcgtgcaaaaagaggagggagcccacatggatgaggcgcaggcccggcgcgaccggccgatccggcaggcggtgctgaggcagatcgtcccggcgattttcagccagatggtcgtgctgatctataatctggccgatacctattttgttggcctgctcaacgcgccggaccagacagcggcggtggcggtatccatgccggcatttttgatgctgacggcaatttccaatctctttgccatcggcggcgccagccaggtggcccggcagctgggcaagcgtgcgccggaggcggccagcgccgtctcggcgatcgccttctggtttggcctgggcagcgccgtgctgttctccggcttcttttggtgcgccgcgtcgccaattttgcaattgtgcggcgcgacggcggcaacctgcgccccggcgctggcttatgccaagtgggttatcgcggcgggcggcgtggggacggtcctgaatattctgctcgccaatctggtccgggcggaggggcggtctttgatcgcggcgttcggcgtctgcttgggcggctgtgttaatgtggtgctggatccgctgctgatcctgccccgctttgccgggctcggcgcggcaggggctgggcttgctacggcagtgtccaacacgctggcagcgttgttcttcctcgtctggctgatttttggtaagcggcgcacggtcctgcggctcagtccacggtatctgcaccagacgcggcagtaccttgccgatattgtgaggatcggcattccagcgtcggtccagtatgcgctgacggtcgtctctgtggcggcgctttcaaaatttgtctccggctatgggacggcggcggtcgccgccctggggatcgtcaaaaagctggatcaattgcccctgtatttttccatcggggctagcaatgggctgctgccgctgctggcatatcatcacgccgccgggaatacggcgcgccgccgggcggccttccggtttgggacggcgctgactgtcagcttttccctgctgtgcctggtggcctatgaatgctttgccccccagctggcggggctgtttatccaggatagcgagacgatcgcctacggtgcaaaatttctgcgactgatggtcgtggcgatgccgctgatgtcggtctgctatccgcttatcgtgcagttccaggccatgggctgcgctcggcagtcgctgatctgctccgtgctgcgcaagggtgtgctggatatcccgttgctgtttttgctggatcggctgctgctgctttacggctgtatgctggtccagccgatcgtggatgcggtctcgctggcggtcgggttgtatttttatcaaaagctgccgcgggaggctgtgcaaatagaagaaacagcgcggagcagcgcgggagagtgagcgccggttataccggcgcctccggcgtcagcggtttcgtgacgccggtgcggcgggacgggtccagcccgccgcccaaggctgcgccgcctagggctgaggcccgcagaatgacctgctcgccgtagcgctggcgcagcgtatccatgacctggtccatggcgcactgcttcggtgcggcaggggagaagagatcgtattgcagaaaagccgcgtcctcgatcgcactgacctggacgccgagctgccgcagcggggtgcgccggtcccacatctggcgcaggagctggcaggcggcgtcgtacagggcggcggtccgatttgttgcgctgggcagctgccgctggtggatggcgttttcaaactgacaggtcctggtccgtaccgcgacacaggcggcggccttcccatcgtgccgcagccgggtgccgacggtctcgcacaggcggagcaggacacgttcggcctggggaaagtccgtcacatcggcaggcagggtcgtggagttgccatagcccttgttttccggctgttccggcagcagcgcgtcgtcgcagcggccattggcgtagtgccaaaggcgcaggccgggcttgtgcagatagcgctgcagcagcgacgggtcgctcttggccagcgcgccgatggtgcggatgccgaggcggtgcagcttttcctccgtcgcctggccgacgagaaacagctcccgtaccggcaggggccagagcttttccgggatctcctccgggaatagcgtgtggacccggtccggcttttcaaaatccccggcgatcttggccagcagcttgttgctggagatgccgatgttgacggtaaagcccagctgctcccgaatctgctgctttatcgtccgggctgccaggaccgggctgccgtagagccgctctgtcccggtcatgtccgcccaggcttcatcaatggaatactgctccaccagcggcgtgaaggaccggagcagcgcgataaaccgccgggacgcctgggtatagagggcgtagtccggcggcgccgtgaccagctgggggcattttttgacggcctggaagatcggctcgcccgtcttgatgcccatccgcttggcgggcaggctcttggccaggatgatcccgtgccggtttgccttctccccggcgatggccgctgggatatcccgcaggtcctgctgctcgcccagcacctggcagcggtacgccgccgtccaggagagaaacgcggcattgacatcaatatgaaaaataatacgcattgccagtctcctcaatatagaacccgggtgacgatccactggagcgatcggacggtatagcgcaactcgatcagatgcaccttgccctccagctgcacctggcagccgtagaccagggcgtcgatccccaggtattgggtgcttttttcgtagagaatgtcggtcaccggcagcacatgcagctggtgctgggcatcttcaaagcggaaccgcagcggccgaatccggcgcggcggggtgcagacacagagaacttcaatttgctgctgctcttgcggcatgacggtgcttcctttctgtaacaaacttttgttttatcataccagaaaaaacgcccaaatacaagaacaaatttttggaaaataaaatactttacaaaagtccgagaaggagggatgccccatgctgcgctatcgctgcctggtgctggatcatgatgataccgtcgtccgcagtgcggagacggtcaactatccgcaatttttgcagctgctgacggccctgcgcccagggcggcggctgacactggaggcgtatctaacgggcagcatcgacccggggtttcacgccatgtgccgccaatggttcggctttacgccggaagaaatggactggatgttccgcgcgtggcagcagtatgtgcagacccatatcccgccggcctatgacggcattgcccgggtcctgcggcggcagcgggcgctgggcgggctgctgtgcgtttcgtcccactcgtcgcctgcgaatatcacccgggattggcagcagcatttcggcatgacgccggatgagatctttggctgggagctcgggccggagaaacgaaagcccagcccctatgcgctgcagcagatcatgcggcattaccggctggagccgcagcagcttgtcatgatcgacgatctaaagccgggctatgagatggccaagcgctgcggcgtcgattttatcgcagcgggctggtcccaccgctttccggagatccggcaaatcatgcaggaaaactgcgaccattacatgcaaacggtagagaatttagaaaaattcctcttttcatagccgtcggattgtggtatactaaagtatgccgaacccctggacagtgcatcgcggggcaaaccaccggcgaagcgaggtgccgcatttggaaaataaccgcatcaaggtcgtggccaagaaccgggaggcgtatcacgcctattttgtgatcgaggaattcgaagcgggcatcagcttggccgggacggaagtaaaatccatccgccaggggactttgagcctcaaggatgcctggtgcggcgtcaaggacggcgagctctggatccggcagatgcatatcagtccctatgaaaagggcaatatcttcaataaggaccctctgcggccgcgaaagctgctgatgcataagcggcagatccagtatttgttctccaaggtcaagcaggatggctatgcgatcatcccgctgcaggtttatttcagcaacgcacgggtcaagctgaaaattgcgctgtgcaagggtaaaaaattgtacgataagcgcgatgatatggcgaagaaggacgcaaagcgccagatcgaacgcgcgatgaaagaaaggaatcattaacatggcgaatcctatcgtaaagatcgaaatggaaaacggcggcgtcatcactgcagagctctacccggagacagcgccccagtcctgctataattttatggacctggccgcccatggcttttatgacggcctgatcttccaccgggtcatcccggatttcatgatccagggcggctgcccggacggcaccggcatgggcggtcccggctactgcatcaagggcgaattcctgt

SEQ ID NO: 1640 - DNA, 25542 bp, Unknown
  16S sequences of unknown bacteria
tctatttccttcgcaaaaccaataagacatccgtcacgtctgaataagccatatctgtgaggatagggttcctttccagacacctaaacccattgcctaatgattatcgtctgctatgctccaacccggtagggcaggcagcaaaaaagcccagaggtataaagacctctgggctttggttttcttaggatgttactggccggcgctaaccgtgaaacacctattcgtcattgtgcttcggatatctctgtaaaattctatttgctatatcaaataggctgtggtatactgtatatagcaaatagtaccggagggattaccatggagacatcctacgagcctctatatcaaaaaatttataacgatatccgggaaaaaattaaaagcggcgcattgcctttgggcacgaaagtccccacggaattcgaattgatggagcagtattccgtgagccgtatcaccacggcccgcgccttgaaagagctggctaacgacgggtacatacaacgcacgagaaaaaacggctctaccgtaatcgccaccgacggggaatcgccggctcctccggaagagcgcccccgggaggcagtggccccctcggcggtctatgaacacattccgcttttgatgcctttttccgcctcgcaatttgacatactcagcagtattcagcgggaagcgcagaacagccattacctcatcactctgttcaattcggaaaagcggctggacagggaaagagaaattctcgatcaaatttcccgcatgaacatcggcgggcttatctgcctgcccattgagagttaccagaacctgtcgctgtacaccaagctgcaggcacagaagatccccattgtgtttatggaccggcagctgccctatattgatatcccctatgtcagcacaaacaactacgacgccatgtacaatctgactcagtggctgatcaatcaagggcataagcgtatcgccttttactgccacgatctcaacacgcacaacgagttgttacgtttcaaaggctatatcgccgctctgacggataatgggattcagctcaacagccagtatgtcgcggaactgaagaaaaacgacgtggaggatatcatgctgcgggaaaataacccggacgctgcccaccgcgtcaatcaatatctgaaagatatcatggccctggaagcgccgcccaccgcgcttatctgcgcgttcgacctgttggcttcctatgtggagcagcaggccaatctgctgaagatttccattcccgacgatttatcgctgaccggctttgataacagctccttgtgcagccatctggagatccctctgaccagtgtggcccagaactatgaagccattggcaaaaaagtcatcgaactgatgaacgccctgcgcagcggacagccggtccaatcggaatacctgatgagttcctctattgtagagcgggcctccgtacgaaaattgtcccaataaagtcaagagcactcgtgaaacgggtgtccagcccgtctcttaatctagtgttgtatgaggccgcggctggatcggtacgcttacatccacgcttaacatccgattttatacactcatcctgtaagcattcgtacagcgagtctggaagcgcaggctccagtacgcacgaaacattgttccccattattcaaaattctccctgcgtgataagctttctttgtctatctgggcatgacctcctttggtttctggtgcggtggcgttacccgcttccattttaccaaaggaggtctttctttttctaatcgatgctttcgctttttcttaccccaccggccatgccggtggttgtcgctctaagtcaagaccacgcccaaaggacgtggcatggatgatggccctaaaagggcataataccagcagcgcctaaaggcgcgtcatgagtaacgccaaccgcaccttagcgttactctagtcttctaaatccttgaatggatcttcgtattccttgaagctgagctgatccatcatctgatcttctgtctcctggtttcggatatacttctcaatggcggctttgttgcctccaacggtactcacgtaatacccttttgcccagaagcatctcctgccgtatttgtacttcatgtttgcatgccgctcaaatatcatcaaggtacttttcccttttaagtatcccatgaagtctcctacgctcagcttcggtgggatcgacagcagcatgtgtatatgatccggcatcgcatgcgcttctatgatttctacatgcttgtactcacatagctttctcaatatcactcctatatccttcctcaattttccatagattactttcctccgatacttcggtacgatcacgatgtgatattgacatttccatttcgtgtgtgataagctttgttcgtccattcggacatgacctcctttggttcttggtgcggtggcgttacccgttcccattttaccaaaggaggtcttttttaccctaatcaacgctattgctttttctccctccaccggctttgccggtggttgccttgctaaaaaaaccggcgtggtgtacaccacgccggtcattcccgaaaatttaatatgcttcctttacgcgcctctgtttaatcacaaggggttctttctcgcccggcgcttttattcccagtctggctccggatagcggaagtgggtgggctcccagtagggacggtatactttcagattggcgaattggatcctagaggcataggtgcccaggccaaaccggccgcagtcgtccagaagctccggcgcgggatccttgagttctaccaccagacgaccgtctgcaaaaataaatgcatgattttccacgctgcccgccgcgatgtggatgagccttccggcctccagcggacagagccccgtcgccacaaaaggaatacaagagggatatttctcaatgccggcccggttgagccaccagccacccagaccgccgataaagccttttcccgcgtcattccgggcataatcccaaccgctggctttccaaacaaaattcagatcgttgtcacagggcggtactgccatcgcgtcgaattccaatactatgtcgccgggataactctggcgggagtagaggatgccaccaccgttttttcggatttgtcccgtgagccagccgtcgttgctcgcttcccattcgccgctggccacctcgaaatcctccagcgtgtgggaatcgatgggacgatcgtacagcatcaggctcttctcggggaaaatccgcttgcctgtgagaaacaggccagtttcattctcaacatgaatatgcgccatggcttcccttcacctccaaaaactcatccagtcgtgcgtttgatacaggattccagcacgcttttcatagaggcgaccgcctcggccggctttttcttgtccacgacgatggtgttccagaattttgcacggtatccagtatcccaccagccggaaagcgcctccatgtatgacatgagcggcaccgcttttttccggtattcctgatagattttcaaatccgcatccgtaatgcattgccggcgctgcattacgtcgtaatcgttggtgctggtaaaaaagcgattgttgtcaaacttagccagctcataggcatacgctacgccgcccagcgggttcttggcattacgcggaataaaggtgccaccgctggattttgggaaataatacttgccgtcgttggccatgggcataggtgcaatgccgatgtcatcctccatattgttgaaataatcgtaggcgcccacggcgttccagggctgctccaggtgcatggcaatcattcggcggccgaaaccagagtaagaatcgccagtgtagaaagcacctgcgctgaccagatcgtacagcagctgcaatccccccatttcagcgggctgatcgatggtggctttctggccgcccttaccgtcctccacgagacccttgccgccgttggcgtacataagcagcgcgtagtcccaggtgccgacaccataggttttcaccgttttgccgtcctctcgataaagggtcatctttttagcggtttccagaaaagtcttgtagttccagttgccttccagatacagctcagtggggtttttcaccttctgttccttgaacagggttttgttaaacacgcacatatatcccttgatgccccaggtgccaggaatgccgtaaatcttgccgttcaacgtggtgtcgctgagatcgacgtcccgatacagcggatcatccttagccagatacttatccatgggctgggccacattggcgtatatatagcgcaagaacgtcacctcgctgtagccgtaggcgtcgggcggattgcccgccgctaccatctggcctatctggttctggccgtccacgccggatttcatcacaacaaagtttaatttaaccccgtattttttttggaaaagggtacggaaagtcttggtgttctcgttatcggtttcgacattagacgaggacgtgccgatgttgacggttttgcccttgagcgaggcaaattttttctcctggggagacgtcagctcataggaagacggtagcgtttccttgctccccgtgtaggtggtggtctttttcgtggttttggcagcagtcccagctccgtctttcgtaggctgaggcttgagcacgttgccctcggccgtggtgtcagtagagccactggcatcgttctgggaaactgcggtggtcgtgctgtcccctgacgataccgtgtcggttgccgcgctgcttgcatccgatgccggagactccttccctccgcaggatgccaagctcacagtcagcagcgccgccagcaacgccgataccaagcgtacggtgattttcatatcggaattcctcctttatattgtgaatgtccacaaaatgtgatagccgttttctatctccaagcagttggccagccgcgccgtctggcccagtgtattgcccagccggaaagccaaacggtaccttcccgcctcgtccggcaggcgcagcctcgcgcgcgccgtgtgaaccaaaggacggctgtcggcatagtcttccggagaacggctgtaccatgatgcaggctctccgcaagactcctctgatacgggacagcccgtgtcatccagcagggcgagggtagcggacaggttaaacgccgcggcaaacccgtgattcaccagcggcatctccacctccaccgcccctcccggacagagggccccccgcacgtccacgctctgtgcttccagccggtagcccaggtagtcccggacaaattcaaacaccgtgcgtcgcgcgggacgcccctccctgtcctggaaccaggccggcgcgtaaagcacgccgttttcatccagccagtccttggaaattttctcctccatccaacggcccatcacggactttcctgcgtcgccgttcacaatgcaggcatcgaaataggagtggagaatagacagggtggaaaaccggtgctccgaaagctggcgcaatgcgtcggcggcgtgcaccgtcatccccggattctgttcaaaccagaaatgccagtacagctcgccatcctggggcgcgtaggccgcctcccgcatcagctgatcccactgctccgttccggcatccagccctcccgtgccatacccgcggtcaggaattttaccgaaaaaggaatcgttttcgatgccgatgcttcgataatacggcgtatctgccaacaaatttttatagcggggcaaccgcatctgggcgtacagcccattgggcacaaccagcttttccatcacggcgcgggcgatgagacccctgtccatgtcgtaataagcgccgtgccactcgccccacgcaccgatgaaacacatctggaacgcgttgatggcatgcttccatttggcgatgactggggcgagttggtcgatatgccgcagaataattgcctgcggcgcgtcgttcagggcgtcgggcatggcgtgggaatagatgaagcgcggctgtactttcattccccgggaaaccagcgcgtcgaaataggcttcgatggctcgtaatccgccctccggaatatcccggtcgcagaatccgctgagatacatgtaggcctgcgccacagttacggggatgtcatggggccgcattttatcgctttcccagccgatttcccgtctggcgtcggcataaggaacgccggattctccccggatatccacctccacccccatgcggaagccgcggtcggggttctgaagtaggagcatatcttccccggccgccagaggtggcagctgtctgttcatgggcatttcctcccgtttgtcaaatcgtcagctcacacaacacgtgacagccgttttccacctccagccgattgcacaggcgcgcggactgacccagactgtttttcacataaaaggccagccggtaggcgccgccggacgggagcgtaagatccgtctccagcgtgtgggtcagttgggcgccgtcgaagtagttatccgggttgcggttataccaagtttcgggatttccgcaagggacgtccaccacggcacggccctctctgtccagcaggacaaagccgctttccatttgaaaggccgcagcgaaaccatagttgaccagggacagcttcacatgcagcacgccgcccggctggagatcaccgtctgtctccagcccggtcagtgccagccggtagcccaggtgatcccgcacaaaatcgaagatattgcgggaaacgctcccgccccggctgtcccggaaccagtggggatcgtacagaataccggtttcccggagccactcctcggtcatcggctgccgtttccagcgggccatcatggtgttttcatcgtcccggcgctccagataggaatgcaaaaaactcagggtggaaaaccggtgctctgaaagctgctccaccgcttttttcccatccacgacgacctggggattctcatcgaaccaatactgccagaaaagctcgccttcctggggcgtataggcggcctccttcaccagctgggcccactgctcgctcccctcgtcgagtccgccggtaccgctgacgggcgcaccgccgtaacccgcaggaatctttccgaaaaaggcatcgttctcgatgccgatgcgctggtatccgggcgttcctcgcaggatgtttttataggcgggcaggcgcatctgggcgtacagcccgttggggagcaccagtttctccatcacggcttccccgattacgcgcttatccaggggatagtactcgctgtgccactcgccccacgcgccgatgaagcacatctgaaatgcgttgataccgtctcggcaggccgccaccaccggggccaactggtcgatatggtggagaatgacgtcctggggagcatcgtggacgggatcaggcatgtcgtgggaatagatgaatcgcggctggcccttgacaccccgctgtatttgggcgtcgtaaaaggccgtaatggcctccagtcccttatcatcgatgggcccctggttatacccgctgatatacaggtagttctgggctacggttgtgctgtcccgggcgtcgggcatcttttcgtcgatatgccggcccgcagcctccttcatggccgcgtagtcgccggcttccgacagagtcttgacatccagggaggtgccggtgcgataccctctgtccgggttcttctggagcagggcgtcatcctccgccgtcaaaaaagggaattctttcttcatggttacggtggctctcctttcatacggttgttccactatacgatgagaaagatttgcgggacattttctgtcctgccatggtcctcgtcgtcgacgggcgccagcccgcgcttctcctcgtccttgcagaacaaaaaataacctcgcaaatctttcctaccctttaacggaagaacagtatcaaatatcgaatgtatggagtatgtggtagccgttcaccatgtcggtctgcacgcttacgcgggcgaactggccgaggctgtttttcaaataaaaggctagcttgtactgcccgtgagctgcaggcagcttcatattcgccttcagggtatgggtcagctggcgggcatcgccgtaatagttgtccgggttgcggctgtaccatttttccggcgagccgctcttgacggacgacaccaccttattgttcttgtccagaatggcgaagccgctttccaggttaaaggcagcggaaaaaccgtaattgcacagcggcatctcgacctggatcgtggcggagggccgactgttcccggtcaccttgatgcttttgggggctatgcggtaacccacgtgatcgcggatgaattcgaacacgttacgggaaacagcctttccatttttatccttgaaccagttgggatcatacagaatgccgttttttttcagccagtcctgggtaatggcgtcctttttccagcgccccatggcggaagcgttggaagaccccatatccaaataggagtgatgaatggatagagtggtaaagcgatgctcagaaagctgctggatgaccttgaagccgtttaccgtcacattgttttcagtcagccaactgttccaatagagctctccctcctgcggggtgtaggcggcctctttcaccagctgcgcccattgatcggttccctcgtcgaggccgccagttccatagcccatatcggggatttttccgaatatggagtcgttttccaccccgatgcgatcgtacaccttcgttcccttgagaagattcttgtattcgggcaagcggatgaggccatacagcccgttggggataaccagcttttccatcactgcagtggcgatgacctttttgtcgtggggataatagtcaccgtgccattcgccccacgcaccaatgaaacagatggaaaacgcctggatgccatccttcacttttttgataacgggggcaacttgatcgatatggcgcagagtgatctcctgggtggcatcctcaccagccacgttgtcggtgttgcggatatagcagaaacgtggctgccccttgatgcccatctccatttgtacctcataaaacgtctggatggcctccagccccttggctgtgatatcccggtcgttgaagccagtgagatagaaatagttctgcatcaccatggtggtatccagcggattcatgtccgactggcccatggcgctttgaatcagttctttagcatagcttctcatgttgcgctgaatggacatggcgtacacgtccaccgccgtgctcccccggaagccgcgatcgggattggatttgaacgccgcgtcatccgaggcggtgagaggctgcaggtttttggcgaccgctacggataccggtgcgcgggtagggccgacagtggttttggcggcggtattgccggttggcttttgtgcttgggttttgtttgtggctgtgcttcccccattggattcaccggttgccgtggtatcttccgtcggcatctggctgccggtggacgtccccgtcataccggtgctaccggtgggattgctagatacggggggagtttccttgggtttacaggcggctagcggcagcagcagcgcgccgcaaagcagcatagccgcccatctggttttgttcatggagagttttttcatcgaacctttaccccctgcctttcatttccgacccgcgcgggcggtgaaacaacgggtttccgggtttccgccggataacgcggaaacccgggccgtcttctttaccttttagtgtttaacgcgcagacgcagagccgcgccggccgccagcagccccagtaccaaagctgccgcgacaccgccgaaggtctcgccggtcgcggcgccgccacttccgtcatcaccgtttccgccatcctcgccggacacgtcggggtcatccgagacgtccgaatccgtcgggccaggctcccagccgccgttgtcctcggtgtagaaagagcggtactcgtacacgcccaatttctttcccgcctcatccagggcggtcacaagcacggcataacgcgctccagccgtaaggccggtaatggtagccgaggtggtttccgatgtctgagacgcgcgatagacatactgcatcgcgccctccggatccatgccatattcatagatgtccagcttataggaggcggcgccctcggccgcgacccaggtcagcttcgcggagttttccgtgatatcggtgggctcattgatgataagagactcatccgtggccccgggcagctccgttaccacatcgccgggcttcagaggatcgggcagcacatcctccagagccatttccttgccggtgaacaggttttggatgacgccgctgttattgataaccgcgccgtccttggtcatcaggccgttagtcgcctgcatgaggctgctcatggtaaaggcgcccatgctgccgccgaaagccgggatgtacagggtgatatcggacacgatttcgttgttcttgatctgataggcgtctctgttgatcgtgctccagggcacacgaacccagccctcgaattcactggggagggacagggaggtgttggaggccgagctggtctcccattttgttgtgtttttggccagcagatagatggggccgcttcccggctccggccaaacgtcggtaccgccctcgccgccgttggtcttcagggtgatgttgattttcgaagtctccgaaccgttgtatcccttgggcatcttgacgtaaaacatcaaggcgccatcttcagcattcttgaccttcagtggcgtgaaagctcgaatggtcagagccaaggaggtgtttacgaaaccggagctccaaacattgccggtgatctctttgggggagtttacatacaaggcgttgtagccgcccagctcattgggatttgccacggtcttgatatcaaagtcgtcggggatggtgattcccgccttgccgccgtccatcttgatgccgctttcgctggagacaatggccttatccactgtgtagccggcagcgggatccatgaaagggatctcctccatgtatgccacttcgtcgatgacagtgggaggaacaggatcctcaaagtccttgccggtgaagatgttcttcaccgtggtctctccctccaacatgaccttgcaggcgtcatccgccttggtaggatcggtcagagcgatcatgggggcggagatatacagcgcaccggcctcgccgccgtaccgcccggtcttccacttcatcccgccgatggtgtccgtggcccagtcggtggtatccccggcaacctctgtcgtactcttcgggagatagatatacccttcaaatccctggttggcattgccgaggttggccgcctcctgccagaaagcaccgcttacattggggcactccacccattcggtgccgcccttggggagcagccagaattcgccctggtgatccggacgcatcttatcggagccggaattggtcggaaggaaccacagggagaacctctgggaggttttgggcagcttgacatacagcaggatgcccttgccatccttcagggccagcgggctgctcttgtaatttatctggagagtgtctccatcgttgctgccgtcgccaccgtattgtgactgacggccctcttccactgcggtgctgtcaagcttgaacatcaccgggttgaaaggcatcagcgacgcgttcatggagagggaaaccgtccccttcatgggcacggccggatccgcctccgtcccattcgtgttctccgccagggagacgaagttgtaatcgtccttgtcgtccagcttgtatgtggcgtcgtcggaattggtcaccttgtcgaagagcttggtgccggcggcaggaaccttatcagacagaaccatggggcgaatccgggtgacaacctcctgcgtatcctcggcggaaccaggaagcgcgcccgcaacgaccatggtcagcatggtgagcgccgccagcagactgcatacctttttcatgtgtttttcctccttacactttctatctcggtcggatggcaaatggagatgctttaagtccacctccttctcctttgaatttttccactttataaaagggctgccgcccaaacggcctatgttctatgggtcgacacgcaggatctgcccagccggaatagtccgaccccggcagtccgcgtccacacccgtgtgattggcgatgagaacgaccccgttttcataagtcaccacgctgcagggcccttcgtaggcgtgagaacgaatgggaacgtcccccagtcctttctgaatctctccataacaggcggaggccgccgcaatatcgtccaaccagttgtccgctttcgtgtttactagataattcagcggcgtttcggcgagatccgccggatcacagccggtcaggcgataagtggggcggatccctgtttccagaagggtcagcaggaaatcggcgggactgccggcgtcattcaccggcgtggaggtcagggagacgtaaccgtgcagaaccatggaataaaacggcacagtctcggtaaacaaatcatggccgttgttcgagctgggaatctcggtcagcagagaggcgctgtccagcagataggcgtttccgccctccgccgccagctggccgacgctctttcctgcctgatctgccgcccggcggtaaacttcctgcatctgggtgcggtcagttggagcctcaggattaaaatcgctgcccagctcctcgccgaaccggcgcaacaggagtcccgtattgtttccggagggaacccccttcaggaaatccggcaaattttccagcagggacgcggcggatacgtatttccaggagggtgcatcggtgttccagtcgccggtgctacgcagcggttcccggcggacgaccgccaccttgttgagactgcgcgcataggtgttgtgggaaaacaggcggaaacctccgccataatcccgtaccaggtcaaaggccaagtaaaaccggctgtctggcgcactctcccgcagggcggtatagccttgctctccgccgtccagagcggcggaaaaaggatagcgattttcaaacccgcccttttcaaagccatataacaatacgtcggcctctcccgctcctttttcgcgcaaggcatcgagtatcgactgcgtctggccaaaggtggtggcgttgacagttcgggtgatggggatgccaagaaaagttgttttccggcgagttgtcccaaaaaactccagcgcaacgtggcgtccctcctgcgccttcggcttgagtccgtatcgttggatcagataagcgcgatagcagcgggccatgccgctgtaatccgcgtcctcgtctctcagaaagtaataccgcaccactgggttgacatccaccggcttgtcctcgaccatcaccacggtgcggtaatttgcctccttgtcccggatgccggtcaagtctttctgatggtaaacaaagccggcgcccgctgcgaaatagggcgaatcccccgcgcttccgcgagcgtagatggagcccgccgcctcacctgcgtgcagaacagccaggaatgcggcatccccgtttttcgcgccaaacacgggcagtcggatggctccctgctcgggtttggttttcaaaagcaggcctaccgccgggttttccccatacaccatctgccggtaggaggcagagctactctcactgtcggcatagtctactaaagcaccgctgccgctgggcaggaacaggtacccgtcttccccgacctttcccgcaccgaaagatggaaatagatcgatattggtgattcgtgccgcgccgtactcctcgatttcgtcgtacaggatttcggcctgggcatactcctcgcctagtgtcacctgtaccggaatacggaactgcatggactctgcagagaaatcataggtaattttcaagccgtcctttatttgacgaacctcgtacgcactttccttgacgctgccgtcgtagctgttgacggtcacctcattgagcgtcgagtcaatgaatgaaaccagcaggctggacgccagctgctccgccatatgggcggacatgctctcgtcctccaatacgccgggtggactggtgtaccagtcgctgcccgctgcctcatcccgcaccacgatgttggctgtttccaggtcgatagccagagacagcccgcccttttccgccaccgtggtatagccctgtggcacgccggcggtcaccgcaccctcatccccagtctgtgcgccggaagcctcccggcgaatacccgcaggagcggcgagtccggaaccgtgcaagacgaggagggcgcctatcagagccacggcacatatacgcttcatgtttttcatcactcctcaaatgtcctgcaaagatttctatcatttagtaggagaacaaaatcagcgatatcccagttcctggacaatacctgtggcaaatccccacatctgctgggcaatggcaaaaaacagcagtagtaggaaacaagcagccagaatcgccagcaacgtaaatataaccgatgcgatggttttcttcaccgtgtactgatgcaccgtcatcatgccaagaaataccagcaagaggctccagcccacggcgatagtgcgcagggtgccgtacagaatactctcgtctagggataggatgttagacaccacaataccgatggaacccagcaacaggtagggcgtcagagaataggctgtcgcgatccagatttcggacatcctaccctccccgttgttgagggtacacatggcccagttgcagaccgtccaaatcagcacgatccctaccgtcccggccaaaattggtaggatgttgaaattcatgccgctgtccggattgaatagataccccgtggcagcggcctgtgccacaccctccagaaaaaagagaagcaccagcaggtttgccaagggcagagacgcttttttctcgaatttcaaatcgttgaacactgccagcgggtgaaacagcagacggaacggataaatcagtttttcccggtcgaatttccgccgtcgcgcatccggctcccggcggcgtcgcaataacacatagcagcccagcgccattttacgcacattcgtgaacatgttccgttaccgctcctttcccgacaacatccagcggcgtagccgtcggagcaaaaagaccagtccagtcagcaccgccgcgccgcccagaatgagaaagacaaaataccgccggacgaattccttgcggtattccttgagcgccatggagtagaaataggggtcgtcgccctttttcagcatccgcatggcggcagcgttgtccccctcctggaaatacgcgcgcccgatgctacgataggcgagggtaaatccgctgttgcgctgcagaacaccttcccagagatccaccgattccacgtatcggcctgcgctgtaatacgacagcgcgtccaggacggctctcatgtaatccgtaggggcgaacaccgtcaaactcgccttttcgctgtccagggccagatagttgtcccccagcttgtcgatcgccaccagggaacggaaagcgccccgggtgtcgccggtatcgccgaacacggcgatcagactgcaatccgcgtcatagagaaacaaacggccccgggtggaatccgcaccacacaggatgccggatttgtccgcgtggacgtccacaaaagcactcgtgacctccttataatcctcataggaggtttccagatccccgaatttacccagcccgtaagccttgccttccggctgaagaatgtcgacacccaaggtgttaagccgtttgagctgcttgccgccgctgcgtgccggagacgaggcgtaaagaaaattctcttcgtctatatataggttgctgtaggcggagggcaaagctttctgcatggcatccacctgctggtcgctgaaccaccttttccacagctgcatcaacaatacgtcggtggtcgcctccacctcgttgggggcgaaaaagccgatgaacgcatcgtccttgttgtactgaacgatgccctggtaaatggagggatccaccacatacacgttgccgtcggtgtccaccaccaccttttccggcgcgaagcggatgctggtgttgatagcggcgatagactcgctggtcatgacacgcaccgcctctccccgctcgtttaccgcgacgacccgctcattccctgtgtcacagatatacagcaggccatccactgccttatacacgcctttgggcccgctcaactcctgcgtctcgcctttgtacacgatctgtgttatcacgccagtctttttcagctggctgtccagcaggacgatacggttgttgtccgtatccgcaatatagacgttctgctccctgtcgacgaacacatcctgcggggagcgcagcgcgccgacccccatgtccgcgccgtccaccacctccaccgccgtgtaggcagcaggcgcgggcaccgacctgtcctgcgtgtcgtacagatagtcattcccgcgggtcagcgcgcacaccggcaagcaggagaccagggcgaggatcatggccaggacggccgtatgccgcgcggcttttttcataagctcctctcctcccgtccctacgatttgatgcctgaatacgccatggtttccaccacggaattctgacaaatcagaaaaattacgataggcggcagcatcagcagcaccgataccgccgcagtcactcctgtacggatgatgccgccggtgttgatctgctgcatcatgacgggcagcatcttcatagattcgctgtaggtaaattgtccgcctgtcacgttccagccgctgataaaggtaaatatcagcaacgtcatccacgccggacggattgccggcagcacgattttaaagaacatgtacttttctccagccccgtcaatgcgcgccgcctccagaatgtcgtccgggatagcggaggtgaactgggacataagaaacaccccgaacgatgtactcatcagaggcagaatcagcgcccagtaggtatccagcatcccggtctttgccatgagcatatattgaggcagcgctgtaacctccggacggaacaggatagcgaacacgatcactgtgttgacgagctttttccccgggaacgtcagcttcgccatggcgtagcccgccatggacgccagcaggatatagcctcccgtagacaccaccgatacgaacacgctgttgaacaggtatcgctccgtcggaatcagcgactgggactgcaccttgatgatatccgcgaaattctccagagtcgggtgatagaccacgaaacggggcggaaacaggaacagttcactgatgggcttaaacgcgttgatgatagaataatacataggcagcgcaataaaaatcccgaaaatcatcaggaacaaaaacgccgtgaagtttcctgcgcgggaacgggtcaaggctttgttacgcaagggagtacctccttatcagccctcgtccggtgccaccgagctgatggccttgttaatgaccacccagctgaccaccatgatgacgaacagcaccactgccacggccgaggcgtaccccatttccaggcgggtgttgccgtaatcctggatatgcagcaccaaggtatgggtggaatagtccgtgctaggcatgccagtcagggcagcgggctggacaccgatggcaaaagatccagatatggacagcaccgccccgatgagcagctgcgggcgcatctgaggcagggtaatgtaccacagctcctgccagcgatttcgtagcccgtcgatggccgccgcctcgaaatagctccgattgagttgtttaaaaccggcgacaaaggacaggaagccggtgcccatgcccatccaaagaaccacgacgattactacgtagaagttgtagttcgggtcgttcagccactgaatcggggcgtggataaagccccagttgattagaaagctgttgaggatgccgtaggaatcgttgctaaagaggtacatccacatcagataggcgctgccgatgagggagggggaatagaacagaaacgtcagcatcgtcctggtcattcgccccatgtcgttgatgaaccacgccaccacaaaagaaaggatgtatcccaccggaccggtaatcagggcgaacagcatagtgttgctgaatgccttgacgaagatgtcgtcatccaggaacatccggatatagtttgccacccccacgaaacggggtgcttgaaccatgtcgaaattggtaaagctgatgaccaccgcgatgccgatggggagcagtgtaaaaaacacgaacaggataagccaaaaccctaaaaagaagtacgcgttgccgtatttgctgaagaagccctttgtgcggttcatgacgcgttcccctccagtcccagttccgtgcgctttctcatcagctcgtcatcgatcatccgcccatagcggaagatgacgtcccgcggattttcatattcgtataccacccgtcgataggcgttgctcagatttcgggtgacataatacgcggcgggagattgcgggttgtcgctgacctgctcccactgagccgccagacgactgcactcgtccgctgtccagttcagcgtcgagagtaccgacttgtttgccgggaagtaccgcgctgacacccctattttcgcctcactctcaaaaccgaagctctgttgagtagcgtcgctcgtccaccagtccagaaattggaatgcgtccgtacgccgtgtcgatttcgccagcaccaccgcaccactgacattgcaggcctcgctgcggttgaccgagccgtctgcctgcctagtcccgggcaccggtgccatgctccattgtcccgcgatttccggcgcgcccaccgccacctgaccgtaaaaatacgacgtagcaatgaccatcggcatctggccggtgcggaaccggtttagggcgtcgaaagataccggcaggccgtacttcacatataaatccgtccaagaagtgaacgcctgaatagaagcgtcctccgtcatccgggtttttctcatgtcgctgctgtacaacgtgcccccgttctgcagcaggaacatctcatatatctgtggattttctgcaatgccgacctgcatcccgcccttttgcaggcgcgccagcaccgtgtagaagtcatcccacgtgtccggcacgctcaggtggttctcttcaaaaatatccgtgcggtagaacagcatgttgaagctctgcacctctggcagagcaaacacgctgtccccggtgcgcagggagatgaatgcagagggataaaaccgtttttcaatctcctcaaagcccggcatttccgtcaaatccaccagcgcgccacggtagtacaggttcaccagaagcgatttcggcacgaagagcgccacgtccggaccttttccggataccagcgccggcagcagcgtgtccgcggtgttgatcaacgacatgttcaccgggatccccgtccgggaggagaagccgtctgtcaccaaacggctgataatctgcgcctgatcccgccccgttgcatatcccgccgtggccaggtcgttggcgctcacccataccgacaacgcctctttcccgccctgtgcgtttcccactgcgttgtagtcccgcacaaacgaggaaaagaacgagcggaagcggaacgccgccatctcgaaaaagcccgctccggttttggcagtcgcctcatccggagaacgcagaaccatataatccagctccaagggctggtttcgcagagcgccgagcagatcggccagagtgtttatctgggaacggaaattgtccatttcttgcggaatatcccgtactttcgacgccatgtcgcccagcgtgcgcgccgcctcatatatccgcgcggtgttactgccgccgctgcgctcgccgtccagtttttcgcctagcgcgttcaggcgcgcctgacaggtggtcagcgtttccaccagaccgtctatatgcttatccaaatcgtagtcacggtagctgtccggggtttcgcccaccagaaccataattttgccgtacaggcggttcagttcctgcaccacgctcccgaattccgccaaggtatctttcaggcccgtcagcaccacctccagcttaaggatgtggcgccccttgctcagatacagccgaaagggctccccctgcgaatccgccaaggttttcaccgcaaaaccgttggcatagggaaaactcaccacgtcgcattccgcaaacggcacgtccccgtcaatgctcagccgtcgcagaacgtcgaggccattactgatattctgccggtatacgaaatccaggacgtaatacccgtcctccgggatgtcgacttgccacgacacccattgtccttccgtcccatagcccgatccgcccagcaggttgtaccggatcgcgctcggatcgttagggctcaccgccggtgtcgtccggtcataagtaagggggatttccagatgagatttctgataattcagttccgcttcccagcggaccttctgcccggtcgcgtccttcgctcccgcagcgtcatgctctgttttatacgccgtataggctttctgcgactccagcggtttcaacctgatgcgcttaacgagaacgctttgccgcaccatcgtgaggctcagggtgtacgttccctgatccagccggagaccgccgtcgcccgccgtcggcaggatgacggtctgccaggccgaagtctccacctgaacaggcgtcagctcatttccctgactgtccctttcaaagcgcccgtccatccatccgcttcggtcattttcccagatacggggtagatccgccaccgtatcctcaaacacggtggaggttcctttcaatgtcatagaaacctgcggcgtgacgtttttatctttcaccgcccaataggtgatttccagcgcgtaagcattgcccgctgtatctgaggacagagtaaaggaaaaatcccgggtttgcttttcctccagcagcagactgccatctccctcataaagcgggataccctcttcgggcgcagactcggcctgcgcccgcgccggaatggccgcgggcaacagtcccgcgcacagcagacagactagtattttgcggatagccgccatggttttccctcctcattcagccgacaatgccgctgcggtcgattccctggacaaaaaagcggtgcccgacgataaacagcaaaataagcggcgatatactgaatacgcaggcggcctgttgcaaaggcaccatataataggcggtcagctgctccctgggcaggatgctctccaactgcgccttgaatgtgctcaacgtagtggccaacgtagggatgctggagagattgacgctggcgagatagtaatcgccccagtaccacaccagggaaaacaaaaaaaacactacgatagaagtcagcgcgttgggcagcatgatgcggaaaaaggtccgccaatacccgcagccgtcgatgaatgccgcttcctccagttcatggggaaggccggcaaacacctggcgaaaaaccaggatgaacaccccggcgcgcaacccctgccccagtgcagcgggcaggaaaaaggacagtggggagttcaccaggctcagcgtggagggcgatccgctaagcaggccgtagaggccaaaaaaatcgaaattcttcattagcagatagttgggcatgcccagcatctgcggtggcacaataatcgtcaggatcaccatcacaaataaaacggcgttgcccttgaagcggaagcgggcgaagccataccccgccaagcaagtgacgaagatttgcaaaatcgagctcaccgtcgagatatagacggtataccccatggcccgcagcatccccactctcccgatggcggttttaaaattatccagcgtcggcgttttgggaatccagataacggtcacatccatgaaatccttcggagaacgaaacgccatgctcagcatgtagaccaacggatacaggatgataaaagcaacagccagaagaaacagccaccgcaacagggtagtgacggcccggcccgcgtaatacaggggggatatttccatatggctgatgtcgatggttttacgtcgtttcacgtttttcggcatgacgccagtctccttcccctatcgattgttataaaacaccatccgccggcacagcaggaataccatgcccagtagtaccaacaccagcagaaaataaatccacgacagcgccgccgcataggaatacttgaaatccttggtgaaatacgaggagatgtaactcatcgtctggttaccgtagttcgtgaagctgtcgatgatggtatacactaggttggccagaacgaacggcgacaccatcggaaacgtgatcttccaaaacgcctcccaaccgctggctccctccacctgtgccacctcgtagtgggagggggggatcgccagtagggccgccataaagataagaatctgtactccgctactccaaaccaaatctgccacattggcaatcacacgcccgagcatgtccgtcaaattctgcggcaggccgctgtccagcagaaactgggtcagggccgatacgtcgaagatattcgacgcgccgctggcgggcagggtggcgatagcgctcatgtcccctttgatgatttccgcgataacgccggaggtgatgataatcggcaaaaagaaaatcacacgcagcgccatccggccgtgaaatttttgattgaggatcactgccacaaacaggctgaaaaacaccaccactggcacctgatacagcagatctcgcagcgattccatcaccagctgcgggaattctgcgtctccggtaaacgcgtggatataatggctgaacaatccgtcctccagaggcttcagggcgtatcctccatcagtaaactcgaagtccacaaacgagtaccgaaagaacgacaccatgggctgtatgaaaaaaaacagcagcccaatgaaccagggaagaataaacatccaacccatggcatcccgtttccgccgcagcctgctcttttgccgcatcctcactccgcctttccggtcactctatcttccacatgtaaattttccaggaataggtaatatcgtttacacaatagtaggggctcttcggttctttatatgtactagctttatttctcgttggctgccgtgactttacgtcatcttcagcagcatccatgttgctttcgggttcaaccatgaagccccagactctggtacagacgaagagcgggctccggctcgttgcaggtgaccagcgtcgcgccgcagtcgatgacccgcctggcggactcctcgtcgtccgggcaccaagcccaaggagcgattcccaactgccgcagttcctcgcaaaggggccgggtcaaatcctccatcccgatcccgatgctgtaataatgcgcgtaggtatccttccgataatgcgtcgcccgctcttttagaaacccctgggtcctgacgccgtaccgctcatgtgcataggtcgtgatatcggcatcccagcaggtgagcaccgtgcgttcacccatgccggcgtcccgcagcatctgcacggcctcgtccacaacaagtggccggcgatccttaatttccaggttcagcagcagcccggtggggcggatccagtcgaggaattctgcaaacgtcggtatacgctcaccggctcccgcgtccagctgccgcaactcctgcagggtataattaagtaccggcccggtgccgttggtggtgcgatccacggtagtatcatgaataacgaccagcaccccgtcgcttgttcggttcaagtccatttcgatgccgtcgacgcctaactcggcggctttctgaaacgagagcatggtgttttccgggtatcgggcggccaggccccggtgccccatcaccaaaatatgggtgggcgattgtgaccacatgtccatggcggacctcttttctttaaaacaccactggctcgctgtccacgtcctggttcaggcaaagcagggtgtaataggttttggtgtatctggcatagcgaacagcctcgttaacccaatcagaaccgtaataccgcagaaaagcgtcaaaatcataatccacgctttgcagaatatcctgtatctgttccgccttgggtgcctcggccagtacggcccggatctcctcccaacggcgggtgattttcggccggaggctctgcccggtgccaccgctttcctgaagtcgtagaatattgtccgccccgcggccaaacacatcccggatctctttctcccatgctttccgatccggcggcttctcctctgggagcggccgtccggccataacccgttcacgcagccggctggtgattatggtcgcgtaaccgacatccaggccatgaagcagatacgggcggttccgttccaggccggtcagctcaaaaaagtgcgacaggtgatgctcgcttcctgaagcgggatgggaattccccacaaagctcatcgccactcccacaagcaacaacgattccatcagggcctccacgctttcctcgcggcgggccatcaagccatccgccaggcggaccacccggtccaccgccccttttaccatgtcatacacctgtcgacaaaatggttctttcaggagcaggtgactcagcttccaatcgttgagagcggaatatttgcccacgatatcgccgaaacccgcccggatcatttccatgggcgcgtctttcagaatcgttgtgtccgccaccaccgccaggggcggttttgcgtcggtggtaactttcaacccatccagcaggagagcggcccccatagacacataaccgtccatagagggagcggtcgccacgatgatatacggaatgtgcagacagttactcacatgcttgcacaagtcgttgataacgccggaacccacgcccaccagcagatccacaggcggtgccgccgctttgagcagccgctccaccgcctgattatccggaataagaaaccccgttccatggaacagcaacgtctttacctggcgcccggcagaccgcaagatcgcttctgttttagcgccgcacaccgcataggtattgtcgtccgccaccaacaggatagaggcataggaagccgtcgcctctgcaatttgccttaaagcaccggctcccagccaaattttatgtattttacatacgtgacattttccacatgcgcacatatatggtttatcgcacagatcattaaaactccccatgacttcacctcgccacgtcttaatgctctttattttagcctgcagacactgaaagaacaagacggtatgttgctatattgttcagttatattgtcgtaaaataggtaactttagatattttaacatttcggatcaaataaatgcattggggcgcatggccagttttcccggcgccagagcaggataccgaaacttttcgcattgcgccgccgtacgttttctgctatacttggatcgatacatcatccattcaggaaagaggaaagattaactattaaaagtcaagcccgaaacgaaatggtggtggtgaaaaaag

SEQ ID NO: 1641 - DNA, 2833 bp, Unknown
  16S sequences of unknown bacteria
gcggcggcacggcaggcgaagacctcacgttccgagagcatcgcgagcctgtgcgagcttctgcccggattcccgcactcgtgcagcatcgtggtcacacggtcatacacggcgtccggcttcgggaaagacgtcgccgcgttgtcaaggtatatcataatctcctcccaatgtccgtcatccggacggtcgtgtaatcacgctgtaaactatcccggcggagcgcattgtcctttccgccccggcggcggctccggcattgacccttattccccacgcgcagcccatcggcgtcttcgccgggtcgagcctcgtgacatccgactgtatcccggcggcgtcgagagccgatctcgccttcatcgcgtaggttattgagccgacgccgaactccgcgtaccgccctcctccgtaccgcatcatatcacccctctgtcagtttatgcgccgaaagtttctcttgacaaatcactcggagtatggtataatgactataccctacaaatcaagaaaaagaggtgtcattatgcgaaaattattcagattcatttccctggcaatggtatcggcgctcactctgtcgatgttctcctgcggtgaggacgcgccggagccgattccggaaaagaccggcgtcttccgggcggaggagataatcccgccggatgattacattttcaatgactacgcggacattggctggtcaaacggatacttcaccatcgagggcaggacgaagctcgacccggagcatccggaaaaggatcaggaacgtgttctcctgaaggtcgcggaggacggcacacagacggtcgaattcagcgtgctggcgctgaacggcacgataaagatgtacacgagaaaactcgacgacggcaaaacgatttcggtcgagggcaccttcgacaccgaccactacgcggatgtgaagctcatcgtcagggacaagaaagacaaggtcacctcagagcacgcgctgaatgatatcttcggcataaggatcgaggacatgaccttcgacccgatgagcgcttccgtaaccttctacccgcgcttcgcggacgaacgggacggcgtcatatatgtcgtcacgacgataggcgcggcaaagatcgacggcgacaacatctccaccataatatcaaagcagcaaatacgcagctccgcatacggcagtgacggaatagtcgtcgtgacgaacgaccggaacgggaacataaagcgcgccgacttcgacgccggagagttcgtgagcgtggaccttccgaacacccagctcctcatgcgtccttttgcgcttgacggctatgtcatcgccggcgtgatagacggacagatcgtcggatggacgagggacgagagcggcaaactgacacaggaactgctctgcgacccgctgacggcggacgtcgccggacagatgaccgggctcgccgcggtgtctgacagagagttctatatcggcatgaataacgagttcgacgacaaaacaaattattaccacctgacgatgctcgctccggacgaaatcaaagagaaagaaactctgaccgtcgcgctcggcgtacttcgcggaaaatccgacgtgtacgcggtgagcgagttcaaccggacgcatgacgacatcaggattgagctcaggcaatattacatgtacgacccgaacaagtatgtcgaaaatttcgagaaggacatggtctcgggcaacatcgccgacgtcgtgatactcggctccgacttcaacgtcgcgaactacgccgaaaaggggcttttcgtcgacctgtacccgatcatggacgctgccgggtatgacaagggcaatttcatggattcgataagtggcttcgaaaggaaaggcactcttccatacattccgctcggaagccgtatcgacaccatgttcgggcggaagtcggatttcccggacaagctgacgcttgacgctttcctcgacaaattggagaacctcgaggacgacgtgacgctgatagattatctgaggttttcaaatatacttgagacggcgatggacgagttcgtcgactttgagaccggaaagacggatttctcgaacgacctgttcaggcgcttcgcggaggattacaagaaatacggtgacctctacaggcacatcgagtcgcacaatagcggcagacgcgacgatatctacccggatctcgcgagcggaaagcagctgctcctgcactcaaagctcgacatcgcgaatatggctgaactcgcggcaaagtacggcatcgacgaccttgagatcgtcggaaaaccgcacaaatccgggaacggctccaccctgtcgccgagcacttatataggaataaccaaaaattgcaagaacaccgccgccgcgtgggagttcatctcgctgagaatctccgacaagtataaggaaaaatatctcacaaagagcgcgtttgagaactacatgaacagtcttccgaagtactatgccttccccaccggaagaacagcgtggacgccattattcgacgagccgaacgacgagagtctgaaggcgatgctcggcgactaccgcctcttcgaggtgacggatgagttcagaaacactctgagagacaccgtagcgggcgcctctatcctgccgccgatgtggacaaaactcagatcgatagtgatggaagagcttaatacctatatatcgcgcgatggcatgagtcttgacgaggcgataaagataatcgacaaccgcgttaatacgtactataacgagaagaactgaacccgcttcacgaaagggagattgccccatatctgacaacttaagcaaagcaggaagcgaaaagcgagaaaaagtcaa

SEQ ID NO: 1642 - DNA, 2543 bp, Unknown
  16S sequences of unknown bacteria
gccgacgccgccaatcccgaacaccgccacatgactctctgccagccgtgccatcgcatccgcccccagcagcatctcttcccggatccattgctccattatggtctctccttccttcaccaaaagcggggcgcctttcgcgccccgctctgtctgcttcaaaaattgcccgcttttttaagactggctgctggtcagggtaatgtcggtgttgacatatttcatgccgctgccgaattcataggtgtacttgctctgatagccctcgtaccaggaggtgtaggcgtcgttcttcagatccgtgcggatcaggttggcgcggcggttttcgccggggccaacgtagtagagaatggcgtaaccagaatcggtcttgatgatctcacagtcaccgggcttgcgctgggtatcatagcaccaggcgtcgcgctcatcgccaaagttgttgtgggacaggttctcgaccaggccgccgttggcgctggtggtgctgtcagcagagcttgtcttggccagctcaccgaagctatcttccgtcgcgtcgccgtcgcgccactgctggagcagctcgtccgccttgttcttggcggtctgccaggcttcgtcagagatggtgtcgttcgtgccatcgccgtcggagtctgtgtcgttcgtgacgctgacaagaatctggcgggcattgactgttgtatagtcgttatccgaagtggcgataaagtaatagacataatagccgtttccgtcagcttcgaagtaggccgtatcgcctgcctggcggtcatcggcatagagccagtcgcggccataggaagaagcgtcgtcgtagctggactcagtcgtcagcgtggcatcgtcatcggcgtaggttgcctggctcgtctcggggacgatatcccgcgcccactgggcaaaggcggcctcgtcgcccttgcaggcttccgtcatttcctttgccttctcctcggcctgggccagggcggcttcatcggcagcggtcttctcctcgtccgttgcgtcctccgccgtatcctgggcgaagtaggacttcgagacatagaaggagcggtaggtcacggcggtgtacttctgcggatctgcctggtaagtgtcgttgacctcttcatcggaataggtcaggctgtcggtatagtcggagctgaactggctggccagcagctggacctggcgatactggcgataggcatcttcatcgcagcccttaccgtaggtcttggcgagataatcgtcaaaatttttgaaattctcattgctggacagggcggatttcaggttttcgatctccttatccagcgacgtctgctgctcgtccgacaggctcatcccctgggcgacggcatcgtcatacagggcgtagctcgtggctgcgtttttggcggcctcttcctggaaatggtctgcccaggtgatgttcttatcctcgtcgtagtactgcgcgtccagagatttcgtggtgtccaggacatagctcaggtagctgccatactggttgtagaactgatagaccgtgtccatataataaaagctcatatcgaccggggtcagtgcatggtcgccgacctgcagggccgtcgatgttttcacagcgcggttgggctgaatcaggccaaaatagacgcctgtcaccgcgacagccaggaccaggacgatcacgatcgccgcaatggtccggttcttccggcgtttctttgccgccgcctgagccgccagctgctggggcgcgatcccctgctcttttaacacctgacgctgtttcttttcacgcgaagcgctcatgttattctttcactccttgctggtaacgcccctgggggggcaaaacttagatggcttttattataccggaggaggacgcccgttgcaagtaaaatctggattttccctggtttttacaaaaaagtttacaattttggtccccgcgcagatcgggatagtaaaaaagcagcgttctgccaaaaacggcagaacgctgtagcacgctttagtccgctagcgtccactcctcatattccccgcctaggacaatgcccggctctaaaatcagcctgtggcctcggtctctgacatagtagtggaaggactgcgcaaactccggaatataaattgcgtccgccccttcatactcataggcgtattttccgcggcaatccgtgtgggtgccggtcacgacaaagaggcagacatcctcgccgtcaaagctcagcatcaggatcatatcctcgccgtcgtcgccctccacctgcatcatccagttattctccagggcgtcgtcgtcgctgtcgtcccaggcgtaccaatcgtcgtcccaggcgtcgtcatcccagtcgtcgtacagccaatcctcgatcacgccgctgggatcggaggcctcgcggagcagcgactgcgtcacccgccatacgccgaagaacagcgccgccgcgcccagcagagacgccaggacaatgaccgtgaccgtcatccacggccgccagccctttttacgggggggcggctgcaccgtcgccgacggctgcgggtcagca

SEQ ID NO: 1643 - DNA, 23860 bp, Unknown
  16S sequences of unknown bacteria
agagaaaaatcgccgtttgggtagcaaaaaagcccgatataatcgggcttttcgcgggagacatcttttttgtctccacattatggtcggagtgactggattcgaaccagcggcctcttggtcccgaaccaagcgctctaccaaactgagccacaccccgttttttcatgctttagaattataccacatatgcggcatattgtcaatattttttttgcaattgctctcttttttctgcttaccgaattacggggacggacggtgccgttttgccgcccgtcggagcaggcgagttcgcttttcccacaccgacaaaggtcagatgtttttatatttccgatcgggcggcaggcgcgcggtttatttcatgcgatgatctcacttgaacatcttggatcgatttgcgaatatcagctttttcaaataaaatcttgcgaaatggggaaataatattgcaaatgcagatcttatgtggtataatgagcaccaagcaattgcggatgcaatgcaaggagaatcaaaatgaattacggatatatgttttcttacgacaagctgtggcaccttcttatagacctgaagctgaagaaaaaggatcttcaggaaagagccgggctcagctcgaacgttatcgccaaaatgggacgcggcgagagcgttacgcttgaaactctggcaaaaatatgccttgcgctgaattgcggagtcggcgacatagttgatcttataagaaaaaacaagtaggcgcattactgatgcgtgcctgccgcaaaatgaaaggatgacgatatgaaagaagtaaaatcaccgaagaaaccgcttatctattactacggaattgcattgctgctcgttcttctgttcaatcttgtggtcgcgccttttcttacccgcgcagccgtcgaggaagtcgattacggaacattcatgaagatgacggaagataagaatatcggcaccgtggaaatagacgattcggaaatagttttcaccgataaagaaaacaagaaaatatacaagaccggagagatgaacgatcccgatctgacacaacgcctttacgattcgggcgccaaattcactcacaatatcgaaaagaagctttctccggtgctcagttttctcttaaccgtgcttctcccgatcgttattttcatcggaatcgggcagtacatgagcaaaaagctgatggcaaacgccggaggaccgaatgcaatgtcattcggtctcggaaagagcaacgcaaaggtgtacgttccgtcaacggacgggatccgctttgacgacgttgccggagaggatgaagcaaaggagagcctagccgagattgtggattatctccataatccgaagaaatactccgacgtcggcgcgtcgatgcccaagggcgtacttctcgtcggacctcccggcaccggaaaaacgatgcttgcaaaggcagttgccggagaggcgaacgtgccgttcttctcgatgtccggatcggaattcgttgaaatgttcgtcggaatgggggcgtcaaaggtgcgtgatcttttctgccaggcgaaggagaaagcaccttgcatcgtgttcatagacgagatcgacgcgataggaaagaagcgtgacggacagatcggcggaaacgacgagagggaacagactctcaatcagcttctcaccgaaatggacggctttgaaggcaacaacggcgttatcatccttgccgcaacaaaccgtcccgaatctctcgatcccgcgctgacgcgccccggccgctttgaccgccgcgttcccgtcgagcttccggaccttgccggacgagaggctatcctcaaggtccatgcgaaaaaaataaagacggcggacgatgtgaacttccataccgtcgcacgcatggcggcgggcagctccggagccgaacttgccaatgtgataaacgaggcggcgttgagagcggtgcgcaacggacgaagcgttgtatgcgaggcggacctcgaggaaagcatcgaggtcgttatcgcgggatatcagaagaagaaccgcataatgtccgacaccgaaaagagaacggtcgcttatcatgagatcggacacgcgctggttgccgcgctgcaaacgaattccgcgcccgtacagaaaatcacgataattccgcgcacatccggcgcgctcggatatacgatgcaggtcgagcagaacgacaaggttcttatgacacagcgcgagcttgaaaacaaaatagcaacgctgacaggcggacgcgcggcagaggagatcgtgttcggcgagattaccacgggcgcgtcgaacgatatcgagcaggcgacgaagctcgcgcgcgccatgataacgagatacggcatgagcgaggagttcgacatggttgcgatggaaaccgtaagcagccaatacctcggtggggatacgtcgctttcatgctctgcggatacgcagaaggaaatagacagaaagaccgtcgagatcgtaaaaaagcagcacgagaaagcgcgccgtatgctttgcgacaacagagcaaagcttgacgagcttgcgggcatcctctacgaaaaagaaacgataacgggcgacgaattcatgtccgtgctcaacggaaaggtcggtgaatgaaaatgaataaacgttcgtgcttcggctggtttgagcttgttgcgggaatgcttctgattgcactcggaattttcacgtttatccgtccgggaagcgtccttacatggataattcttatctacggattcacggcgctcgttatgggaatcgaggacatcgtggtttatgtgaaattcgcgcgctttacaggattcggaccgatgctttcgctgatatcggggatcatgagcgtcatgtgcggcattatgatacttgcgtatcccgaggcggggaagtgggcgcttacccttcttttcccgatatggtttatcgcgcactgtatctcaagacttgcccacataggcatcatcagaatgtttgaatgcagcttttactattactttaccgtcgcggtcaatatcgtcggaatacttctcggatttttcatggtgttcagccccgtcctcacattcgtgaccatgcgcaccgttgcgtatatcgccgccgtctacctcatccttttcggtatcgaaagtatagttgcggcgttcggacggcggcactccggatggtgagccgatgcgccggaaaacttacggaaaggaatcagctatgcagtctgtcaaggaaccgataaaccttcttgtcactttcgacagaaactacgtcccgtatttcaacgtaatgctttcgtctcttctttacagcaatccggaggaatatttcaatatttatattctgcacacaacgcttgaggatcgcgatcttaaagaatcgagaaagcttctcggcgagcgcggggagatatttcccgtcaccgtgcgcgaggattcgcttgaaagcgccccgaccaccgaccgttatccgaaggagatatactatcggatatttgccgcgaaatatcttccggaaaatatcgaccgcgtcctctaccttgatccggatcttgtggtcaataaaagccttgccgagctttacggcatgccgatggggactgcattttttgccgctgcatcgcatatcggaaatctgcttcacttcataaacgagctgaggcttgatatcgacagcgaaatgccgtatatcaactccggcgtcatgctcatcaatctgcacagactcagaatggagcagaaaagcagcgacgtgttcgattatatcgaaagtcatcgcggcaagcttatcctgccggatcaggatattataagcggactttacggagaccgcataataccgcttgattcgtacaagtacaacatgacagaacgccttttcgcatttcacatccgtatcggcgacagaatgaacatcgactacgtccgtcggaatgcggtgataatacactattgcgggcggaacaagccttggaagagcggatacgtcggaaagctgaatgtgttctacgacgagaccgtgcagagaatgcgcgagcagggataccgcacacccgagaaaacagccgaataaatccgcagatacttttgccgcagatcattccagataaaaaacgcacctgagcccgactgacgggcgaggtgcgttttttgtgcggccgtttccgcgaacatcgcggactatatcagcttcataagcagcataaatccgacaaggatcagaagaaatgcaaaattgaatacggaaaattcgagaatataccgacctacccggttcggattgtgcccggtgtactcacggaatgttataaggcttgcaagggaagagatcagcgtgccgacgccgccgatgttgaccccgaccagaagatcggcatagttgtccgtgaattgcgagagaagaatcgccgatggcacattgcttatgacctgacacgagagggcgctgaacacaagtgtgtccttttcgagcaatgcggagaagaaatcccgcaccgcgtcaattcgccccatgttgcccgcgaatatgaaaaagaatacgaatgtcgcaagcagcggataatctacgtcggcaagcaccttccgatcggcgagcagaagtacggctggaatgatcacaagccccgcctgatacgggatgccgcgaaaaacgattgcgatcgagaacgcaaaaagcacaaggtacagcactgttttcttaggatcgagagatatatgacggtcgggaagcgaaagcggctccggctttacgaatataagacagcacaaggttataagggatacgctcagtatgaacggcggagccattatgcggacgaattctccgttcggtatgccgaactccgtatagaggaacagattctgcggatttccgaacggcgtaagcatgccgccgaggttggcggcgatattctgcatgatgaaggtaaacgccatgtacttttcttttcccgtagatgtaagcacaagatatccgagcggcagaaacgtcagcagcgccatgtcgtttgcgatcagcatggagccgataaatgttatgtatacaagcgcgagtacgcttattcgtgcattcctgcacaagcggacgatccgctccgcgagaatatagaaaaagcggatgtttttcagcgcacatacgaccgagagaacgcagaaaagacaggacagcgttttcagatcaaaatatccgaggtattgcgcgtcgggcggaacgataaagcttgttataagcgcggctgcaaacgcgatcgcacaaacggtgttcttgcgtataaattcgataattatttcggtgcggcttctttttacggcggagatcatacgttatcctttgattttattgcgtcgcccggaggacgttctgccaccgcacgacgatacccgacagtatatcacttttgcggcggataatcaatacaggaaagaaacaaaaatcgcgcggtataaaggtgtttttttgatgcgggagattctttcgtgattccttcgtcactgaagtttcgtaaagcaggaaaaacgagatatatcttccgcatgcttcgtacggctctcaccttgtttcggactttttgcaggatcggtgcatgcaaaaaagagttcacttttttgctgctgatattattgacaacatcgacgcggcgtgatatactgaaaacggaaaaaatcgcctcggggcgataatgcttcatgcggaaagcggtgcgcagatgccgaaaataaaatatccgtttctaaagatttttgccactctgtgctttgccgccgccgcattcataatgcatgcggcatcgatacggtgtccgtttctttcgtttctgcactttccgtgtccgggatgcggaatgacccgtgcgtttgtttcgcttttgcgatgcgatccggcaaaagcgttttcctataatccgaggtttatcgttgtcccgatattgtatgcttacttcatcttcgacgggcgcattttcgggaaacgcgcggataccgctgtgatcgcgctttgtaccgcttatctggcggtcacatatgcgattgatcttttcgcgttctttcgcccttaatgcggcgggatttgcagctttaactactcgaattctgattttggaggataaaaaatgtattgcaaaaattgcggaaatcttatggatgatcaggcggccttctgcgtgaagtgcggcgttgcgaagggcatgggaaacaactattgccagaattgcggacgccccgtgaatccgggagccgttgcttgcacgatgtgcggagcgccgtgcactcctcccgtaaatccggctgtgcagaagtcgaagctggtcgcgggactgctcggaattttcgtcggaggtttgggtatacataatttctacctcggaaataattcgagagcggttcttcagatagttctttcgtttgtgacctgcggagcagcttcactttggggattcattgaaggaatcatgatcctctgcggaaacatcaacacagacgcgaacggtgttccgctcggcgaatgaattttgacggcgcgcggtcagccgaatatactcaggaaagcgtttgaccgggaattacggcgcttgcggatacagaaataaaaatccttccgatacatttgtatcggaaggattttttgacttttgccgttctgattttgcttattccgtgcggagtgccacaacgggatccttctttgcggcaatgcgggaggggatcagtcctgcgataaacgtgaggaacatgcttatcaacacaagcacgactgccgcgacgggcggaagcgccgccgatatgccggatattcccgagagagcgcggattatcgcgtttatcggtatcgtcaggagcacggtcacaaggattccgataactccggcggtgaatccgagaattacggcttcggcgttgaacacgcgggaaatatcgcgcttcgacgcaccgatcgaacgaaggataccgatttctttcgtgcgctcgagcaccgagatgtatgtgattattccgatcattatcgaggatacgacgagcgatattgcgacaaacgcaatcagcacatatgatatcgcatttattatggtcgttaccgacgacatcataagcgcaacgtaatcggtgtatgtgattttgtcgctttcgtttttaacggaggcgttgtatttatcgattatgtcggagatcgattcctttgcttcaaagcttatcgcatagatgttgatcgatgaaggggaatcttcgcgtacgattccgagcttcgatgcgttttccgcgtaagatgatttcgaatacttatccggcatgatgtccgcgtaaatcgaagcgagtgtatcgtcgccgcatccgtcaagatacacatcaagcgcggcggaaagttcgccttccgtcatttgggcgagtgaggcggaggtctgctcggcataggattttttgatttcttcgccgagagtcttctttatcatttcgtcaagctcttcgtcggacagccccttgaggtacgatgaaatttcatccgaggatacgcccgcctcctcgctgtagtatccgatcacagcctcttcgattgcggtgcggtcggggaatgatgccatgtactgcgcgatcatttcgtttacctgaacctcggacggcaccgacgctatttttacataggcagccgcgcgatcgctttccgaaagagatgcgagataatcccgaagctcggacgctttttcgctttcggtcaggttctcgttttccgttccgtccttgaagggaagtccggtgaaaacatcgacctccgagaaagcctttccgataacgctttccgaagaatacggattgttgtccgcactgatcttttcgtctgagctttgctgaacggcgatatccgatgaatttacgccgttcatgacatactccgtaagtgcccgcgtgtatccgacggaaccgctcatagcggtagcggtcgccgaatcgttcggacgtgcgataccggtgatcttcagagggattcctttttcgacggcatatgagaggtaagcttcgttttcgctcatgtccttccacgttccgtccggattcttttgatatttgtccgtgggcagtatcagcgtcagcttcatcgagcaaagctcttcgtatgtccagcttgtgtcctcgagagtgatctcttcgccgttcatgacggatttcatgatctcgtcgagctccgccgtatcacggagaccgagcgaatagagaaccatgtcgttcagctcattgtgcttgtcgatgaacagcattatttcgttgtaggcggagggccagcttccgtacacgacatcgtattggtcggtgataagcgtgtttattccgccgtcctcattcggcagcatctcctgccagacgtcgtatgaggatgtgctcgacatcatcgactgataatatgacgagaccgtcgagtctccgtatatcgcgtcgaataccgtgctcggattcacctgagtgatgctttcgccgtcagttctgtacacgggcagggtaagatcgtatccgtaggatatcgcggaaacgtaatccccgataccgcattcctccgattcgatgtattccttgaacggcttcaggttgtttttctttgcggacgacgacatcatcgagttcatcatgtcgtacatgatcgtgttttgataaactcttccgtcttcacgctcgggcgcatcgtcctcgctgtccttgccgctcagcgtttctatgagcgaggtcatgtcaacgctttccgacgcgatctgtatcggatatgacgaaagggtatccttctgaacgttgtctatgaatacctggattccgtttgaaagcgagagtataagcgcaatgccgattatgccgatgcttcccgcaaacgagatcatcagcgtccgcgccttctttgtcaaaagattgtttgtcgaaagcgaaagcgcggtcagcgcggacatcgaggtctttttgtacttgccctttgagcttttcttcttttttgccgccgtctcttcgggaagggaagcgctgtacggatttgtatcgtccacaatctcaccgtcgagaaggcgcaccgtccgcgtcgaataatgcgcggcaagctcgggattgtgcgttaccatgatgacgagcctgtcggacgcgatctcacggagcagatccattatctgaacgctcgtttcggaatcgagcgcgccggtcggctcgtcggcaagaagtatttccggatcgttcacaagtgcgcgcgctatcgccacacgctgcatctgcccgccggagagctgattcggttttttcttcatctccttcgcaagtccgaccttttcgagagcatgagccgcgcgttcacgccgttcggatttggatactccggagagggtcagcgcaagctcgacatttgaaagcacggactgatgcggtatcagattgtagctctggaatacaaagcctatcgagtggttgcggtagctgtcccaatcggcatcggagaaggatttcgtcgatcttcccgaaatgtagagatcgccgtccgtgtagcggtcaagtccgccgatgatgttgaggagcgttgtttttccgcagccggacggaccgaggatcgaaacaaattcgctctttctgaaatcgatcgatatgccccgcagtgcttcaacggcgctgtcgcctgcgaagtatgttttctttatttttctgagagaaagcatgtgacatcctttcttctttttgagatggatttatcctaccattctattgttaactgcatattaactgccgggtctgagtttgtaaaatcgccgagcgcgctttcccggagaaaatacgaaaaaagacggaggagggcatacggtgccgaagcgcggcgaaagtcggcgaaaataagaaatgctccggcatgatgccggagcacagcggttatttgagaagatcgagaatcttctttgaaccgtaaacgctttcccaatcgtgggagaaatcgtctactgcgtaaagcgtgagaggatgatatacaagtttttcgtaaagatcgggcgcgatcgtaacggcatgaccgccggcaagcgcaaccttgtgtacctgctctacggttttgaaacttgccgcaagaaccttggtctttatgttgttgtagttgaagatctgcacgatctcttctacaacgtgaacaccgtcggatacgatgttgtcgagacggttgatgtacggtgcaacgtaatcaacgccggcttttgccgcgatgagtgcctgctgttgggtgaagatcgcggtcatcgtgacctttatgccgatcttcttgagttccattgccgccttgagtccgtcgggggagatcgggatcttgatgtagaaatcgccgcctacggtctcctgaagagcctttgcctcctcaacgatgtccgctgcgtgatccgatgtcgtctggatgtggagcatcttgtcgggaccgattatggagcggatctcgcagatcagcttcttgaaatcggtatgctcgcgggagattatcgtggggttggtcgtaactccgtcgatgggatagaactcggcgcacttctttatggcgtcaagctgtgccgtgtcaataataaattccatttgaaagcctctttttgactgtaatatttcttagtgtacaatatgaaatgataccacaatgtgcggaatatgtcaatgaaacaaatcacaatattcgaccgaaaagtgcgcgggattttagcaggtttttaacgcccgagaataaaatcaagtccttcggcgatatgctccgcccaatacatccagttgtggtttccgggatgctcctcgtatctgaagtcaaatcccgcatcctttatgtgctcatgaaaatcgcggttctgcccgagcatgaagtcgcagtctccgcaggatatgaagatgcgcggcttttcgccctttatattgtcggtcagatagaaaagatcgtcctcgcttccggggagcgcgtttttgtagtcctcaccccagatgagcgtgaaatccctgtcccatgtgacatcttcggcgcttttggcgatgttgagaactccggaaagggagatcgcaccggagaaaacgtcgggatttttcagcgcgattttcagcgcgccgtatccgcccatcgacagccccgcggtgaaattcttttcgcgctttacggagagcgggaagagcgaacgcgccgatctcattacgtcgcagactatcgacgaatagtaggcatcgccgtatttcatatccgtgtagaagctgcgcgcaccgtcaggcattattaccgcgatgccgcgttcgttcgcgtaccgctcgatcggggtcattctttcccattgggtgtagtcgtccgacaacccgtgaagaagaagtacggtcggaatgtcgccgtcggaattctccggaacgacgatgttgtagcaaaacgatcttccgagtgaggcggagcctgtgtgacatgtgagaaaagccatgcttttaagtcctttcctgagccttttattatttctttatttttgataggagacggtcgagcgagagcccgtatttttcggcgatatcgcgtgcgtagctcttgccgtccggcatttttctgagtatgcggaacgagcgccggccgtcggttatctccgcaacgagattgtcgatcctgacgcctccctgcgggaggcagtccgcgttgatcttttcgaccgatgccgcaagatcgtggagatgcgtcgagaatattccgcggcatccgataaggctgagcgcggcaagcacttcggaggcgatatacgcgccttcaaacgatcccgtggaggaaagcgattcgtcgagaagcacgagactctgcccggtgatccggtcgaatatcgcattcagacgggagcattcttcgccgagacgtcctttttctatcgtgtcctcgctctcctgcgggaagtgcgtgaatattccgtcgcatgggctgagcgcggcggacttcgcggttatcggaagtccgagctgagccattgcaaatgcaagaccgacggcggcggttattaccgattttccgccgcggttgggtccggttatgacgaagagcataccgtcagaatcgaacgtgaaatcgttcggcacaagctcgtcctcgaccttcagcgcgactacgggattgacaagtccttcggcggagaagcgcttttcttcgttcggaagtatttcggggaagcagagcgggcagccgcgatccttcagctttccgataagctcggcggctttcgtcacgaattcgatctcggggatcatgcgtatcagaaagtccgtgttctcgagcacatacgagcgtatgaccttcttccaagagtttatgtttgatttgaaaacgtcaccgagcgcgttgttgaaagcgtaggtgagagcgagtttttcgttttccgtctgatccttcatgaacgggcggagcttggcgatcgcggtgcggtcgtccgagcggaaatcgagccgcagtatcctgtcgagcgcggcacccgatttgaacggttcgttgttgacggaaagcactcccgcactttcggggcgcagacgcgagtcgaggttgaccccgatcgtcacgcttttgatctcccttaccctcgaggaaagctcggaaagcttctcgttgagagagcggtagtagtcgctttcggtcagaatgtgtatgcgcttgcagaattccgccatagcagggctttttacggacttctcgaacggcagaagctcgtcgtggagaagagacagaagggaaatgtacagctcgacttcggtgatgctgtagaggtacccctcgttttccgaagaaagatcggagccgagccgcctgagctcggttatgtcggtgagaaacggcaccatacggcgaagcacggggcatattcccggattttcactgagatcgcggaatgtctcctgacggtatttcagcgtttcggcatcgtcggtgaagaaatcccctatgtcgcaggtcttgagatcgatcagaaaatcaagctcgagcgccgagacactctgacgcgacagcgcgtgaggggagacaagaccggactcgtccgcaagcacggattccggatatatcagactgatatcggaagcggaaagactgttttccattcgtttttcctttctcagaggggaatttcttttgtcgctccggggactctcagagaggtaaatcccgcacggcggagcatttcgtacccggtttcgatgtcggcgccgcagtcggaaacaagatgcgcatccgaaccgcacgaaacgagcgtaccgccgcagtcacggtagagcgcgagaagctcttcggtcggagaagtctcgtctccttttctcagaccggaggtgttaaactcgagcgcaacaccggattcggtcatgacgtgaaacagcttcctgtattctccgtaaaaatgcgaaagatcaagatcgcgcccgtcgcggtgaatatagcgcagaggatacgttatgtgggcgagcgcatccgcgccggggaaagcggcagcctgcgcaagctcgacgacataacgccgatagagtgattcgataagctcatccggcgcggcggaatagtttatgaatataaagtccggtgtcagacggatgttgtgtaccgaggcgatgacaaaaccgaaattttcatgctcgagaaaacgctttgcactttccgacctcagatggggctgcccgagctcgattccgcagacgatgtcgagatttcccgcgtatctttcgcgcagggcttcaagctcccgcctgcgcttccggagatcgacatcggcgtaatatccgtcctcgatcccgtcgatgtcgtagtgatccgttacggcgatcccctcgaatccgagacgcgcgtatccggcgcacatcagctctgccggggcatcgctgtcaaatgaatatgacgtgtgcagatgactgtcgaaaagacgcatgattacactatcattccgatcttttcatgctttacttcgtcggcaagtgcgattatctcggtgagcggacgcccctcctcgaacatcggaacaaagcgcattaccgtgcggcagaattcgtgctccgcatcgagtccgcaaagctcggagagcgtctttctctcgccttcggcattttcgctgttgtactcaaccagagcggcggcggctccgacacagatgaacacggggaagaatccctgaccgcatgcttgaaggaatgcgcccgtcagacggtcggatttcgcaagcttgcgcggtatatcgccgccgactctcgcgcaggtgtctccgagcgcggtgttgccgaagcggcggataagatcacccacatggtcggtcaccgggacgatatccgtgccgtattttttcgagagcgccgcagcgctgtcgtacattgcggactgagcacagaggcggatcgccggatcggcaatcgcggtgcagatgtattcatgcccgagatagtgcccgagataggcgcagatcgcgtgccccatgttgtggatgtaaagctttctttcaatgtagtaatgaaacggcgaaaacggaaccatgttttctatctcgggagcgtcaccgacgaatgcgtcgcggtcaacggggagaacgccgtattcctcaacggataccgcgaggatgttttccttccgcgcgtccgccttcggtacgggcaccatgcgtccgacggaggtctcgatgagaccgaccttcgacagctcgtccgagctgagttcaccctctaacagagaacggatatagctgtcggcatccatgagattttcgcatatcaggagattgagcggctttcccgattccgcgaatcttttcttcgcaccgcggacgaaattcgggattatgtattttatcgcctttgcgcccacgcaggtcgcggcgatgtcgcactccgcgatcgctgcggcagcggcttcggcatcgtttccgtttaccgcggaaatcttgtcaacggtgacctcgcgctttccttcgctcgaaacgatcgtgagaggatagcagtgatcggcgtttattttctctacaacactgtcggcgacatcgataaatgttacggaaagtcccgcgtttgaaaaaagcgcgccgataaagcctcttcctatgtttccggctccgaatataacagctttcattttttgtgaccgtacctttcccggatggggcgccgagtgccgatcgctgcagagcggagaagagcgcgcggcgccgtgaataattatttttattataccactaaaaaaataataggtcaagattgacgggaaacaaaaatgatgatatactttacggagacgggctttgcgttttttgtgagaaaaacgcgaaaagtgcggagttttcctgatgacgcggacggaataaagtacggaatacggagaagaatatggaatacgcaaatcttgaagaagtaaagtgtgcggcggaaaagtgccgtgcgtgtcctctctgcgagacaaaaacgaatacggtgttcggtatcggcaacgaaaatgcggaacttatgtttgtcggcgaagcgcccggcgaaaaggaggatctctcagggatcccgtttgtcggcgcggcgggaaaactcctcgataaatatctgtgcgcggtcgggatcgacagggagaacgtttatatagcgaacattctgaaatgccgtccgcctcataaccgcgatccgaagccggaagaggaagacgaatgcataggatttctgcgtgagcaggtaagactgatacagccgagggtcatagtgtgcctcggacggatttcggcaatgcgtctgataaagcccgatttcaggatcacgaaggaacacggaatcttctacaaaaaaggaaaatacacaatctgcgccgtgttccacccggcggcgctcctgcgcgatccgcgcaaacgcgaggatatgctcacggatatgaagaatataaaggcgcttctcgacggaaggacaggaacggaggaaactgcgcaatagcaaatgttcctgttgcaaaagcggcgggcgggtgttataatgaacgcagagcaaaaacggttataatgtgaagccgtaagaacggtacacatattcaagccgaggcaaaaaaatgttcaacgtttcagacgactgtcatgcgaacggaagcgcgcatgatataaaatacaaaaatacatatgaatttccggaggaaaagattttggctgaagaaaaaagaaacatgagaatcgcgtttgtcggagtcggcaacataagcgagatctatcttgagaacattacgaatatgttccgcgagatagaggtgatcggtgtctgcgatcttatccgcgagcgcgctgagaaggctgtcgaaaaatataacatccccaagctctacaacgatatgtacgagctttttgcggatgacgatgttgatatcgtgctcaacatcaccgaagcgtacaaccattacgcggtaacaaaggcggctctcgaggcgggaaagaacgtgtactccgaaaagccgcttgccacaacgcttgaacagggcaaggagctcgtccgcctcgcaaaggaaaagggcgttcgcctcggcggagcgcccgataccttcctcggcggaggaatccaaacctgccgccgcctcatcgaggacggatacatcggcgatgttttcggcggcagcatccacatgatctgccgcggccccgagggatggcatccggatccggaggcgttctatcagcccggagcgggtccgatgttcgatatggggccgtattacatgacggcgcttgcaaatcttctcggacgctgctcaaagatcaccggattctcgggacgcgcacataaggagagaataatcggcagcggaccgcgctacggtcagaagatcccggtcaacgtggatacgttcgtatgcggaacgatgctcttcgattccggcgcgatcgtggattcgcgtatctcgtttgacgtgtactgcttcacaagcgattacgcccatatcgagctttacggaaccgaaggcgttctctatgtgcccgatcccaacgcgttcaacggacagatcaagatagtccgcggaaacgagggcgttatgcgtgagcttccgacgatgtatccgtataaggataactgccgcggagtaggtcttgccgatatggcaaaggcgatacagaccggacgtgagcaccgatgtagcaacatgcagcagcttcacgttctcgagatgatggagagctttaccactgcatctcgtgaggaaagagttgttactctcgaaaccccctatgagcgcggaccgataatggacatccacggtatgcagggaatactcgactgataaaaatgatttcgttttgcggcaccgctcaaagcggtgccgcaaatattttatgaggcgacgagattcagaacacagcccgtatcggaaaggcgctctgccgcagacgagcgcggactgccgcctgccgtatgttttgcttgaaattccggcttcgccgtcgcgggagaacgcccgatatacgccgcactctgccgatgattgggtgcgggcactgcctatcggactttcgaaaccgggtcaactcaaccgtcgtgggagaacgcccgatatacgcttcactttaccgatgctcggatgcgggcactgcccgctgcccgctgcccgctgaacatatcgggaacttaccgcatataataatatgtaatatgcggtaagcttgtgaaaggagtatttcaatggcatgtactaccggtgagcttgaaagcaaagaggtcgtaaacgtgtgcgacggacgcaggttcggatgtataaccgatttcgaattggacccgtgcgacggtaagctgaaagctctttttgtctggaacggacgttcgatcttaggaaaaggcgaggatatccgtataccgtgggataagatcgtgaaaataggtgaggacacgatactcgtcgatatcggttcgtcgagagattccaaaccgaacgaatgcgaatgctgccctccgccgcctcctccgcctaagaagaggggcagaccgttcttttgaatgtaaacattttgtgaattgtcctgcggacattgcggcgcgcggctttatatgatataatgaatcccgtgtgcaaagcacatattatcacacacatacggcgcttgggaatgttcggttccgtttcggcggtaggcactccgctgccgtgtggtggaaaaaaccgaaggaggacataaaaatgtctatcgtatcaatcaaacagctcctggaagcaggcgtccatttcggacatcacacaagacgttggaatcctaagatggctgagtacatcttcacggagagaaacggcatctacatcatcgaccttcagaagacgatcaagaagttcgaagaggcgtacatgtttgcccgcgatattgcatccgatggcggcaccattcttttcgtaggaaccaagaagcaggcagccgacgctatccgcgaagaggctgagcgctgcggaatgtactatgtcaacgtacgttggctcggcggaatgctcaccaactacaagaccatcagaatgagcatcaaccgtctcgcaagccttgagaaaatgcaggaagacggcacctttgatatgcttcccaagaaggaagtcgcttctctccagaaggagatggcaaacctcgagagaaacctcggcggtatcaagaacatggatcgcctcccgtccgcaattttcatcgttgatccccgcaaggagcacaacgccgttcttgaagcgaagaagctcggcatcccggtaatcgctatcgttgacaccaactgcgatcccgacgatgcagattacgttatccccggaaacgatgacgctatccgcgccatccgcctcatctcctccgttatcgcaaacgcggttatcgagggacatcagggcgagcagatgaacgaggctgaggctgtcgaagagaaggccgaggctgaggctgccgaggatgcggagaacgcagaagcgtaagttttcatatttcaaaatcaaagaaaaggaacggtaaatataaatggctgcaattactgcaaaaatggtatccgatctccgcgccaagaccggctgcggcatgatggagtgcaagaaggctctcaccgaggcgggcggagatttcgacgaggctgtaaaggttcttcgtgagaagggactttccgtagctgcaaagaaggctgaccgtatcgcatccgaaggtattgtcgatatccttctttccgatgacaaacacaccgccgcaatgatcgaggtcaacgcggagaccgactttgttgcaaagaacgacactttcaaggagttcgtaaagggtgttctcgcgactattctccgcgacaagcccgcagatattgaagctcttcttgctctcaagtatcttgacaccgacttcaccgttgaaggcaagctcaaggatatgatcttcaccatcggtgagaacatgaacatccgccgcttcattatcgtcgagggcgtgctcagcacctacatccacggtcacggctccaccggcgttatcatcaagtttgacgctgacgaggcttgcgagaagaaccccggattcgaggcatttgccaagaatatcgcgcttcaggttgccgctatgcccgtgctttacctcaacaaggaatctgttcctcaggctgatatcgacgccgagaaagaagttcttgccgctcagatcaaaaatgacgagaagaacgcaaacaagccccagcagatcatcgagaagatggtttccggaaagatcggaaagttctacgaaaagaattgccttaccgagcaggcttacgtcaaggacgattccgtgtctgtaggtcagtatgtagagaataccgcgaaggaattcggcggcaagatcgctcttgcgggattctggtgctatgagcgcggcgagggtcttcagaaaaaagaggataacttcggcgaagagatcgcaagcatgctcaaataaatccgaatatataaaaaagagacgccctcgggcgtctcttttcttactgtaaagccaccgcggattcggcggatttccccgtgcttggattagggccaaaatcggataaaacggcgtaggattcggctattgcaaaccggatatctgccaggcatcgccgactgatcgcactttacataaaaagccatccgccgaagcggacggctcggaatttttacggcaaactcggcttgtgcgaatttgcggagtcggcaagtcagatcgaccgaacgcatgctgaatggcgaccaacgcgcagcgctgacatttcgcacgccctgccgctcagaatacgaattcgagcggaagcccgtttgcgaattttatgtcaggctctccgcagatcagcggtgcaagatagtgaatgcattcgtcggtcacgaaattcccgcgctcgtttatgaaatcgcgcggaacggaacgcacctgatttgctatttcatgtacatccttgggctcgtaggtgacggaatagctgttgccgtctttgcggacgatcgacatcattattccgcttcttccgccggtcgcggctctgacgcctgcggtgccgacagacttgctttcctcgatatcggtaagtgacgcgatgtgcgcggcgcaccgctgacttatgttcagctccaccgagcgaaccttgcagccgatcttatccttcacgataagttcgagagtcttcgatgttccggtgagcgccttgtgcccgaacacgtcgagcgacgcatcgcggctgagctcacagacgtatttgccgtcggcgagccgtattccctccgataccgcaacgacaacattcggcttcttcgaaagctcttcctgcacatccgaaagaaaatcctcgacggagaaggagacttcgggcagatagatcagatcgggagcggcgcttccgtaaagcttcggaattcccgcggaggcggtgagccatccggcatcgcgtcccatgatctcaactacggttacggcgggaaccgtgtacactgcgcagtcaaggcatatttcctgaagagttgcggcaacgtactttgcggcagagccgaatcccggcgtgtgatctgtcgcacagagatcgttgtctatcgtcttcggaattccgacgactctcatttcgtatccgcagccggagacatattcgccgagctttgacacggtgtccatcgaatcgtttccgccgatatagaagaagtaacgtatgttattttcacggaaaagctcggtgagattcttgaaaaagtcgggatcggacatcggatcgggcagcttctttcgacagcttccgagggcggctgcgggggtctgcgcgagaagcgcgagcgcgtcctcgtcgatccttccgccttttataaaacgctcggacagatcgaccgtgcgtccgttcagaaatccttcgatcccgtttctcattccgtacagcttcgttatacatccgccgccgagttcttcctcgagagcggcttgaacggcgccggcgagggtcgcgttgatggcggcggtgggaccgccagattgcccgatgagggcggcgcctgtcagtttgttcattatatacctccggagacataattattttctcaataatggtaacatatctgccgcgatatgtcaattgtaaataattaaataactttggcaaaaagccttgtaagttatgcgaaaatggtataaaatactgacttgagaggtaaaactctccgaattgtgttccaaataaaatttaatatatcacggaggaaattatgtcagtaaaagttgccattaacggattcggccgtatcggtcgccttgctttccgccagatgttcggcgcggagggatatgaagtagttgccatcaacgaccttaccgatcccgctatgcttgctcaccttcttaagtacgataccgcacagggcggttactgcggaaagatcggcgagcattctcataccgttgaggcgggcgagggatacatcgtcgtagacggcaagaagattaccatttacagcgagaagaacgcagcggatcttccttggggtgagattggtgtagacgtagttctcgagtgcaccggcttctactgctccaaggagaagtctcaggctcacatcgacgcaggcgcaaagaaggtcgttatctccgctcccgcaggaaacgatcttaagaccatcgtttacagcgtaaacgagaagacccttaccgcagacgataagatcatctccgctgcatcctgcaccaccaactgccttgctcccatggctgatactcttaacaagtatgctcccattcagagcggtatcatgtccaccattcacgcttacaccggcgaccagatgatcctcgacggtcctcacagaaagggcgacctccgccgtgcacgcgcaggcgctgcaaacatcgttccgaactccaccggcgctgcaaaggctatcggacttgttatccccgagctcaacggcaagcttatcggctccgctcagcgtgttcccgttccgaccggctccactactatccttactgctgttgtcaagggcaaggacgttaccaaggaaggcatcaacgccgcaatgaaggctgctgcttccgagtccttcggctacaacgacgagcccatcgtttcctctgatgttatcggtatgcgttacggctctctcttcgatgcaactcagaccatggttgcaaagatcgacgacgatacctatcaggttcaggttgtttcttggtatgacaacgagaactcctacaccagccagatggttcgtactatcaagtatttcgcagagcttgcataaatttgcgcaatatgaagcggacggcatttgccgtccgctttttgcgtccggggcgcctccggcacggcgtatgccctgcgcaaaaaacgataaaaatgtataagcggcattgacaaatacaaacggttatgataaaatatatccaaacaggcagcgccgaaaagaaaggacatttccctgaatggataccaaaagaaatttaagatatttcacagcaccgctgatctctccgtacacggttatcggtcttgtcgtcgcaattgcgggatttgtagtatgccgtctctttatgagcgagatacagtgggtagcttttatcggacttgttgttatggtcatcggtatatgcattatcgtttacggcatgggaagaaaatccaaaccggcagaccttgatttccagatttacgaaaaggtcaaatacctcgatgagactgcgcagaagcgtcatgaggtttacgagtctcatttcagccgtatcattcgacccgttcatcttaaaggatacgattatctgaccgaaggcattatattcaaaaagggaaccgataataaaaaccgtaccaatgtatataatgcggcggtgctttacttcaccgacgatactatgtatgtctacggcaagcatttttcgctgaccgacgatcttttcgataaggaaatcgtcggcaaatataagcttaccgatctcgatcatgccgagatagttgacgatgtgttcgtgtatacccgtgacgagaagtatacttacagggtgaatatccattccttccgcgtggttgccaacgacggcaaggacgcggtcatgatgagcgttgattacggtgcggatatggatactgcatgcgagcagatcaaccgcgttattcaggttgcgaaagagcgcgcgaacgcttgacattttattcgaaaaaagccatggcttatcgccatggcttttttgctgtcatgaggaagatcttttgcacgcttgaaattgcggcgattgtgcaaggacggaagaaagaatgcggtgcttttgatacggaagcgcgtgctgcgaaagaaaacgtatcgctgcgagccgctcggacgcttgtgcggcagggctaaattcggggatagggactctctcacaaactgtgcattgaccgtttttgcattcaaaacgaaaaagttgaaaaatccgaaaaaagataaaaaagattgaaaaaaggtgttgacaagggagagagga

SEQ ID NO: 1644 - DNA, 5879 bp, Unknown
  16S sequences of unknown bacteria
tatccgccgggtgtcaaccggcgtccggcggtgtttcatatccaggttataaaccgcatcgcggttttgacacaataataaatctcaaccaattttaaggaggatttgtaaaatggcaaaggctaaattcgaaagaaccaaaccccacgttaatatcggtaccatcggtcacgtcgaccacggcaagaccacccttaccgctgctatcaccaaggttctcgctctccagaacggcaagaacgagttcctcgcatacgatcagatcgacaacgcgcccgaggagaaggcacgtggtatcacaatcaacacccgtcacgttgagtacgagaccgctaagcgtcactacgctcacgtcgactgccccggccacgccgactatgtcaagaacatgatcaccgacccgcgagcacgttctgctcgcccgtcaggtcggcgttccggctatcgttgttttcatgaacaagtgcgatatcgtcgacgaccctgagcttctcgacctcgtcgagatggagatccgtgacctcctcaacgagtacaacttcccgggcgatgatactcctatcatccgcggctccgctcgtgaggctcttctctccacttccaccgacatcaacgctcctgagtacgctcctatcatcgaactcatgaacaccgttgatgagtacattccgactcctgagagaaacgataaccttccgttccttatgcctgtcgaggacgtcttctcgatctccggccgtggtactgttgctaccggtcgtgtcgagcgcggcgttatcaagatgaacgaggaagtcgagatcatcggtctcaccaccgagagaaagaagactgtcgttaccggtatcgagatgttccacaagctcctcgatatggctgaggcaggcgataacatcggtgccctccttcgtggtatccagaagaacgaagttgagcgcggccaggttctctgcaagcccggttccgttcatccgcacaccaagttcgtcgctcaggtctatgtcctgaccgaaaaagagggcggtcgtcagaagccgttcttctccggctatcgtcctcagttctacttcagaaccaccgacgttaccggcgtcatcaagcttcccgagggcgttgaaatgtgcaagcctggcgataacgttgagatgaccgttgagctcatcactcctatcgcaatcgagaagggtctccgcctcgctatccgtgagggcggccgtaccgttggttccggcgtcgtttccgagatcatcgaataattaaacgatcagtgtttttcacggggaaggtcttcccttccctgtgatcccacttcggctatgggtctatcccacagcttatcttcggggtttggtgaaattccataccggcggtgagtgacttttgtcacacagtccgcgaccctgccaaaagcaggctgaacaggtgagaatcctgtaccgacggtaaagtccggatgagagaagatagctattaccgatgaactttccgatattttcggttttgttctgagatattagtcgccccgaatgttcttcattcggggcttttttatcttctccttgtattttgtaaaggagaattatcatgacaaataatcaggtaaaggcaaacaacagcagaaaaacgataaattacgtggtcaagatcgctatactcgcagcgctttcagcggtcatcatgctgcttgagttcccgcttccgttcgcgccggggttctataagctcgacctctctgaggcggtcatacttatgggcggattcgctatggggcctgtcgcggcagcagtcattgagcttatcaagaatctgatcaacatacttctcaacggaacgaccactgcattcgtcggtgagttcgcgaattttctcactggctgcgcgctcgttgtgccggcatcgctcatctataaataccacaagacgctgaagggtgcgatagtttcgctcgccgtcggaactttctcgctcgtcattatcggaagtacgttcaactatttcgtgctgatcccagcgttctcgtctatgtatcatataccgctcgatgagatcgtctcgatgggaagcaagctgaatccactcgtctctgaccttaaaacgctcgtcgtgttcgcggtcgcaccgttcaatatcgtcaagggcgtgctctgctcgctgatcaatcttctgctctataagagggtctcgaagattcttcacatctgatgtttcgcgtcggcgaacctgatgttacataaatgataacacgcccggaaatagatttacaaaaggtaaattttgacttccgggcgcgttttctattgaaattacgggaataatgtgatataatgattatgtaaaaaatcctgaggggtagatcatgaacatttttgtcaaatatctcatcgtctttttcgtgtcgatggtcccgctcatcgagctgaggggcgctgttccgataggcaccgggctcggactgccgtggcatctgactcttatcgtcgctatcatcggaaattgtgttccgataccgataatcctgctcttcgtcaaaaaggtgctgacatggatgcgcgggtgcaggatcgggctgttccggaaaatttcgaactggctgcatgagaaggcggaaaagaaacgcgtcaagatcgataaatacgccgcgtgggggcttttcgtgttcgtcgcgataccgcttccgggtacaggcgcgtggacaggtgcgctcgtcgcttcactgttcgatatgccgaagaagaaggcgatgctgtcgatattcgctggtgtcgtttcggctggactcatcatgacattcgggtcgcagctcgtcaaattaattgtaaatctattttgaagtctattgacaaagcgcgatttttgtgctataatgtctatgttataaatatcttatcaagagtggcggagggactggccctgtgaagcccggcaacctgtctgatttgtcagataaggtgccaaatcctgagagatgagagcaataggcttttccctcgggatgaccggggattctccggtgcctgccggggattttttttgccgtcccgagcctcgatataaagataacaaagaaaggaaattcaaatgtccaagtacttattcacttccgaatccgtgaccgaaggtcatccggacaagatctgcgaccaggtctccgacgcgatcctcgacgctatgcttgagcaggatccgatgtcccgcgtcgcctgcgagacgaccaccacgaccggtatcgtttcggtcatgggtgagataaccaccaaggcgaacgtcgatatccacaaaatcatccgcgagaccgtccgcgagatcggatatgaccgcgcgaagtacggcttcgactgcgacacctgcgcgatcgtcaacatgatccacggtcagtcccccgacatcgctctcggcgtcgacaaatcgctcgaggcgaaagccggagagatcaccgatgaattcgacaccggcgcgggcgaccagggtctgatgttcggtttcgcgtgcgatgagacgccggagctcatgccgcttccgatctcccttgcgcacaagctcgcaatgcgtctcaccgaagtccgaaaaaacggaactctttcatacctgagacccgacggaaagacacaggtcaccgttgagtacgacaccgacgccgacggaatcaaccgcccgaagcgcatcgacaccatcgtcgtttcaagccagcatgacgctgacgtttcgctcgagaacatccgcgagggcattatagaaaacgtgatcaaaccgatcatccccgctgaacttatggacaaggacacgaagatattcgtgaacccgaccggacgtttcgtcgtcggcggtccgcacggcgactccggtctcaccggacgcaagatcatcgtcgacacatacggcggatattcgcgtcacggcggcggagcgttctccggaaaggacccgacgaaggtcgaccgttccgcgtcctacgccgcgcgctacatcgcgaagaacatcgtcgcggcagggctcgcgtccaagtgcgaggttcagatcgcctacgctatcggcgtcgcaaagcctgtctccgtcatggtcgacacgttcggaaccggaaagatcgacgacgacaagatcgcggagaaagtctgcgagctcgtcgacctccgcccggcggcgatcatcgaccgattcaagctccgccgcccgatctacaggaagctcgcggcatacggacatatgggtcgtgaggacctcaaggctccgtgggagaatcttgacatcgttccggaacttgctgaactcctgaagtaaatgctttggctgccgcaatttctcgcggcagcctttttctgttgattttacgaattagttacatcttttttcaaaaagcccttgacaaacggaagaaaacgtggtataatatatgggtactgagtacgagccattagctcagcaggcagagcatttgacttttaatcaaagggtctggagttcgaatctccaatggctcaccagtactacagctgacgtgttaaaccatgtcagcttttccttttttcaaaaacacgaccgccggtatcatatcacggtcaatttttccttccgtataacttgtcgcgcttatatcgcgatgtactttccttcgacatacagaacaccgtatgccgaagggctttggggtctcggcagagcgccttttgagatcagttcctcgaccacgtacccgacgagcgtgtttgcctcgcagccgacccattggtctgtttgccccgagagccgcttcggaacgaaaccggaaaagctgtccctgatcctcgtcagcatatccgcaaacaccatgtcaaggctgtcgtcactatcaaatttcctcacgagctgtccgaactcctccgccgtgaagcgcgggaaatcaaacatcttctccctgcctttccgcagaagtccgacgcggacaagctccgctgcgtcatcgtcgccaagcatttttgccgcggtcgcctcatccgccgcgccgcgcgggatatttttcctcgcgagccttcttgtgccgttatagacatcactgtcaaagtactccgcgatgccgagataatagatatttccaccatcgagccctgagcggttgcagtaataaaagtgcctgtcagcgccgtcccctgagtcctccgactcctgtactatataccagccgtatccgctgtccttccgcaccgggacagcgcctccgtgcatatcgccgcgcgccctccggagcttttcacgcagagccgcctgtaccgcgatgtatccgatctttcccgcgtcgccgccagaactaacataacgggtctgctctatcagtccacgcgacacctcaagcgtccgcgcgaacctgtccgcggtctccgcgacgagcggcattatcgaccgcgcaatgacatcacggtcgcgcagtctcaggactataaaatccgtcgcgtaacggttcccgatcttcgagatcgcatcgccgtatatcagccgcggaagctcgtcctctatgtagattgtcggaagcccggtcttcatgctgatctcttcaatactcagcggctcctcatagcaggcggcgcagatcgccctcgccgtctgcgtcgaaagatacgcattcacgtcgaagctgccgctgcaggtcgttgtctcccagttgactcttttgtagatcttgtccatgtcttgcccatccatcctttcacgaatccgctcgcgggcgacattcagccgccacttgaccgtcgtctcagtaagcgaataccgctccgcgagctgctttactgacataccgccgagataataatcaacggtaatatcacgataaccggaggaaagcgtatgtaaggcacggaaaacttcttccgccccctcgtcttccgtctcgcagacaggttccgcggcgt

SEQ ID NO: 1645 - DNA, 17635 bp, Unknown
  16S sequences of unknown bacteria
atgtttattatttctcgatttctatggcatctgttctgtaaatgaacttgacctgaccgctcatgtcgtcggaaagaccggagaacgatctgtaatctttcgaaacatcgacagtcgccttaactctcgtcagcaggcttccgaggtcgccgtcaaccgcatcgacgagtttctgcacgccctgttcgttgaactgtttaagtccgtcggagagggtgagcgcgccgtctctcaactgcgttacgccgtccgtcaaagcgggagaaccgtttttgagttggaatatgccgtcatagagttcgcacatacctgcgtaaagcgtctttgctcctccgctcaatgtatctgcgccgacgctgagtttcagcgagccgtcctttgcttcgccgacacctgcggtgtagtccgcaagacccgtgtagaactcattgtaactgtcaagctgttctttcaatgcgctgacgcttgccgcaccggatttcgctttttcaagcgcctcggttatctgcgcctgcacttctgcggagttcattgccttttctatctgatcttcaaccgctttttcggtggatgcgtttatctgtgcccgcgcttcgtcggaagcaagatatttttcaacgtctgcggatatagccgcctgaatttcttcgctgttcagttttgcctgaacgccgctttcaagtgcgttttgctgttccacggttatgtagcccgcttcaacggctttattgtagtccgcaacggacatcttgaaattctgctgtattgcggctgcttttatgcttgcgtaatagccctgcgtgtatttttcggtcgcgccctttttgtattcggcaacaactgcggctttgatggtgtctttttgttcgtttactttctccgtaactttcgcaagagccacggcatttgcctgtgccgaaacattttcggggtcgagctgtttgattataccgttaagaacctcggcataattgtcaatggtcaatgtgggaacatcaagccccgcttttgtgagttcggtctgcgccgtcgaaagcagggtctcgaaaactttctttgcgcccgcattcagttccgcgctgtgggaatcaagttccgtcagaccgcttgcgaggtctttcgctccgtttgcaaggtcagacgcaccgttgctcaaatcgtttgctcccgcacggagctgttccgcacccgccgcaagtttgtaaatgcccgcaataagttcgcccgatttgtcaagcagcgtgcaaagaccgtcataaagtgcggaggaaccgtccgtcaactgtgtcatagcgtccgtaaggcttccgagcgccgatgtcaggtcgtctgcggagtcaagtccgtccgtgtctatcttgttgaatatttcgttggtcgctattgtgaccgtgttcatcatttcaaagttcttgacgtttgccgtgatttcaacataagagggaatctcaaaatcactctttgaaatcgcgaggttttcctgcaagccggggaacgcaatgccgagcacggcggtgcggtctccgtcatttatcattttgccgttggaaacttcaacgtcggtgaaaacgtcgttgtcaagcagtatgcccgtcagcattgcaaaaggaacgtatatcttttcgtttttgccgtcaatcgttacggtctggtactgattgtttttgtaatcgaaacgtatcgtaacttttccgctcttgcccgcaagttcgtcagcagaaacggtcttgccgtccaatttgtaggaaacggagaggcttacgggcagttccttgtctatgctgcctttgcagtaaatgtcgttgccctgtgcgtcccaaacgcgcattccgtcgggattcattgtataactttcgtcgcccttgacgttttcaacgtctttgagttcgccgctgtcggttattgtcgaactgccgagtgcatttttaatccagtcgctgacgataacctttttaacgctgccgtccgcgcccgtcagaacgtaaacggtctcgtcttttgaaactttcgcgtcgtcctctttttcaatcagcgagattttgtttttcggctcatctttcgcttcgtcgcccgaattcatcgcatagatcgctcccgcgcctccgagcagaagcgcgccgctcaaaacgagcgcaagcggttttttgaatatatttctcatcgttattttacctccgtttttgcttttttgccgatgtgagtcattccgagcgttgttttgcatacgattttgtcgcatagcataagcagcgcgggaagaatgaatattacgcagaccatacttacaacggctcctcttgccataagcatacacatcgaactgataatgtcaatgtcggaatagaccgcaacgccgaatgttgccgcaaacagtcccatgcccgaaacgagtatggacgggatagaggtcgcaagcgctgttgtaacgctctttctcttgtcgttgccgagaagtctttcggacttgtaacgcgttgtcataagtatcgcatagtcaaccgttgcgccgagctggatagtacttatgcagataggcgcgatgaacggcagcgactgaccgagatagtggggaagtccgaggtttatgaatatcgcaagttcgatgaccgctataagaatgaacggcagcgaaatgctcttttcaacaagggcgatgatgacgaatatagccacgatggaaacggcgttgacaactttgaagtctctgtccgttgtttctatcatgtctttcatgcagggcgcttcgcctatcagcattcctttttgatcgtactttttaagcacggcgttaagttcgtctatctgggtgtttacgttgtcggacgcaactttgtattcggagttgataagcagaagttcccacttgtcgctcttcaaaatgccctttatgctgtcgggaatgacttcttccggcactctcgaacctataaccgattcaagaccgagaacatatttgacgccgtcaacctcttccatttctttcatcatatttttaacggatttttggtcgaggtttgcgtcaacaagaaccatgtgcgtggaagcgatattgaagtcgtcggaaagtttcgagttcgctataacgtattcgatatcgtcaggcaggcattgtcccatatcgtagtaaacttcattgttggttttgctgtaaccgtaataagcaggcggaatgagaaccgcgaatataataaggaatacggggaatatttttgttaacttgcccgcaaactttgtcatatcgggaagcagagatttatgctttgtcttttgcagaggggtatcaagaacaagtatcagcgctggcagaaccgttacacagccgataacgccgaagataacgccctttgccataactatgccgaggtctctgccgagggtgaacgtcataaagcagagcgccgcaaagcccgcaaccgttgttatagaacttccgacaaccgatgtcagcgtttcttttattgcaaccgccatcgcttctttgtggtcgtcacagcgttcccgttgttcgttgtaactgtgccagaggaagattgaatagtccatcgttacggcaagttgcagaacagccgaaagcgcttttgttatgtaggagatctcgccgaagaagtagttcgttccgaggttcagaagaatcatcatgcctatcgaggcaaggaatacaaacggaacgagccagccgtcgagaaatataagcatcgcaaccgttgcgcacagaaccgcaagtccgacgtagaggggctcttcctgttcgcagaggtctttcaagtccgttacaagcgcagacataccggaaacaaagcattgtttgcccgctatggaacgtatttctcttatagcgtccattgtcacgtcttcggacgtcgcgctgtcaaagaatacggcaaccatggttgcgttgtcggtgttgaattcattgtatattttatcgggaatcaattctttcggaatcgaaatgtccgccaaagtcgaataccatataacggaatcgacgtgatcgacttcttttatcttgtcacaaagtgccgcaacgtctttgtctttcatatcttcaacgatgatgaaagagaacgcgcctttgccgaagtcttctttcatttcgttctgtcccactaccgtatccatatcggagggaagatagtcgagcatatcatagtttattctcgttcctatcattccgagcaccgacggcaccataagcagaacggcgattatcagaattggtatgcggtattttacgactgctcttgaaaaacgcatagaatgttaatcctttctctcttcgtaatcaatttcaataacatcgggtttttgattttttactatctttaccgccgtgatgaccgtgctgatgttgagaatgccttcaaacaaaagtgttatgccgagcattatcatcagaaaattcgttccctcaccgggtctgaacatcaatgcaagtccgcatattcccgtcagaacggcaaacgctaaaatcagccaccattttgtaagaccgaaccgctttgaatctatcgctatctgaatcttgaaaagactgtcggacaaaatgtaaatgccgagcgttacgcagataaacgtcatcaacgcggtcgggtttgtgagcattataacgccgagcgctatcagaagaaatccgagcgggagatcatattggaaagccaatctgtaaaggtctctcgaaaaataacccgcaatgcggactgttccgaacaatataagaagtattccgcagattatgccgagcgcttttgccgaaaaacccggaactgcgataagaattgttccgagaacgcaaagcgctaccgatataataatgtaacctatcttggctgctctcatgggtgctaccgaacgtggactcataagaacgcctcctttctgtttacaaggcaaattcggatttgtatgtttttatccctgtttgctgcccgtggatttttaacatccgcctgttgccccgatttctttttacgcaagtattatatcacggctttttgcgtttgaaaacggacaattattaccgattgcccaaaaatcagacactcgcaaaaaattgtccgaaaatcagacactttgccctgtttgcccaaaaatcagacagtttttatcggttgtccgaaaatcagacaaaagcgcataatttgtccattgtaagaactttgcctttctgttataatcaaacggaaataaacgaaaaggcgttttgccgaaaggagttgagcctttggataaaaagaaaaaggtggaccaaacggttcgtcgggaaacattgtatattaccgcggtcgtcctgattttgagtatgctcatgcaggctgttttcctaattataaggcaatgggattacacggtcctgctcggaaacctgctcggaggcggcgttgcggtgctgaatttcttccttatgggattgaccgttcagaaagcgacgtcggaggacgagaaacgggcaaaaaccgttatgcacacttcacaggtcgccagaacgtttgcaatgttcggcgttgccgttctcggagcgctgcttgactgcttcaatattgctgcggtactcattccgctgttcttcccgagcatttccgttctgcttcgtcctctcttctctaaaagaaaggcggcggaaaaatgaatgaagtcgctttgaaaaacacggcggcggaaaaaaagaaacgtgaactcggagctgcggatatcgtgttccttgttctgtgcgttcttccgataatcgcgatgatagtgcttaaagtgctgttcacaccgcagacggatggcgtaaacattgcgggagctctgatatattttaccgtgcccatgccgttcggcacaaaacttccgataacggaatcgcaggtcaactcatggcttgttattctgtcgatattctggctgtgtaaatttctgacgcacggtatgaccgttcgcggaaaaggtgtccgacagatatttgccgagttcatcgttgagaaaacggaaaaaatggttcacgccgatatggacgcgtatttcaacggttttgcgccgtttatcgccgcgataatggcgctgtctgcgttttcgagtttgctttcgctgttcggactttacgctccgacttcggatctgaacgtcgttgcgggttgggcggttctcgtcttttgtctgataacctattataaatgcaagtgcggacctctgcaatatttgaagagttttgcgcagcccgcgccgcttctgacgccgctgaacatcatcagcgagtttgcaacgcccgtttcgatggcattccgtcattacggcaacgtgctttcgggttccgtcatatcggtgcttgtcgccgcagggctttcgggactgtcaaaactcgtgctcggttggctgcccggtgcgctcggagaaattccgttcttgcagataggtattcccgctgtcctgtccgtttattttgacgtattcagcggtcttttgcaggcgttcatatttgccatgctgacaatgctctatatctccggaggattccctgcggaactctattacaaacgaaaagaaaaacacaaaaaacaatctgtaaacaattaacggaggaataaaaaaatgttggaacttgccattggtatcattctcggttgctgcgcgctcggcgcgggtgttgcgatgattgccggtatcggccccggtatcggcgaaggtaatgcggttgcaaaagcctgcgaagccataggacgtcagcccgaatgcaaaggcgacgtgaccagcaccatgcttatgggctgtgccgttgccgaaacaacaggtctttatgcgcttgtcatcgccattcttcttatttttgtcgcgcccggcagacttgttgaacttcttaccacgacgctcggttaaaaggggataatgttatgcaaagtcttgatgtcatatccgtcaatatctggcagatactgatttcgctgtgcaacctcgtaatactgtttcttatccttaaaaagtttcttttcaaacccgttcaaaaggtcacgcagacccgccgcgcggagcttgacgatatctattccgaagcaaaagcggcgcagacccgtgcagatatgaacgaaaaagaatggtccgaaaaacttgccgcagtcaaagcggaaagcgacacaataatcaaaaacgcgaacgagcgtgccgcccgtcgcggagaggaaatagtttccgatgcgagggaaaaagccgacggcattgtgcgggaagcgcagacgcaggcggatcttgaacataagaaggcgcaggcgcaaataaagaaagaaattgcggacgtttcatctgcgatttccgaaaaagttctcggcagagagataagcgaagccgatcaccgtgacctgatagaacgcgccatcgccgaaatgggtgaaaacaatgactgaactcggaaaagaatatgcgtcggcgctttttgaacttgcccgtgaaaattcgtgcgaaaaagaattttccgacgccctcggtcttattgaacgtcagtttgaggctcagccgcagtatgcggaactgctttcgtctcccgatatttcgataggcgagagaagaaaactgcttgaagccgctttttgcggaaaagttcccgaatatgtgatgtcttttactgaactgctctgcgaaaacggacgcataaaactgttcggagagtgcgtttccgaatacgaaaaaatgtatcgtgccgtcagccttgtttcaacggcaaaggtcacaagcgccgttgaacttacggcggaagaaaaacaaaaacttaccgaaaaactcgaaaaactctgcggtcacggtgttgttgcggagtatgaaacggataaaaacgtcatcggaggtcttgttgtccgcatggacgatattctgatagacggcagcgtcgaaacaaaactcaaacagataaaggaagtgattgaaaaatgagttcgaacaccgaagaaataagcagcataataaaagaacaaataaaagcatatcgctcccgaaccgagatgaccgaaacaggaaccgttatccgcgtcggagacggcattgcccgcgtttacggcatacgaaactgcatggcaaacgaactgctcgaatttgaggacggaagcgtcggtatggcgcagaacctcgaggacgagaccgtgtccgttgccgtgcttgcaaacgaaaacgatattcgcgaaggctcgcaggtcaaaagaacaggcagagttctttccgttcccgtcggcgaaggaatgctcggcagagttgtaaacgcgctcggcgaacccattgacggaaaaggtcccatacaaacatcggaaacacgtccaattgaggcggaagcgcccggaataatcgaaagaaaaagcgtttccgtgcccctgcaaacaggtatcaaggcgatcgactgcatgatcccgataggcagaggtcagcgtgaacttatcataggcgaccgtcagaccggaaaaacggagatagcgatagataccattataaatcagaaaaacagcgacgtgctctgcatttacgtcgcaatagggcagaagagcacttccgttgttcaacttgtaaacgaactgacccgtgcgggggcgatggagtataccatcgttgtttccgcttccgcttccgagagcgcgccgcttcaatacattgcaccctatgcgggctgtgccatggctgaatatttcagacagcagggcaaagatgttcttgttgtttatgacgacctgtcaaaacacgccgttgcataccgtgcgctttctttgcttatcagacgtcctccgggacgtgaagcataccccggcgatgtgttctatctgcattcccgtcttcttgaaagagcggcttgcgtcgctcccgaatacggcggcggttcgataaccgcacttcccataatcgaaacgcaggcgggcgatgtttccgcatatatacccacaaacgttatttccataacggacggtcagatcttcctggaaacggaactcttccattcgggaataatgcccgccatcaaccccggtatctcggtcagccgtgtcggcggttcggcacagttgaaagccgtcaaaaaggtttcgggtgcactgaaacttctgtattcgcagtatcgcgaacttcgttctttcgcccaattcggcagcgaccttgacgcagatacaaaatcccgccttgcactcggcgaacgtattgttgaggttctgaaacaaaaacgcaattctcccgtttccccgggctgtcaggtctgcatagtatatgccgtgacgaacgggtacctgaataatgttcccgttgaaaaagtcggcgaatacgaacagcggctttacgaaaaaatgcgttccgaacattccgaattgcttgcgcgtttcgaggcggggtattttgatgaatccgacgttgaggaactgaaaaaggcactttcggaaatggagtgatgttatggctaccgatatgagaagcctgcgcacgcgaatcaagagtatcgactcgaccatgcacctgacaaaggcgatggggcttgtcgcttcctcaaagttgcgccgtgcgaccgaaaacgctcaaaaaagtgaagaatacgcctcggcccttgccgctgtgacagaggaacttctttcgtgccccgaatgttcgaaaagcccgtatctgcgagtttcggaaacggacagaacgagacttatcgtaatagcgggcgacaggggacttgcgggcggatacaacgcaaatattttccgtcttgtccgcaattatcccgacgccgaaataattcctgtcggaaaacgcgcctgcgaccgatacgagaaagacaaactctttgccgaaacgtttacggcggcggacgcacacgcgcttgcaaaaaaactgtgcgcggattttgtaaacggcgattacgatattttgggcattgtcggcacacattacgtttcggttctcaaacaggaaccgtacgtcaactttgtattcccgcttacaaagagcaaaaacaaaaaaaatccgtccgcgatattcgaaccggatgaaagtacgatacttgaaacggctatccccgaatatgttgcgggacttataacctcggcagttcgagagggctttctttgcgaacttgcctcccgccgtatggcgatggacaatgcggacaagaacgccgaagcgatgatagaagacctgcgcttgaagtataatcgcgcaagacagggcgctatcacacaggaaataaccgagatagtcgcgggcagcgacgcttgaaaggagagataaaagtggcacagacacatacgggaaaggtttgccgggtcatgggacctgtcgttgacgtccgctttgacgacggaaaacttcccgcaatatataatgcgctgaccgttccgataggcgaaagaacgctgacagtcgaagtggcgcagcacatcggcgacaataccgcaagatgtatcgccatgtccgcaacggacggtttgcagagagatgccgttgttaccgatacgggaagtccgataagcgttcccgtcggcagagaaacgctcggcagaatattcaacgtcctcggcgacgttgtggataacggtgaagaaccgaaaaatgcggaaagacgcagtatacaccgtcccgcacccgaatatgacgaactttcgacttctacggaaatacttgaaacgggtataaaggtcatcgaccttatctgcccgttcgcaaaaggcggtaagataggtctattcggcggcgcgggcgtcggaaaaaccgttcttataatggaacttataaacaacgttgcaaaagaacacggcggtctttccgttttcacgggcgtgggagagcgtacccgcgagggcaacgacctttacaacgaaatgaaagcgtcgggcgttctttcaaagacggcgcttgtttacggacagatgaacgagccgccgggagcgagaatgagagttgcgctttcgggacttaccatggctgaatcgttcagagacgacgagggacaggacgttcttcttttcatagacaacatattccgtttcacgcaagcgggcagcgaggtttccgcattgctcggacgtatgccgtccgcagtcggatatcaacccacgcttgcaacggaaatgggtgcattgcaggagcgtataacctccacaaaacgcggttccataacatctgttcaggcggtatatgttcccgcagacgacttaacggaccctgccccagcaacaacattcgcacaccttgacgcaacgacggttctttcaagaaatattgcatcgcagggtatctatcccgcagttgacccgcttgaatcgacaagccgtattttgtctgccgatatagtcggcaaggagcattacgaagtcgcccgtgaagttcagcgcgtgcttcaacgttataacgaacttatggacatcattgccattatgggcatggacgaactttccgacgaggataaactgcttgtcagccgtgcgagaaagattcagagattcctttcccagcctcttcatgtttcggcaaaattcaacggtttccccggaatttacgttcccctcagcgaaaccattcgcggattcaaagaaattctcgaaggcaaacacgatgacctgcccgaatccgcattcctgttcgtcggaacgatagacgaagcggtcgagaaaaccaagagggcggagaaatgaagccgtttcgactgaaaatatcgtcgcccgacggagatatttttgacggcgatattcaaatgcttgttctccgcggcgcagagggtgatcttgccgttatggctggacatgcgccctttataacttccgtaaaagcgggggagtgccgcatcacacttgcagacggcagcgaaaagaaagcgacgacagacggcggtctgctgtccgttcagaacggctgcgcaacgcttctttcgtcaagttttgcatggtaacatctccgtaaaatgtaaaaagtgccccaatcaggggcactttccgtagttatatatttcagtcttttgtatgtttgcttcgttcgataacttcggacgacagtcctcgacagatttccgttatgtgatggagttcgtccacggcttcgtctttcattccgtttgatatccagtcgaacagaaacccgtaaagttcgcatttgaaaaacctaatggctatcttgcggtcggtctctccgaccgttcccttttcaaatgccgtgtcgagatacgttgttacaagatattcgcacaactgcatacagtattgttcaaagatattgcggttgaccgaattgtatatgtgcgatatcgcttttttattctttatcaactgcttaaaaacaatgtcaacacattcgtcaagcgaatttatcgtgggatatttttcaatcaaaaggtcaatactttccttgattatctcttcgataagcgtcggcaggtcctgataatagtaatagaacgtgtttctgtttatgccgcaggcttcaaccacggtgcggacgctgattttgcttaacggctgctcgttcagcaattccaagaatgaagtctttatcgccttttttgtcagattctgcatttctttctcctcgatgtcactttttgcggatattttacaagtataattatatcacagaaaaataaaaaaagcaagccccgaacgggtatgattcgctccgttcggacagaatgaggtgtgttatgtgtaccgcaataaattttaagacggaagaccattatttcggcagaaatctcgattatgaacacggctacggcgaaagcattgccatagttccacgaaattttccgatagggaatttatcacggcattatgctcttataggcacggcacacgttctgaacgggtatccgcttttttacgatgcggcaaacgaaaagggactttgcgcggcggggttgaattttgtcggaaacgcattttacggcaaacctacggacggaaaaaacaacgtcgctcaatatgaatttattccgatgctgctcggaaaatgcgccgatgtcgccgaagcaagggcttttcttgaaaacgtgaatataaccgatactccgttttgcgaggggctgccgtccgctcaacttcattggctcgttgcggataaaaacgagtgcatagttgtcgagtctgtgcgggacgggctgcacgtttatgacaatcattgcggcgtgctgacaaacaatccgccgtttcccacgcagttgttttcgctcaacaattatatgaatctttctccgaaatcgccgaataacaactttgcgcccgaacttgatttgaaagcatacagcaggggaatgggtgcgcagggacttccaggagacctttcgtcgcagtctcgctttgtccgcgccgcgtttgttcttgcaaattcaaagtctggtaagggcgaggaagaaagcgttcggcagttctttcacattctcggttctgttgaacaacagcgcggctgctgcgaagttgcggacggcgaatacgaaataaccatatattcctgttgcttcaatgccgacaagggtatttattattacacgacttacgaaaacggcgcgataaccgcagttgatatgcacgccgaagaccttgacggaaaaacagtcatctcttatccgatgagaaacgaaacacttataacgtttgaaaacaagtaaactcgaaactttgtgcattttgttcgtatattcagaaaaataccccgccgcgaaagcggcggggtaaatgtatgttttgcctttatcagtctacatcaacggttccgtctttatgaatggttattttcataccgtccttgacatagttcagaaactcttcgccgaggctgtcgataacgggcagcggtgtgccttcaagccacacgtccgacagaattgcgcctgccgcggcaagcgagtctatcggctctgagaaaagcatacaggcgggctggcgtcccatggcgcatgcgcagtaaagcacgagacctcccgtagtcgaacctatcgtaatcggcagacagagcgctttgccgagcatctttttgccgtaaagatcggggttgttctgatcgccgcaggttgcggttttatctccgaattgtagcgctttttgaaacgatgcaagagtgttgagaccgccgtgcgaaacatgtgcttccgctgtcagttcgccctccgcgacaactcttcccttaaaagttttcattatcggttgccccctttcgtgatttccgcaagtatctcatcgtccgtataatatcttgcgctcgtataagttctgagtttgttgctcgaagttataacgggcatttttgtgctgagcgggttgttcatatacatcagcgggcagatgtaacttgttataacgcccgtttttctgagcctttccgcatacggagttttttcaaactctttaagcactgcgggcgctgcggtgaacaccgtcgggatgactacttttgtgtttcctgcttctttgagcgctgtttccactttgtccgtccatgtcataagttggttcaggctcatgtgcgggcaacccatgaagcagagtttcggttttgcgtctttgtttttccagattatcggataactgtcataaactctttgaagttccgcatcgtcgataacataaacttttgcgtcctctttgatgagtttttcaccgagttcgaccgcttcgggtgtgatattttcgatatggtaaagcccgaccgctccgttagatgcagttgccgcaccgaagtctttaagatacgtttttgcgtcttcgtcaagcgttccgagccatttgtcaagacctctgacaaacggaacttcttccataactttcattccgattgccgagccgagcaactgcgcttcgggctttttcgtcgtttttatctcgactacccaacttgcttttctgccttcgtctttaagaaaaccgaaagagggaacatagcctacaacggaacccataaggtcgattataccggagtttctgttgcagcgtgcaccgagtacggagttggcgtaaacgaccgccgaggattccgaccacgaaagaacgtcgccttttttcggagtgtttcccacttcgtccatatagcatgtgcaggtaaatgcgtcgggtgccataagtccgagtttttgaagttgtccttcataaaaatcctgtttcgtatacatgaacttattgaatacgaagttttgcaggaagttcgacggaacgtttttgtcaagcggtctggggtctgcggaaaatttctgctgcgaaaccgcgcccgcttctataagtttatccataagcgcataaacgggtgcaagcgctttcagcccgaaagaagtaacaaggtgattgtatttgcttgtaacgggcaccatttcgtccgctccgaacagttcgccgtaacggacaagagtttccatgacctttgccatggtctcgcccttgcttccgtcaagtatggctttctgttcctcggacagtttcattttatattccataaatatcctatccgcctttcttatatcttcatcgcagtttcgtatgcgttccaaacaacggtgcgcaggttgcccactttgtcgcagtcgcccacaaggtatctctttccgcctttttccgcaacgggggcgggaatgtagcccgcgcagcttataacggaatcacattttatctcaatgtcttttccgtccttgcccgtgcatacgatagcgccgtctttgacttctttgagcgttgtttcaaggtaaacgggaacttcgtgcagctcaaaccattcacgcagatacgacgagttcgcaagacatacgcccttttgcgaaataaggtcgtctttcatctccactataacggggtttttgccttgaagtgcgagttcgtaagcaatttccgaccccgtaagaccgccgccgattaccgcgactgtctgtcccacttctttgcttcctctcaaatattcgcaggcttcgaccattttttcatatccgggaactctcttcaacaatctcggtgtcgcacctgttgcgataataaccggatcgtttccgaaaaccgaaacgtcttttacttcgtcgttcaggcggacttcaatgccgagtttgtccatatttctgatataccatgcaagcagatcgcggagtttgcctttgtaggattccgcacttgccgcgatgaacgcaccgccgagttcgccgctcttttcgtggattatcgggttatgtccgcgcagtttaagcactcttgctgcttccatgccgccgataccgccgccgataatgtgaacggttttgggggaagtcgttttctttatgtaatgcttgttccattgcatagtttccgcattgacggcacaacgcgcaaggtgcagactgtcagaaaggtcctgatcgttcggcacgcccttgtaatgacacatattgaagcagccgttatgacagagtatgcagggacgtatatcttcctgctcgtcgttcatgagttttgttatccagcgctgatccgccaagaactgacgtgcaaagcccgcgccgtcaagttctccatttgcaacggcgtcagccgccgtttcggggtcaagtctgcccgcgcagataacggggatatctacaaattttttgatatgttctacgtcttgcaggttgcagttttcgggcatatatatcggcgggtgcgcccaataccatgcgtcgtaagtgccgttgtcgcaattcaggcagtcataacctgcgtcctgcaaatattttgccgctttttcggattccgccatatctctgccgacttcggtatattcttctcccggcagcgcgccttggcggaatccctttgtttttgaaataacgctgtaacgcagggaaacgggaaagtcctttccgcacgccgcttttattgcgtcaacgatttcgaccgcaaagcggtatctgttttcaaacgaaccgccgtaggagtccgttctcttgttgacgtaaccgagcgtgaactggtcaagcaggtacccctcgtgaacggcgtgaacttcaatgccgtcaacgcccgcttctttgagcagtcttgcgctttccgcaaacgcttccacaaactcgtgtatctcttccacggtcatcgctctcgacggcactttgtccgaccaacggttcggggacgggcttgccgtcgcggttattttgtcgaggttcataaacggcttgctgacaactctcaaaaacttgtttgtataaagtttttccatcatttcgcttattgtgaacgaacgtccgaatcccgccgtcaactgcacgaaaagttttgcgcccgtcttatgaaattcgggcatccactttttcagatcctcaaacattttcttgttcttgtgcagccattgcccgaacatcgggttgtaaacgggctgacatcccggcataacaagtcccgcattgttttttgcaacttccatgatgaagcgcgcgccgtctttgtcgaaatggttcttctccatccagccgaagaggtctgttccgcccatgcttgtcagcacaaagcggttttttatctcacagttacctatcttccacggcgtgaataatgggtcgagtcttttgtccatatcttttcctccgttatcctgctttccgcagatatttccgcggaaaacttctttcagccgtaacctacgcctttcggcacgagttacgcttttatttataattataacataaaaaattctgaattacaaggtttgaagagcgttatatccaaaaaatatatataaatttata

SEQ ID NO: 1646 - DNA, 2600 bp, Unknown
  16S sequences of unknown bacteria
gcgccgccgctgccgggggactctcgtgtaaaatcacgaaagcctaggaaaattgcataaatcttaacggtttttttataaaatttgccaaattgacctggaacggaaaacatgatatataataaaatatataaaatcggcttttcaatcacctgttttttggatgaatacacgaaatgaaggcgcttggatagatgttctttctaaaatctttctatagaagaaagactggctggtttgtttgttccgggggcggggaagggacccggcaagcgtaaacgctccgcccactgctaccttattgcattgctccggcactgtttgcatagaaaaaacggaaaggatggagaaaccatgaatttattgatgatcctcgtgatctgtgcggccgtgctggcgctggcgtttgccgcgttcaacttcttcaaggtcaagaagatgcccgagggcacggaacagatgagcgagatcgcctccgcgatccgcgtgggcgccaatgcgtttatcagctatgagtacaaggtcctttataccgtcgttgccgtcgtcgctgtcattatggcgatcgtgacgacgtggcacgcggctctggccctgctcatcggctcgatcatgtccggctgcgctggtatgatcggtatgaagatcgcgacctatgccaacgtccgcgtctcgaacaaagcgcgcgagacggaggacatcggcgagacggtcaaggtcgctttccgcggcggctccgtcatgggcctgtgcgttggcggctttgcgctgctgggcctgttcctcgtttatatgatcttcggcctggggatgcaccaggcggtggagacggaggcaagttatgtcaacctgatcggtctgaaattcgtccccttcaccatgacgctctccggctatgccctgggctgctccatggtcgccatgttcaaccgcgtcggcggcggcatctacacgaaggctgctgatatgggcgcggatctcgtcggcaagacggaagcccacatcccggaggacgacccccggaaccccgcgaccatcgccgataacgtcggcgataacgtcggcgacgttgcaggtctcggctccgacctgctggagagctatgtcggcgcgatcacctccggcattattctggcgttccatatgtttatgcagtccaaggccctgggcacagggatggatgcggatctgctgcagcgctgcattctcttccccctggtctttgtggccatcggcctgatcgcctgctgcatcggcgtggcgagcctgctgttcaaagcgaaaatgtccaaggacccgcataaggacctcaacggcgcgacgtatgtctccgccggtgcgacgatggccttgggtctacttgtcgcctacctgatgttccggacggcggacagcaccatcatgcgcaatgcgttgggcttcagctgcggctttgtctccccgtggatcgcggcggccatcggcattgccgctggtgtcattgtcggcgcgttcgccgagcgctacacctccgcggagtaccgcccgacccagttcctagccaaggcttctctggaaggcccagcgctgacgatcacccagggcatggcgctgggtatgaaatcctgcatggccccctgcatcgtgctggcggctggcatcatcgtctcctacaaggtctccggcatgtacggcgtggccatggcggccatgggcatgctgtccttcgtcaccgcgacggtctccgttgatacctacggccccatttcggacaacgccggcggcatcgccgagatgtccggcctggaccccaaggtccgcgagatcaccgatacgctagactccgtcggcaatacgacggcggccatcggcaagggctttgccatcggctccggcgtgctggctgcactggcgttgatgatctcctacctgtactcctacaatgaagccgggacggatctcgtcctgaacctgatcgagcccatgacgctggctggcgccatcgtcggcggcgcgctgcccttcctcttcagcggtattttgatcgaagccgttgccaaggcagcccgcaagatggtcgacgaggtccgccgtcagttcaaggagatccccggcatcctcgacggctctgccaagccggattataagacctgcattgaaatctcctccaagggcgccatcggcgagatgaagctcccgtctctgctggccatcgtcgtgccggtgggctgcggctttatcttcggtgcggagtttgttggaggcctgctcatcggctccgtcatctgctcctgcatgctggcgatcttcaccggtaatgcaggcggcgcgtgggacaacggcaagaagtacattgaagccggcggcgtagaaggcaccggcaagggtacgcctgcgcatgacgcagccgtcgtcggcgataccgtcggcgatcccctgaaggataccgtcggcccctgcctggatatcttcatcaagatcatgtccacagtctctctggtcgttgtcggcgtcttcagccacttcaacctggcaagcctcctgggcagcctgttctaagaaaagtggttctataataaatgttggggtcaggcaaagagcctgaccccttagctatagaa

SEQ ID NO: 1647 - DNA, 1978 bp, Unknown
  16S sequences of unknown bacteria
cgaggcgctcggtgagccactccgcggatttttccgctgacgacgaaagagcgcggacaggggacaagctttcggttttccccatgcacccgttcagtgcagccgaaatcgtaagtgccgcaagtgcagccgaaatcagttttttcattttacacccttgctaaaaagcttcctttcgttcggagataatgatacgtcactgcacgcagcgtacacatccccttatactatttatactatgtataaaaatattaacacatttgagcgaaaaagtcaatgagatgtgacttttttaacgattatttttgccataaatcaacatacagaaaagcggcgcgcctcgacatgaggtgcgccgcccgttattcattttttccaccacgaaggataaatctcgataactctttttccgagctccgccggattctgctttgttatatcaaagccgtcgaagaatcctgcatcgtttgtcagcacgggggcgctgtcgtccactctgtcaaattggagcggatactttccgccggtgcgcgaaacaaaatcattccacagtccgaggtactccgatctttcgctctcgctgccgtttgtgtacattccgtcatatgaagcgatcagtccgacataatgcatctgcatggaaagatgctttatgcgatattcctgaacgctgctctcggcgagatatgccgcatcgtcaaacagcgtcgtcatatagccgtacatcttcgcgtaaaaatcgagatccacgcggtcggcagggctcgaccatcccatcgtactccagcagttatctccgccggcttccttccaaagaaccatatactcgtaaatgtcctcatatccgggaccgtagaggatcatgaagtattcctttatcaatccgataaattcctcatccgtgtaatccgaactccactgaaggattcggcacagataattgagtattccgtccgcgggattcagaaacgtcgcgcatatatatgttccggtcactccgcattccctgaagaaacggaaatcgtcgatgagattgaacactgtgcagctctgcacgggtgcggcgtaccatgtgccgggataataccatacgccgaggcggtcggtgagcttcgaccagccgcgcatttcctgtccgtagagtgcgttcgagatatcgccggaagtgcatttctcgccgctgtgcggatgattgtagcaggcatgcttgtctatgtcgttatagaagcaataccacaccgaaacattcggcttcagctttgttttcagcggtggctgtgtggttccgtaatacgcaaacatctgcacatacacattcgggtcgatctcggcgattgcatccgcaaccgcattggtgaagtacacaacgggggctgcattcgtcctgtcgtatgcgataagctccatgcagttcttgcactgacagaaatctgcggaatccacctgcgaaatatcgatatcggttatatcgcgttctaccttgagtccggaggcaagcatgtttctgagcttctcggtgtaatactcgcaggcgatctcgatattttcctcattggagaagcacggctgtctcgtctgtacaccctgaccgctgtaatccgcaaagcggtccgccatttccgcaagtccgtggcaggttggcgggctcacaccgtagccgttatactttgcaaagccgcggacatcttcacggttcagtctcattttgagagcgaaatcctctgcaggaaggtatctcgagggctcatgccatacgctgcggcttgcgatatcgggagcggaataatactccgtgccttccgggatatccacggaagaagcttcatagaggtaatcgatcaccgcatccttataggaagaatagaactccgacggaagctcgggatcaacggaatcgaaatcgtaaaggaaacggtatcccacaaatttctcgaggaagtcgtaaacaccgtagatgcagccgcggtactgcccgccg

SEQ ID NO: 1648 - DNA, 3054 bp, Unknown
  16S sequences of unknown bacteria
ggagccggtgccggcggcgcacagcgtgttcatggcgtagtcgacggcaatgccgccctcgacgaggatgatcttggagtcctgcccgccgatctccaagatcgtgcggacgtcggggtgcaggtgcgtcgtgcccaccgcatgcgccgtgatctcgtttttcacgacgtttgccccgatcatcgcgcccacgaggcgccgcgcgcttcccgtcgtgccggcggcgcggactttgaccttttcggggtcgatctgtcccgcgaggtcggccacgacgcgccgtgcggcacccgcggggtcgccttcggtccacaggtacgtgcgcgcgatgatggcgccgtcttcgtcgatcaagacgcctttcgtcgagatggatccgatgtcgattcccaggtatgcgttcgcgctcatgcgagcacctttcctttcttcatcgcgagcatgtcgtagaacgcctcgaggcgcgtgtccagtccggcgtcgctcgtctgcgagtcaaagctcagatacagtatggggatgtggtagtcgctgctgacccgctgcagtatgggcatgcagtcgatttcgggggtgcagcctgccgacttgatgtggatgatgccgtcgtatcccagctcggcgtacttcttggcggccgatatcgtgagcgtcgaggtggggccatcgtcgtaggcgaggtattcccgtacgccgacccgcaggttgggctcgctgtaggagaggtagcggttcgtgaggttgaccgtgcggtgcagctcgacgcccatgtcgagcagacggtgctcggtgttgaggttggactcctggtcgacggcggtgaagaactcgcccacgataccgattctgatgcgctctccctgccgacaggggatggagcgcatcgcatccataccgtggtggtgcgcaagggcgatcgcgctgtcgttggtagcgtggcgcatctcgtcgtggtacgcgctcaacgcgcgatcgaaggcgcccttctcgagctctgcgcccgcatgcgccagatagtagtcatatgcctcgtccaggttggtgatcatcttggcaaggctcagcagcttgcgaacgccctttttcacggagagattcgggttgatcttcttcacggccttgacgtactcgtcgatgcccttgccggcgaggtaggcgaagttcaggcagtcgaactcgtagccgaggtcgcgcagaatcgactcgtgcagcgcgccgtagtagcccaggcggcatgggcccgccgtctggatcaagacatcggcgccggcctcgagagcctcgatgtagtcgcccaaaatgtgcttgaacggcgtgcagacgtagtcggtgctgtagcgcgagccgatttcgatcgtgcgcttggtgcgcgggggcacgggcgtccactccgcatcgaggacctgctcgatgaagaacttgaatgcgacgtcgtagtagctgtagtggaaaaagctcaccttgcgcttgccgtggtgcttctctttgcgcttcttgcggctcacgagcagcctgggctctcgctcggctccgccgagcgagacgcgtgcgtgctcggtgcggttgtgcatggtctcgcgagcttcgagcgcgcgagcaccggcggcgtcgagtcccttcgagaccttgatggcggtgtcgatgagctcgaggacacggttcgactcgtcgcctgcgggaagctcctgcggcgtgtcctggtcttgctgcactctcatttgaggtagcctcccgtctgctggtagcgcaggatgtcgacgaagctctcgatgcgcgtctcgaggcctgctgtgccgctttggctgtcgacgatcaggttgagaatcgggatgcccgagatgcagcgcatgacggcgtcgtttgtcattgaatcaggcccgcacgggagcgcgctcagcaagacgatgccgcttatgtcggcgcgcgtgcgcaggatggccccgatgagctcgcggttgatgcgccagggcatggtcgcggaaaagtccttgctcgcctcgtagcacttgtcgtggtcggactcgcacgcgagcagcagacgggcgcccgatgcctcgattgccgtggtcactgctcctccgatgtagctgtcgtaggcgacgtaggggtgcgcgacgagcaggatcgatagctgcgagccgttctcgcccgcgccctttctgagctctttgagcaccttgtcctgcgcgcgcgccctggtgcggtccgcctggagctgcgcctcgcaggccgcctgggcgatcttcttcgcgtgcttcttgtcggcgccaaagcgcgctgccagctctgcgaaggcgccggcgaggtcagtcttcgcgaacatctcctcgaccatgcacgagatgaagctcgcctggccgcgaaacgtgttcgccgtcaggtccggcagcgcctggaacttcgtgcagaagcgttccagcttgccgaagttggccacggcgggcgtgaatatagcctcgcagccctcgtcctcgatcagagacgccacgtgcccgatgtagaccttcgaggcaaggcagcactcgtcgttggacagcagctcgccgcgctcgacgatggcgcggtcggtcggtcggctcaagaccacctcgacgccgagcttctcgaaaaacgtctcccacagcacgccgtagcggtggtacagaagcgcgcgcgggatgccgatgcgtcggatgtctgcgcagtcagcgctggtcatggttgtgattcccatctatgcgttggggtgtaacgtgacgcgcaacagtctagccgttgccgtgctgcgcgcgcccgagaacgcggtattttgcgcagtcgtgtgtcgcgcgcggaaaaagaaggggaggggccttccgggaaaaccggtggcccctcccaagttgcatgtcgttcaggtggcgaaaatcgtgctcgtctctacagctcggaatagagctccttgagcttggtgaggtgcttgtagcgctcgagcgccgcctgctcgttgcgctcgaacagctcgtcggcgcgctcggggaactcgcgcgtcaggcggctgtagcgcgcctcgttcacgaggaagtcatggtagcc

SEQ ID NO: 1649 - DNA, 7690 bp, Unknown
  16S sequences of unknown bacteria
acaaatcttttatttatacatttcacgccactccaaatctcctctgtccagtgatttaatcagaagctctgctgttgcgagattggtagcgatcggaatattgtgtacgtcacacagatgaaccacattatttacatccggctcatgtctcttcggctgtaccgggtcacgcagaaaaatcacaaggtcgatctggttatgctcgatctgtgctccaagctgctgctcaccgcccaggtggcctgccaggaatttatggacatttaagtttgccacttcctcaatcagccgtccagttgttccggttgcatataattcgtgtttgcagagaatacctctgtacgcaatacaaaaattctgcatcaggattttttttgcatcatgtgcaatcaatccgatattcatagaaatttcccccttccgagtgttagtattttttaggttgaagccctacgtttagtactattcctattcccatatacaacattaccaacgaagtcagcccataactgacaaacggtaacggaataccggtgtttggcataagtcccgtcgctacacatacattagcaaacgtctgaaatgcgatcaatcccccaaaaccgcaacagatgatcattccttcctgatctctggcatttcttccgatccagagacattccaacgcgatcagcgtcaacagaataatgactgccgcacatccgatgaaaccaagctcctctccggtaactgcaaagataaaatccgtctgcggttccacgataaaattaccgtttttcagagaagagatatcattattatataagcctttgccatagagctgcccggacccgatggcaatgatggagttctgctgctgatatgcgtcatctccatattctgccgggttcaaccatgccatgattctgtctaactgatactcattcagaatggtctgtccttcctgcatgatcagattcagaaatataatgatcgatggcactgtcacagcaatgatgcctccgatcactttataacttaaacctgccacaaagaacaacacacagaacagataggcaatggtaatggtcgctgacagatgtggctgcgcaatgaccagtcccagcgggatcagcaaaagcacgatagatgcaagaatcatcttccaggtgttcagctgatctttatattttgtaaaaaagtatgcaaagaatatgatcaggatcagcttggtaagctcggatggctgaaaccgcataaatccaagattcagccaacgcttggctccatttgcctcataccctacaaattttactgcaagcagcaaaataatattcactgcatataacacccagctcagattgagcaaaatgcgataatccatcaaagtcagcacgagcatggctactgttcccagtatcattccaagcagctgctgactctggtactcttcggccgcacttcctatgaccagaataccaaggatcgtgattgcgtaaacaagaacaaccagccgcagtctaaaatcctgcagtctatattgtctgaacatgtctcacctgattcctaacttctttttctcaggtccttcaccggaatattggcacacagcaccggaacagttccattaccgccctctgactctgtctgtgtgatctgaatatcaagtccctcgctgtcaatatccatatatttggtgataaccttgataatatcatttttaattgcttccatgacctcgggtgagcagtttgcccggtcagagatcaataacagcttcaaacggtcttttgcgacttcgccggaattctttttccggaaaaaatccatgaatcccatagacttgtcctccccctatttgaacagattctttaactttccgagaaatccggtctttaccttcagatccaggaacggcacttcctctcccatcactctgcgacagatattcatatatgcctgtcctgcaagagaagaatcccctacgcacggctcaccctggttggtagagataacgatattctcatcatccggtactgcaccgataatattaattgcaagaatctcaacaacatcatctatagacatcatatttccgctctccaccatatccatgcggatacggtttacgatcagatccgtcttcttaatctcatttgcctccagaagacctatgatacggtctgcgtcacggattgcagatacctccggagtcgtgacaatcaacgcacggtcagccgctgcaatggcatttttgaatccctgttcaataccagccggacaatcaagaagtatgtaatcgaactcgcttctcagttcctcgatcagcttcaccatctgttccgggcttaccgctgtcttatctctggtctgtgcagacggaagcagatacaggttcggatatcgcttgtccttgatcagtgcctgcttgatccggcagtttccttccaccacgtctaccagattgtaaacgatacgattttccagtcccatgacaacatccagattacgaagtccgatatcggtgtcgatcagaactactttctggtccagctttgccagaccggttcctacgttggctgtggtggttgtcttgcccacaccgccttttcctgatgtaattacaattacttcactcatattgcgtcctccaattttatatcgctcgatccgcatcaggtcttcttagatccggatatcgttgataacttcttttgttatcggctccatatagatgttgccgtcttctgtataggcgatcatcggacctgtggaggtctctttcgcttttctggatttcttttcaggcttgtcatctgcagcccttgcaatggcatccgcgatccggatctgcatgggattcatattgagtgctgccacaaaagcaccttcgtttcctgcggctcccgcatgaatggttcccttcagagttcccagcaccaccacattgcctttcgatacaacagtggctcccggattcacatcgccgagaataataatgctgcttccagcctccagtacctgtccggaacgaagtgttcctttatagaatttgccatcactggcagagagttctttttttctgtcttccaggacttccttcatataagcttctgtcagcgtatcctgttccatgatacacagaatctccagcgaagtattctcctgaattgtctgaaccacttccagctgttcactctctgataatctgcgtccttcaaagctcaatgccatctgagcatcaccaaagaatttggcagatgctttgaacttttctgcgatctgcgacagcagatcacgaaaagcaatatctttatccaggcacaaggtaattccatatttgttgctctttatcacaactgtctgttgtatcataactgtctccctagtcattgatcactgcacttgtggcagttgttgcagatccattcagcagttcatctttatctgtcagatcaaaataataggaaaagatatcagctgccatagaagctgcatttgcggaggtatagccgttggcaattcggatcgcaattgcgatctgcgggctctcatatggtgcatatcccatgaacagtgcatggtttggatgactcttagactgctgtgcagtaccggtctttcctgcaatggtaagattcagatctttaaatgccgccgtattctctgccacctgatgcatgccttcctgaatggtgttccaggaattatccgcaatatcgatattattatatactgatgccgaataatcttcaatagtgtttccttcagaatctgtcaatttatccagcaatgtcagatcatacacagttcctctgtttgcgatcgtgcttacatatctggcgatctgagataccgtatacagatgggtgccctgtccaattgccgaacgaataccgtcactgtctgagatcttcgggtcactctctggaagttccatacctgatgtatggtcaaagccaaacatagccgcatatttcgagagtgctgccagtgcccggtctgatgaatagccagtgctccgtccacctcccagtctgaatcctacctcataaaaataatagttgcaggaaacacgaatggcatccaccatgttgatgtttccatggcttccatgatactggttatagatccagcaggtaggtgaaccgtatgcttccgtaaacacacctgttgcatgaataatatctgtggaacggatcaccccttcttccagacctgcaacagcagaaatcggtttgaatgtagaacctggtgctgtacgctcctgtgtggatcgactgtacagaggtcctgccaagtcacggttcagttctgcatagtaagcagaatccatggtattagtcagtcggttgttatcatatcccggataagacacatttgccagtacatcccctgtactcggatcggtgatcacacatccggcactacacggttccagtgcaagctgtcccggtgtgatctccagattcttgatcttatccatcataaagctgtatgcagaataagcaccgcttctgagttttccaaccgtctcctcatcatactccagaataccctggtcatacaagagcaaacaaacttctcttcccgtcaccacatcattcaaaatgacatatttatacagcattgtatgaaaattgctgtcggttgccagttttgacgaaatataatcaactaccacctgatagatttcttcggaattcatataggaattcttcacatcaagcccggatacatccacccagttcatggaaatggcatattccagatattccttcaggctgatggtctcgtcttttgcccaggcaatataagtagcgtcttctgtattgaccgcactcttcatgagcacctgatcctcacccataaggatgtcagacacaatgtagctcatataatttttcatatcacttggcaagtcacaataggcagtcgggctgtcagactgaagctgtgccataatacggctgatcgcatcgtcaagctgagtatcaaaccgctgttgtactgacttctccagatccgtagcatcatccgctgtaaaatgggacgtgtcaataatatggttctggatcagcgcataatagacatcatagatagggattacaatgctcatggcagagctgtgtgcccctggcacatactgcttgatgttctggatcttggacaccagaacacccgccagacgctgttccagaatattatatactgcaatctgcagatccttatcaatggtcagatacagatcatgtcctgattctggctgtgtctcgctctccacctccagcacatttcccacactgtccacatagatggtacgctgccccttcttaccctgaagatctgtctccatatactgctccagacctgctttaccaaccaggtcattggcatcataatcttcattctgttctttcagcgtatccagctcatcctggtcaggcttaccaatatatccaatgatatttgcaaaatatttggaatcggcatacgtacgcagactgctctgctcaatatccactccctgcagattactctggttctccaggatctctgcaactgtggcatctgatacatccgaagccacggtggtggtcacataacgtttaaagctgttgctgctgatggcataacggatggtcaccagcttcaagatctgttccggtgtcagatctgtaggaaccttatattccttgatctgttcctctgtataaaggtccggagcgatccagaacttcttcttaccgcacagatactcgatcatctcgtccgcagtcgccacatattcttccggcttcagatcatcaatactgctgtaaccataaacatctgccttaaagcgaagcagtgctcttccctcctgcgtataagtataagagccattctggtacacaataccgaaatcaccgatcacgttgtctccatgagactctacaatatctatgaccttcagcacagtccggtttaatgtagactgcttctctcttgcacttttataagttccgttatcctccatggtcaccgaataggaaagaacattatctgccagaacctgtccgttcctgtcatagatccttcctctggtgccaggtaaacttacctcacgtttaatacgcatggtaaagctatctgcataattctgtccattgatgatctgcagatagaagatccggctcatcataattccgaaaaaagccagaaaaatcaccacgagcacgaatatacgcgatgttatgaaattcaatatggattctttgatatcttccagcaaattacccgctccttacgaatcagtcttaagccttacgttgatcttatagatcaaccgataaataaacagggtcacaatgactgtatacagaagttctggcagaatgatacttgtcagataatgaaaaaatgcgaaccggcttctcatgacaaacatgatcatgtacgttcccagtccatagatcagttcactggccgagatcagactcagcggcagcttaatatcgtctccgtaaaagatccggttgaactgtccattgccatagccgatgtacatataaatgattgcatgcatgccaagaagtcttccatagaaaatatcttccagcagcccgcagaaaaatcctacgatcataccttctttccgaccgcccataaacccgaaggaagctgtcagaatgatcatgagattgggactgatagagccaatagcaagagcctgaaacaccgtactctgcagaaggaagcagagaagaatcatcagagcgatcacaattttacgcttcatctattcttctgccctcctattctgtctcagtagtctcatccagcagcgtatcttcttctgttgcatccgcctgtgattcatccacctgctgctttaggtcagtgatgacaagaaccgtactcagatgctcaaaatccacagccggagtaatgcttccggacttggtcagattattggaatccacagcaagttcatttacatagccaatcaggattcctttatgatattttgcgctggcataagaagtgacaactttgtctccggattctacctcatcattctgatctctgagctgattaagctgcagggttccctctgacatcatctccagatcaccgcgcacataacacagatctgaatttttcaggatcatggcgctgacattactcatgtcgtcaatgatggaacgcacctgtgcccaatccggtccggtcttggtcacgataccgaccagtccgcctccggcgatcacattcatgtccactttgatcccatcactggaacccttgtcgataatgaacatattaaaccagttacctgtatcttttccaataacattggccgcgatcttattcagatcagaataatcgctgtccagattgtaaagatctctcaactcctgaagttcatagcgttcctgcatcagcatattattttccagtgtcagttccgccacctgttccttcaggctctggttctcctcgttgattcgctgcagatctgccagattatcgactcttgatctgacccggccgccagctgcattaatccccttctgtaccgggatcaacacataaccggaaaccgtgttgaggatccctccgtcaaaatccgtcaggaaagacactgacatcgtaccaacacataacaacgtcagtgcaaacaaaatatattttgacggaatcgtaaatcgattttttcgtttcatac

SEQ ID NO: 1650 - DNA, 32759 bp, Unknown
  16S sequences of unknown bacteria
aggcggaggccgtcctcgcgcaggaggcagccgtggcggtcgtcgcggggccgggcacgggcaagacgcgcacgctggtcgcgcgcatcgcgcacctgatcgcgcaggaaggagtgccgcccagggagatcacggccgtgaccttcacgcgccaggccgcgcaggagctgcgggagcgcctggaggcggagctcggcggaaagcaggcgctgcgggggctgacggtggggaccttccacgcggtgtgcttgcagcacctgccggccaagcagctcgccggccgggcggaggcggtgaaggtcctggcggagctccttgcggcgcgcggggaggcgggcatctccgcagcggaatgccagcggcgcatctccgcgcagaagaacggcctgcccggccaggacctgcccgagggcctgcgggaggagtacgacgcggcgctgcaggcgcgcggcgcgcgggacctggacgatgtgctcctggaggggcgggacctgcgggaggcggccttccgcaacctgctggtggacgagttccaggacgtcaacccgatccagcgggagctcgtgctgcgctggagccagggcgggcgctcgctcttcgtcatcggcgacccggaccagagcatctacgggttccgcggcgcggatgcggagggctttgcggcgctggggcgcgagcgcgcggtgcgcacgctgcgcctgcgggagaactaccgctccgcgccggcggtgctggaggcggcaaaggcggtcatcgagcacaacggcggcccggcgcgggagctcgacgcgcggcgcgcgcaggcgtccggcgcgccggtgcgggcggtggcggcgccggacgccttctccgagggcgtgtggatcgccaaggagatcgggcggctggtcggcggcgtgggcatgctcgaggcgcagcgcgagggcgcgcgggagtcggtccgcgcgttttcggagatcgcggtgctgtgccggacgcaccggcagatggaacagatcgaaacgtgcctgatccacgacggcattccctgcgaggtgttcggccgcggcgcgtttctggaggatgcggcggtgcagggcgcggtggagctgctgcgcggccttacacgcccgcaggaggcggaggcgctgcgcgcgggggtgcaggcgctctggggctgctccgagggcgcgtcctgggcggctgcggcctccttagccgagtcggccgcccgggctgagtcggccccccaggctgaggaatccaaggaggcgtccatggccgggcgcgcggagcgtgcggcggcgctgttcccggagctgctgccgctggcgcaggcggtgcgggcggtggagccgctgctgcgggggcggccccggcgcgcgctggacgccctggccaaggccctcgggcgcgaggcggacgagaacttcctgcggctgcggcagacggcggcgctcttcgggagccttccggacctgctggacgcgctcctgctgggcgaggaggcggacgtgcgccgcctggcgggcgcaaaggcggcctcgggcgcggtgcggctgatgacgctgcacgcgtccaagggcctggaattcccggtggtgatcctggcgggcgcggcggagggcgagctgccgctggaccgtcccggccgccgcgcggacgtgcgcgaggagcggcggctgctctttgtgggcatgacgcgcgcgcgggaggagctgatcctcacctgcggcggcgcgccctcgcccttccttgcggaactgccggcggacgttcggcgggagagcgcccgcggcgtgcggcgcgagccgcagcccgagcagctctcgctgttctgagatgggcgcggggggagggcgcggcgtgcggcggctgcgcggatgcttggctgcggtgggcgcggtcgcgctgtgcctggccgcactcgccggcgggatctggtaccgggtcgaggtcgcgccgacggaggtcctgacggacgtttcgccggacggggcgtacgagctcacgatcgacatggtgggcgagccggactggcccttcggcgcgacgcactgccgcttcaccctgcgcggggaggggcggcagatcctcgagcgcgcgttttccattcaggacgacggcgccgtggcgcgcgcggacaacttcgacgtgcgctggcgcgcggacggcgtgcaggtcgtcgtctccgggagcgagcagggggatcgggtctacgtcctgggatttgacggaagcgcagaggaaagcgaaggggcccgccggccgacgcttcgccggacgggatgtacgagctcacgatcgacagggtgggcgagccggactggcccttcggcgcgacgcattgccgcttcaccctgcgcggggaggggcggcaaaccttcgagcgcgcgttttccatccaggacgacggcgccgtggcgcgcgcagacaacttcgccctgcgctggcgcgcggacggcgtgcaggtcgtcgtctccgggagcgagcagggggatcgggtctacgtcctgggttttgacggaagcgcagaggaaagcgaagggacccgccggtgatccggcgggccccttcgtcctccaggaaagcaaaaaaatccgatcgcttggagggccaagcgatcggattccactggagctgatgaccggatttgaaccggtgacctcgtccttaccaaggacgcgctctacctgctgagctacatcagcattcccgttctgttccctgcgccgcaaggaacgtatatgattatagcgcgtccgcttccaaaatgcaagcctttttttgatttttccccaaagaaattttgccgctcccccggcggggggagcggcaggcgtcagccgatgcgccggcactcgaagtagcagcgcttttcgtgggcctcgcccatggagaaggccttgcgcggcagcgggcccttggcgatggccgggaagagggcgaacttgtccggcgcgggcaggagcagcgcgcaggcgtccggccggcggcccagggcgcgcgcggcctcgtcgccgtggatgtagtcgagggcggcatccgggtgcgcggcgaggaactcgtccagcagcggctgcaggacctgcaccggcaggccggggtaggcgcgctggcccgcggccgtcacgagctggacgtcgttccccgcgccggaggccgcggaggcgaggcgctgctccagcgccgcaaggcaggcgggcgcaaggcccgtcagcacccggtggatgggcgcgaagcgcagcgcgggatcgtgcaggttcaccacctcgcacagggcccagcgcgcgggatggaccgcggcctcctccggggggagggcggccttgatctccagccagcaggcgcgcgccgcggccagggagtggttgccgtcgcccacggcgaacagcggcgcgtccccgcgggcggcgtccagggcgcacagcgcggcggctgcggcggcaagatcgctcgcgtcctccacggcccagccggtcaggtggcccatgccctgcaggagctccacgtcgtagaggggcctttgcgcgtgcaggcgggcgtacagcggctcgatgagggtctttcccgggtcgtcgaccaggagcatgacgtgcgggcactcgagcagcgcgccgcggcgcacctgcgtgcgcgccgggatgcgcgcaaggatcgtgccctccgtggcgcgcacgcgggaggtcgatccgggcgaaaagtcgtattcctccaggtccacggcgagcagcagtccccggcgcgggccggactccgtgcgccgctgggtgaggatcatgccgcgcacggacgaggtgagcacggtttgcgcgtaggcgcgcatggtctcgtggatgcggggcacgcgctgggcggcctcggaaaggtagacctccggcaggacgatgcgcagcgtggagggcgctgcgcccacgaggcggtccgtctcctcccagacctcgacctgggaggtgtactggtcgcaggcgatcgtggcccacttggcctcgtccgcgacgcggggcagaaggatttcgggcgccaagacgcccacgcttgcaagatccggcatgaaaaaagtcctccccgtgcagtttacattcagtatagagcatgcggccgcgctttgcaagaaagggcgcattttggacatcgtttttttacgagaagggaagcgtgcagcgcgttttcttttgtaccgccctatggtatactaaagagcggaactctttgcgaaaggaaggatcgtgccttgctgaaccgggaaggatggagcctgttggcgatcctcttattttttctcgcgctgctgggcgcgggctttgcacatatggggcgcgagcggtccgtggcggaccgcctgcgcgagggaggcggcgcggcggataccgcggcgggcctggtcgttgcggcggggggcgtcgtgctgctggcgatcgtgccgggcacgctgtatctctatggtctttcgcgcctgctgatgccgctgagcctggcggccggggcgtgcgcgctgctgtgcggcgtcctgccgcggctgcgggcggcgacgccgcgggcgctgtccgcggcggagctctacagccgggcgagcgcgccgcgcgccgcgttcgcggtgatcggcgccatgagcgcgctggggctggccacgggcgcgatctccctgctgggccgggtgatcgcgggggtcttctccctgcaccagacgctggccctgggcgcggcggcgctgttgtgcgcgatcctggcgctgctgtgcgggccgcagtcccggcggcgcatggaccgcctgcaggtgctgctgctggtgggcctgctggcggcgctgccggccagcgcggtcctgcacagcggcgacaaagacaacacgctggcggcggtcctggccagcgcgttttcgcgcccggacacggggaaccccgtgccggtggacatgctctcagacctgggctggggcctcggggtgctgggcgcggtctcgctgctctcgcgggcgaccgccgtgcaggaggagtacgccgcgcgctatggcgggcggatcggcgcggcgctgctcgcgctgctgacggtgctcagcgccgcggcggggctgctcggccgcatggtggaggaagggctgaccacgctggccgcggcggagaccgtgctgctgcaggaggccaccaacgccgtgctgcccgcgcccgtctccgcgctgctggttgcggcgctgaccatggggctgctgctctcggcgcaggggctgctgcgcgcggcggggaacctgctggcctgggacgtggccgagccggtgctcaagggaaagcaggagcgccccctctgccggacggcggacgggatcgcggtcgccggcgcggcgctcgcgttcctgctggcgctggaccagagcgcggcgctgacgaacatggcgcaggcggccttcctgctgggcgcggtgctgggcgcggggcttgcgctgcgcgcgttcggccggcccacgaccgtgctcggcgcgtgggtgagcctggcggcgggcgcgggcgtggtcgtcgcctggacggcggtgcccgcgctgcggaacctggggatgctcggcgcgctgcccagcgccggcgccgtggcgctcgtgcagtggctgctccgcccgcggcggcaggaggccccggccccgcagcccgaaacagtgagcgaggcgcccgcccccgccgaggagcgggaggcggagcctgcgcgcagcgaaggggaggaaaacgatggaactctcgctctttgacgtcctgggaccggtgatgatcgggccgtcttcgtcgcacacggcgggggcggcccgccttgcggacgtggcccggcagatcgcgggggagtttgtgcacgtctcgttcgggctgcatgggtcgtttgcgcgcacctatcgcggccacggcacggaccgggcgctggtggccggggcgctcggcctctccccgcaggacgagcggctgcgccgcgcttttgaccttgcgcgggagcggggcgtcgcgttcgacttctaccccacgcacgtcgagggcgcgcacgagaacacggtggtgatgaccttccggagcgcggacgggcgggagcggacgatcgagggcgcgtcgctgggcggcgggcgcatccgcatctgccgcatcgacgactacccggcggagatcaccgcggacgcgccgacgctggtgatcctgcagcaggaccggcagggcatggtcagccacgtgacgcagatcctggccgagcgggggatcaacatcgcggtgatgcgcctttcgcgcaccgcgcggggggagatcgcctgctgcgtcatcgaggtggacggagagctgcccgcaggcttggtggagcgcgtggcgggcgtgcccggggtgctctcggcgcgcgcggtgcgctgaggcgcgacgcgaaacggagaggagaaggcagatgtatcgaaactttgcggacgtgacgcgcgcgtgcgcgcagcgggggatcggcccggcgcagctcttcctggagagcgagtgccggctcacggagcgcgcgccggacgaggtccgcgcgcagctgcgcgagcgctgggcggtcatggaggcctcggcccggcaggcgctggaggcgccgcagcgcacggccgggggcctgatcgacggcatggcccaccgccagtggacctatgcgcccgggcagagcctgtgcgggcccttcctcaaccgggtgatggcgcgggccctctcctgcagcgaggtcaacgcctccatgggccgcatctgcgccgcgccgaccgccggcgcctgcggcgtgctgcccgcggtgctcgtctccctgcaggaggagaggggccttggctgggaggcgctggagggggcgctgctggtggcctccggctttggcgcggtggtgatgcgcaacgccacggtcgccggcgcggagggcggctgccaggccgagtgcggcgtcgcggcggcgatggccgcggccgcggcggtgcaggccgcgggcggcacgctcgagcagatgctctcggccttctcccacgcgctgagctgctgcatgggcctgatctgcgacccggtcgcgggccttgtgcaggtgccctgcgcccagcgcaacgcctcccaggcggtcagcgctctgctctgcgcggacctggcgctggccgggcaggtcttccccatcccggcggacgaggtggtcgaggccatgcgccgcgtcggccgccagctcccgccggagctgcgggagaccgcgcagggcggcatcgcggacacggagaccgggcgcgccatcgccgcgcgcctggcccaggaataacgctcgacaaaatgcgcccggcgtgctatcatgggagtgaccatggcagggtcagggtctgcgcgtaaagtgctctgcggctggggaatgccaaggggacgaaaagccttgcgcttgcggtgcagcctctgcttcccactgctgcaaccgggagcgcaaacctcctttttgtagcgaaatgccgaaaaaaggaggttttgctcgtgaatgggcgcatgtattcttccctgtgcgaccgcggctattgggccgaggccgcgcggcagttctcctcgccgcggatgctcgccgtctgcgcgatgttcatcgccctgcgctcggcgctcagctggctctacatcccgctgaccgacgcgctgcgcatccagttcacctttttcatcacggccctgggcgcgtcgatctacggtccgctcatggcccttgccgaggggttcctttcggacacgatcggcttcttcctcatgcccagcggcggttattttcccgggtatacgctcaacgccatgctggcctcgctcttctacgcgctgttcttctaccgccggcagctctcggtgttgcgcatcttcgcggcgaagttcacggtgaacctggtggtcaacgtgctgctcggcgcgctgtggagcgcgctgctctacggcaaggggtatctgtacaccgtcacggccagcgtcctgaagaacgtggtgctgctgccgctggagacggcggtgatggtgctggtcttccgcgcggtgcacccgctgctcacgcgcctggcgctgatcccggcgcaggcccgcagcgcgattccctggatcgcgcgcaagggcgcccaaaggcaataaaacaagacgaaccccctgccgcggtttgcgcgcggcagggggctcgttttgctttgcggatttacgcttcccgcgcggtgcgcagggctctggcgagctggtccgggcaggaggtgccgttgcggcactggatgccctggcagcgggcgatgacctcctcggccttcatgccgcgcacgagcgcggcaacgccctgggtattgcctgggcagccgccctcgaaggagcagctctcgatgacgccgtcgtcgctgagcgtgatgtggatgctgcgggagcaggtgccccgcgtcttgtacgaaatctccatgggtttcaacctccgttgtatggatggaatggcgttcactggccctgcgcgccgagcacgcgcagcacggccgcaaggtccatgcgcgcgcagcggccgaacgcgctgtccgcgcggccgccgcccttgccgccgagctcggccaggaccgcgcgcagcgcctggcccgcgtggacgcgggcgcccggccctgcgcccagcgcgacggcatagccctcgccggacggcgcgcagaggaagcagaccgcgccctcgcgccgggtcagcagcgccagaccctcccggagtccgtcggcgtccgcgccctccaggcacgcggcgtacagcggccccgccggcgaggggacgggcgcaagggacgtcagctgcgcggcgatccgctcgcgcgtgagctccgcaaggcggtgcgccaggtctgcgttctgcgcgcgcagccggtccacggccgcgacgaggtcctgcgccccgcaggagaagaggcgcgccgcgccctccgcctgctcggcccgcggccaggcccagcgcagcgcgcgcagccccgccacaaagaagaggcgcaggttgccgtggctctgctgccaggagaggatgtgcagcgcctggacctggcccgtcgagcgcgcgtgcgtgccgcagcaggcgaccgcctcgcgcgagccgatgcagacgatgcgcagctccgggtgggggtccggcttcttgcgcagggggagggcctccagctcctcgggcgtggggaagaagcagcggaccggctcgtcctgcgcgatccaggcgttgacctcggcctccaattcgtcggcgagctcccgcgtcatgggcgcggcgtccgcgccggcaaggtccacatacgcgtcgtcccggccgatgtgcaggcccagggaataggcgtcaaagcgctcgcagagcacgtgggagagcatgtgctggcccgtgtgctgctgggagaagtccagccggcgcgctttgtccacgcagccgcgcacgacgccggagagcgggcgcggcgcgcgcacccggtgcacgatgggcgcaaggtccccctcgtgggagacgtcctccacggggaagccgtccagcgtgccggcgtcgcagggctggccgccgcccgtggggtaaaacgccgtgttggagagcacgacgtcgtacaaatcgtccgcgcccgcgaccggcgcgcaggcgcgcacctcggccgagaactcgagcaggtccggatcggaatggtagagcgcgatcatagaaaccctccttgccgcctcagcagcagaagatcagccgcccgccgccgcagaggctcatgcaggccaggcactgcaggacgttgcagagcaggttggagttgccgccgaccgtgcgctcgtgcgcctgctcgtagacgccgcgcatctgctcggcggcctggcggtactccatgttgccgggctccatgttcgccgcggtctggaaggcctgctgcgcgcgggaatacatgccctggcgcatgtagcagaggccgtagaggtaataccactcggccgtgcggttctggatgcggtccagggcgctgaccgcctgcaggatcagcccgcgcgagatcatctcccggatgtcctggaactgctcggaggaggcgtagcccccgccctgcgagccggaggagcggccgtagccgtacccgccgtaggacgacccgccatagccggagccgccataggaggaaccgccgtacccgtaggaagaggaggcgcccccgccggagcggatgcgcttgatctcgtcgtaggcggcgttgatctgcttgaccttttcgctgacctggtcctgcacctccttgggcgcgttggcgtagcggtctgggtgatacttcttgaccaggttgcggtaggcggtcttgatctcgtcgtctgtggcggacggggaaacgcccagaaccttatagggatccatcgtccaacctccttccttcggccacggcgtccatggtgcggggcattccctcgcgcaggacgttttccacaaggggccgggtcttttcgctgtcgatgacgtcgtagcagagctgcgcctggcagatgcactgcatcatcagggggagcgcccactcgcaggcctgcttgcggctgtatcccgccaggcgccagacgttgtaggcgtttttcttttcgtcgcgatcgtagtcgtccagggcgtcgagccagtagatccacttgccgatgttgtagcccataaagcgcagggagggctgagcctcctcgggcatgccaaaggcgaagagcttccccaggaaggtcgaaaagggctcggccgcatcgtccgggtcggcgcagcccgcctgttccagcgcggcctggccggcaaagagcgcctccaggtcctgggccagggcgggatagagcgcggagacgcgccgctgcggccggcgcagcagcagcccgagcagcgcggcggaggccttgccgtccgcgcggtcgtcccgcgccttttccgcggagaggagcaggtgcgcgtccgcgcagaagtcaatgctcgcgccctgcatcatgttgagctttgtgcccttgaccgggcagcggaggacctgcatctgcgtgtcgtccattacgccgtcgcgcaccagcgcgaggaaggccaggtcgtaccggagcagcgcgcggcacaaggggccggacctgcggccgagcgccttgcagattccgcagtaataggcgcgaaagcgcgcctcgtccttgattttgagctccggccggcaggggcggatgtagccgaacattgggaaggtcccccttttgcatgggcagcgaggaaataatgaaaaacgatggggtgtacagagagagccccgtcgtttctcaagcaaccttttttctattttacaccgcgaacttaaagtttgtagggcgcaagtcctaactttttgtgaactttgcgcatggtctttgccgcgatgcggctggcgcgctcggcgccggactgcatcacgccctccaggtacgccttgtcggcgagaatctcgctgtagcgggcctgcacgggcgcaagctcggcgatgacggcctcggcgacctcgtccttgagcgcgccgtagcccttgccggccaggcggtccgcgatctgctgcgcgccctcgcccgtcacggcggagaggatgtccagcaggttggtcacgcccggcttgttctcgcggtccacgcggatttcgccgtcggagtcggtgacggcgcggcggaacttgcggcggatctcctcgggcttgtcgaggatggcgatgtagctgttcggctcgtcggacttggacatcttgcgggtgggatcgacgagggacatcacgcgcgtgcccgccttgccgaagtagccgtccggcacggtgaacaggtcgccgtagaggttgttcatgcggatggcgatgtcgcgggccagctccaggtgctgcttctggtccgcgccgatgggcacaaggtcgctctggtagagcaggatgtccgcggccatgagcacgggataggtcagaaggcccgcgttgatgttgtcggcgtgcttctgcgacttgtccttgaactgggtcatgcgctgcagctcgcccatgtaggtgaagcaccccaggagccaggagagctcgctgtgcgcgggcacgtggctctggcagtacatgacgttcttctccgggtccaaaccgcaggcgatgaacagggccagcgtctccgcgcagcggcggcgcagggccgcagggtcctggcgcacggtcagggcgtgcaggtccaccacgcagtagatgcagtcgtactccccgctgtcctgcagggagacccagttgcgaagcgcgccgatatagttgcccagcgtcaggatgcccgagggctggatgccgctgaagatcgtctttttcttggcagggacttccgtcatctccacttacctcctaagggtgctgttcccaaagtttatgacgaaatcatgatagcacttgcagagggaatcgtcaaatgaaattcgcatgcgcggcgggcaaaactgtgctatacttagggcgaaggaagacgagggaggaaacgcgtatgcaggagatgcaggaattgtacgaagaggcgctgcgcgccatgacggagctgtgcgagagcgcgcagatcggcccgggggacctggtggtcgtgggctgctcgacgagcgagatccagggcgcgcgcatcggcacgagcggcacgctggaggtggcgcgcgcggcgctccagggcctgctggagccggtgcgcgcgcgcggcggcgtgctggcggtgcagtgctgcgagcacctgaaccgcgcgctggtgctgccgcgcagcgccataaaggagaaccgcctcaccgaggtctgcgccgagccctgggagcacgccgggggctccatggccacggcctattaccaggcgctggaggagccggccctggcagagacgatcgcggcaaaggccgggctggacatcggggatacgctgatcggcatgcaccttgcgcgcgttgcggtgcccgtgcgccttgcgcagaagaccatcggcagcgcgcacctgtgcgcggccaagacccggccggcgctcatcggcggcgagcgcgcgcactacccgcagaagatccgctgacgggtggtttgttaatttttccccgcccctcttgacaggggcgggcgcgtttgctatcatgatcccaagtttcatatcttcggctgtgaagagaaggagtacccggttcttccaaagcaaagagaggggcggacggtggaagcgccccgtgcggaaatcggcgaagtagtctcggagcctcccgctgaacccctgccctgcggggcggagcaagtaggcggcgacgcggtccctgcgttatgggggagcggcatcggcgcccttgcgcccgtgccggcagagtgcgcgcccgcgcagacgtgcggcgcgaaattaggtggtaacgcgaagatccttcgtcctatgttggggcggaggatttcttttttgtaagggagaaaggagaaaaacgcccatgctgctgagcaagttgttgacccgcacgcacttcgattcgtatgcggactttaagaagaactatgagctgcacgtcccggagcacttcaactttgcgcgggacgtcgtagacgcctgggccgaggcggaccccgaaaagcgcgccctggtctggctcaacgaccgcggcgagcggcgcacgttcaccttccgggagatctccgacctctccaagcaggcggcgaatttcctgagctccctgggcctgaagaagggcgaccgggtcctgaccctgctcaagcgcaactggcagtactgggtgacggcggtcgcctgccaccggatgggcgtggtcatcatcccggcctcggtgcagctggcgacaaaggacatcgtctaccgcgtcaacgccgcgggcatccgcgccatcatcgccaccgacgacgagtggagccaggcccaggtcgaggccgcaaagccgcagtgtccggacctggagttcctgctgctggcgcgcggcggcaaggacggctggatcgactacgaccagggaatcgcgcaggcaaagccggagttcacaatgccccacatcgacaactccgacgtgatggtctgctacttcacctccggtacgaccggcatgcccaagctcgtcgtccacgaccagacctatcccctgggccacatcgtgacggccaagttctggcagcgcgtggaggacggcggcctgcacctgaccgtctccgacagcggctgggcgaagttcggctggggctgcatctacggccagtggatctcgggctccgcggtgctggggtacgacatggataagttcagcgcccggcacctgatcgacgtggtgcgcaacgagcggcccaccaccttctgcgtgccgccgacgatgtaccgcttcatgatgaaggagggcatcacccgcgaggacttccagtccgtgcgctcctgcggcaccgcgggcgaggccctggccgcggagacgagccgcgagttccagcgcatcacgggccttgtgatccacgagggcttcggccagagcgagggcacggtgctcatcggcaacttcccgtggtttgacccctgccccggggcgctgggcaagccctcgcccctgtacgacatcgccatcgtggacgagaacggcgccgagtgcccggtcggccaggagggcgagatcgtcgtgcggaacctgcacgagagcgtgccgccgggactcacccgcggctactgggtggacggcaaggtccagcgcaattacgacgacgtctaccacaccggggacgtggcctgggcggacgagaacggcttctactggtacgtcggccgcaacgacgacgtcatcaagtgctcgggctaccgcatcgggccgttcgagatcgagagcgtgctgctgacgcatccggccgtgcacgaggtggccatcaccgccgcgcccgacccgatccgcggccaggtggtctgcgcgtcgatcgtgctctcggagggctttgcgggcacgccggagctgacgaaggagctgcagacctatgtcaagcgcctgaccgcgccctacaagtacccgcgcgtggttcgctacgtcgaggagctgcccaagaccgtctcgggcaagatttcccgcgcgcgcatccgcgccggcgaggacgcgaagaacggctgacgccgtttttgcgcgggcacgcctgtcaaatgagacggaaaaccgagggtttcgggagcccggcgctttacggcgccgggctttttcgctataatgcattgtgaacaaaaaatggaaagaaggtgaagtcagaatgaaggtgctcatcctctcctgcaacacggggggaggacacaacgccgcagcccgcgccatcctggaggagatgcagcgccgcggcctggacgcgcgcatggaggacgcgctgcgctttggcgggccgaaggcctcccgcatcgtctcggaggggtatgtgcgcatcgccaaggacgcgccggcgctctttggcgggctctaccgcgcgggcgggctgctcagctccggcaagcggaagtcgcccgtgtactacgccaacgcgctgtgcgccggggcgctggccggctacatccggcaggaggggtttgacgcggccgtctgcccgcacctgttccccgccgaggcgctcacgcgcgcccggcgcgacctgcccggaagcttccgcttctacgccgtcgcgacggattacacctgcattcccttcatggaggagaccgagccggacctctttttcatcccgcacgcggaccttgcacaggagtttgcatcccgcggcattgcgcgggaaaccctgttggcaacgggcattccggtttcgagccggttcctcgagcgggaggatcgccaggccgcgcggcgcgccctgggcctgccggaggaggggcgcatcctgctgctgatgaccgggtccatgggctttggggacgtgctgcccctgcccgaggcgctctgcggcatcgcgccggacgtgcgcgtcgtcgtgctgacggggaacaacgcgcgcctgcgcgagcagctctgcgcgcgctacggggaaggcggccgcgtgcgcgccctgcccttcacggaggaggtgccccggttcttcgccgcggcggacgcggtcttgaccaagcccgggggcctgacctccacggaggcggcggtcttcggcgtcccgctcatccacacggaccccatccccggatgcgagacgcgcaacgccgcgttcttctccgagcgcgggctgtccgtgcaggcctgcgggcgggaggagatcgtccgcgcggccagccgcctgctgaacgatccggacgcctgcgcgaggatgcgcgcggcgcaggcgcagacgctcaaccgctatgcggcgcgcgacatcgccgacatcgtcgagcgcggcggaagggccggggcggcgcaggaggactttgccatctgaccgatcccggggagccgatgcccccgggaaaacgagcgaaagggggacctgcatgttttatccgatcttattttccatcgccggcttcctttccggcggcgtcctgtattcctaccacgtccccaagctcctgtgcggggtggacgtggtggccgactcgcccgaccacaaccccggcatgacgaacgcgatgaagctctgcggcgtgcccgtcgggctgctgtgcctggcgctggacatggccaaggggttcctgcccgtgtttgcggcgctgcgcttcctgcgcatcgaggacccgtggctggcgccggtgctggccgcgccggcgctggggcacgcgctggccgtgttctatccctttgcgggcgggaaggcggtggccgtctcctttggcgtgctgctgggactcctgccgcagagcgcggcggtagtggcgctgatcgtcccgtatctctttttctcgacgatcgtcgtcatccggccggacgagcggcgcacggtcgtcagcttcttctgcatggcgatgctctgccttgcgggggcggtgtttgtgacgggccgcatgggcatcgccctgggcgcctccatcgtcgcggtcacggccatgtggaagaaccgggcgcggaaccctggcggccagggcgtgcgctccgaggccctgcccgagaaggggcggggatagccctgcgcccttacagcaagagagggggacggcgtcaaccgtccccctctcctgccatccgcccccgcacggtggcggaagaaccgcgcccggaaccccggcgggcagggcgtgcgctccgaggcccagcccgagaaggggcgcgcatctttgcagcaggagaggggacggcgtcagccgtcccctctcctgccgtccgccctcgcgcggcggtgggagaatcgcacccagaaccccggcgggcagggcgtgcgctccgaggcccgacaaggggcgcgcatctttgcagcaggagaggggacggcgtcagccgttccctctcctgccgtccgcccccgcgcggcggtgggagaaccgcagcgcggaaccccggcgggcagggcgtgcgctccgaggcccagcccgagaaggggcgcgcatctttgcagcaggaaagggggatggcgtcaaccgtccccgctcctgccgtccgcccccgcgcggcggtgggagaatcgcacccagaaccccggcggccagggcgtgcgctccgaggcccagcccgagaaggggcgcgcatctttgcagcaagagaggggggacggcgtcagccgtcccccctctcctgccgtccgcccccgcgtggcggtggaagaaccgcgcccggaaccccggcgggcagggcgtgcgctccgaggcccagcccgagaaggggcgcgcacccttgcagcccaagaggggacggcgttagccgtcccccgctcctgccgtccgcccccgcgcggtggtgggagaaccgcagcgcggaaccccggcgggcagggcgtgcgctccggggccctgcccgacaaggggcgcgcatctttgcagcaggagaggggaaggcgtcagccgtccccctctcctgccgtccgcccccgcgcggcggtgggagaaccgcacccagaaccccggcgggctgggcgtgcgctctgaggcccagcccgagaaggggcgcgcatctttgcggcaggagagggggacggcgtcagccgtccccctctcctgccgtccgcccccgcgtggcggtggaagaaccgcagcgcggaaccccggcgggcagggcgtgcgctccgaggtccagcccgagaaggggcgcgcatctttgcagcaggagaggggaaggcgtcagccgtcccctctcctgccgtccgcccccgcgcggcgcgcgcggaaaaacgcggtgagcgctgcctcgcactcctgccgcaggacgccgcccagggcctgcacgccgccgccgagcgccgggtccaggtgcagggcgtagcggctgccaaagccgccctgcgcgggatcgaacgcgccgaagaccaccaggtccggccgcgcctgcacgagggcaccggcgcacatggggcagggctccagcgtgacgtagagcgtgcagccgggcggcagggcccagcggccgagggccgcccccgcgcgccgcagcgcgaggatctcggcgtgggcggagacatcgcaggcggcctcgcgctcgttgcgggccgcggcgatctcccggccctgctgcacgacgatcgcgcccacgggcgcctcgcctgcgtccgcggcctcctgcgccagggcgaggcaccggcgcatccagcgctcgtgctcagtcaaagggatcataggcggggttgcgctccgggatcttgccgcagacctcggtgtcgcgccaggcggcgaggcgcgcgtggagggcgtcgcgcacggcgggcaggtcctgggcgaggttctgcatctcggaggggtcgttgaccaggtcgtagagctcgagggcgccgtcctcgaagtattcgatgagcttatagcgcccgtcgcgcacggcgcaggcgggggtcccgccctggttgccgtagtgcgggtagtgccagaagattggcccgcgggcgaaggcccggccctcgaaggcgtcgcgggcgttgacgccgtccacgtgctggtccggccgcgcgggcaggcccgcgtaggacaggagcgtggggtagaggtccggggaggtgaagaccgcgtcggtcacgcgcccggcgggaatgcggccggggaagcgcgccagcagcggctcgcgcaggccgccgtccgtcatccagcccttgccctcgcgcagggggtagttgcaggtgggcgagccctcggccgtggacaggccgccgttgtccgaggagaataggacgagcgtgttgccggccaggccctcttcgtccagcaggtcgagcacgcggccgatgttcgtatccaggatctccatcatcgcggcgtagaccgggtcgctctgcacgacgcggcgctccacgcgctcgtccttcttgtgctcgcaggggaagtgctcgcccgggacgatggcctcgaccttgtccaggcccatgcggcgcgccttgcggcggtacttctcgaccaggtcctcgggcgccatctccggcatgtgcacgaggtagtaccagaggttgaggaagaaggggcggtccttgtcgcgggagcggatgaggtcgagcgcgcggtcggtgaggtaggtgtccagatacgtgcccgcggggatgtccgagtcgtcgatgacggggttctggaagggcgcgaagtacccgtgcgccgggtggccccagtggcagccgccgatgttgacgtcaaagccgtggcgcgtgacgagctccgcgccgcccaggtgccacttgcccacgtgccaggtctggtacccgccctcgcgcagggcctcgggcagggtgaactcgttgtccggcaggtggtcgaggaagggcacctccaggagcttgccgcgctcctggccgtagatccagttggtgatgcccacgcgcgccgggtacttgcccgtcagcagcgaggcgcgcgagggcgagcagaccgggcaggcggcgtaggcgtccgtaaagcgcatcccctgcagggccaggcggtcgaggttgggcgtctcgtagaaggtcgagccgtagcaggaaaggtcccgccagcccaggtcgtccgccagaaggaatacgatgttgggttgcatgaaaaagccccctctctcttgtcgcgtttgttctagtatagcacagcgcgcgggcgaggaaaagcgccgattgttgcatttccgggaggggtatggtataaagagaggagaaaaaacgctgcaaaggggaaccgacatgaaatttgtctcttggaacgtcaacggcctgcgggcctgcatgggcaagggctttctggacttcttcaccgccgcggatgcggacgtcttctgcctgcaggagacgaagctgcaggccgggcagatcgactttgcgcccgagggctaccacgcgtactggaactacgcggtgaagaagggctattccggcacggcggtcttctcccggcaggagccgctctcggtttccatggggctggggatcgaggcgcacgaccaggagggccgcgtgatcgcgctggagtatccggacctgtacttcgtctgcgtctacacgcccaacgcgcaggcggagctgacgcgccttgcctaccgcatggagtgggaggacgccttccgcgactacctctgcgcgctggacgcgaaaaagccggtcgtcgtctgcggggacatgaacgtcgcccacgaggagatcgacctcaaaaaccccaagacgaaccgcggcaacgccggctttacggacgaggagcgcggcaagttcacgcagctgctcggcgcgggcttcacggacaccttccgcgcgctgcacccggggctggagcaggcctacacctggtggtcctaccgcttccgctcccgcgagaggaacacgggctggcgcatcgactacttcctgacctcgaaccggctcttcccccgcgtgaaggacgccgcaatccacgccgacgtctacggcagcgaccactgcccggtgagcctgacgctggactgatgcaagacccaaaaaaaacgccccccgtgcgggggcgtttttttgggtcttagagggactcggcctcgcggagccagagcgcggcgctggcatcggagggcatgcgccagtccccgcgcggggagagcgtgacggagccgaccttggggccgtccggcaggcaggagcgcttgaactgctgggagaagaagcggcgcaggaaggtgcgcagccacttcttgatctcctcgtccgaatagcggccctgcatggcggcgcggcagaggcggtagatcttgcgcggggagaacccgaagcgcagcaggtagtagaggaagaagtcgtgcagctcgtaagggccgacgatgtcctccgtcttctgggagatctcgccctttgtcgggggaaggagctccgggctgacgggcgtgcccagcacgtccagcagcacggacttgagcggctccgggctgcgcgcagcctcaaaggccgtcaggtgtcgcaccagggtcttggggatggagcagttgaccgcgtacatgctcatgtggtccccgttgtaggtggcccagcccagcgccagctccgacaggtcgcccgtgcccacgaccaggccgccgatcttgttggcgatgtccatgagcacctgcgtgcgctcgcgggcctggctgttctcataggtgacgtcgtggtcgttcatattctggccgatgtcggcaaagtgctgctccacggccttggagatggagaccgtgcgcagctccacgccgtaggcctcggcgagcttttcggcgttgccgcgcgtgcgggaggtggtgccaaagccgggcatcgtcaccgcgaggatgccgctgcggggaagattcaggtcgtcaaaggcgtgggccatgacgatgagggcgagggtggagtccagcccgccggacaggcccaccaccgcgcgccggatgcccgtgtgcttcaggcgcgtgaccagcccgccggcctgcagggcgaggatctcctcgcagcgctcggccaagtgcgcctggctctgcggcacaaagggcgtgggcgagatctcccgcaggagcgagagctcgcgcaggggcagggagaaggccgtccgcggcagggccgcgccgggcgcaaaggtgttcgaccggcggcggtccgcggcgaggcgctgtacgtccacgtcgcagatcgccatctcgttccggaagcgcttcgtctcggccaggatcgtgccgttctccgcgatgaggtcatggccggcaaagaccatgtcctgcgtggactccccgcggcccgcgtccgcataggcgtaggcgcacaggagccggccgctctggccctgcacgaggctgcggcggtaggccgccttgccgatgatctcgtcgctggccgagaggttgagcagcaccgtcgcgccggacagcgcgagcgcctccgagggcggcgcgggcacccagaggtcctcgcagatctccacgcccacgaccaggtccggcatctccttacaggcgaagagctggcgcgcgcacaggcgcacgcgctggccgcagagttcgacctcctcgtccacgccctcgcccggggcgaagtggcgcagctcgtagaactccccgtagttggggatgtgcgtcttgggcacaaggccgaggatgcgcccggcgcacagcaccgccgcgcagttgtagagcgccgccccgcagcgcacgggcaggcccaccgcaagcagcaggtccaagcccgccgtgcccgcaaggaccgcggagagcgcctcctgcgcgccgcgcaccagcgcgtcctgcaggaagaggtcgccgcaggtatagcccgtgagccccagctccgggaagaccgcaacgctcgcgcccgcctgcgccgcgcgctgggcggcgcggaccgtctccgccgcattgccggcgcagtcggccacgcgcaggtcaggcgtgatggccgcgatgcgcacaaaaccgtcgatcatgctcaaaaacccctttaccgtggatttctttcgcatttgatggtagcccaagccggccaagaagtcaagccccaagcgcgggcggcacgaatttgaaacgcggttccgcatggcggaccagatgcgaatttccgcgccggaacgggttgccagaagggaaaagatgcgatactattgtaaaagagacacggatgggggagcccgtcccgaagacagagatgaagggagattcgttttatggacatgaacaagaagatcgaagccctgggcatcgttccggtggtcgttctcaacgatgcggacgacgctgtgccgctgtgcaaagcgctggcagagggcggcctgccggttgcggagatcaccttccgcacggctgcggctgaggagtccatccgccgcgtggccaaggagctgccggacgtgctggtcggcgccggcacggtgctcacctgcgagcaggtggaccgcgcgatcgccgcgggcgcgaagttcatcgtctccccgggcttcaacccggaggtcgtcggctactgcgtggagaagggctacccgatcttccccggctgccccaccaccagcgacatcgagaaggccatgagctacggcctgaaggtcgtcaagttcttcccggccgaggccatgggcggcatcaaggtcatcaaggccgtcgccgcgccctacggctccatgcgcttcatgcccaccggcggcgtgaacgagaagaacctgctggactacctctcctttgacaaggtcatcgcctgcggcggctcctggatggtggacaagcaggccatcgcggacaagaacttcgccaagatcacggagatcacccgctctgcggtgcagaagatgctcggctttgagctcctgcacgtgggcgtgaactgtgcggatgcggacgaggccatgaaggtggccaagcgctttggcgcgatcttcggctggccggtcaaggacggcaactcctccaccttctccggcacggcggtcgagtgcatgaagaagccctacctgggcaagaacggccacatcgccatcggcaccacgagcgtcctgcgcgccaaggcgtacctggagtccatgggcttcgagtttgacgagtccaccgccaagtacaagggcgagaagctcaacgccatctacctcaaggaggagatcggcggcttcgcgatccacctggtcaacaagtaaaccgacatttcgggcgcgctgcgcgggttttcgcgcggcgtgtccttttcttttggccgcgtttcccgtatactgaaaagcgtaaaggaggtgcggaacgcatgatttgggacatcctcagctttccctttaagctcgtgggcaacatcgtgggctgggcgctctcgctgacggggcacatcctgggcttcatcctggggctcgtgctgctcgtggccggcatcgcgctgtgcctgacgatcatcggcttgatcgtgggcattccgctggcgatcgtgggcgcgggcatgatgctcaagagcctgttctaagcgggacgcgcgtccggacggcagaccccccttggggggcgcgccgcccgggcttttgcgcgcccgcggcccgatgggttggaggagggagaagcgtgaactatctctacggtccggaccgggactacacggactacgcccccggccgcgcgctgcgcgggggcgcggggaggcccaattttcccgtccggctggcgctggagctctacggccggggcgccgcggccctgggccggacgcccgtgcggctctgggacccgctgtgcggcggcgggtcgctgctgtttgcggcggcgctgctgggcgagcccgcgccggagtgggttctcggctcggacgcggacgagggggccgtggaccttgcgcgggagaacctggcgctgttgacgcccgaggggtgcgcccgccgccgcgcgcagatcgaggagcacctgcgcgcgttcggccggcagagctttgccgaggcgctcgggagcctggaccgcatcgcggcgcaggggcgcggcgtccgcgccgcggccgcggtctacgacgtcttttccggcgccgcgccggacctgcccgtgcggccgaacctcgtcgtgtgcgatctgccctacggggaccttgtggactggcggggcggcgcgcaggcgccgggcgcggccttcctcccggcgatcgggcggcatctggaggccggggcggtcgtggtggcgtgcatggacaagcggcagcagctggaggcgccgggctttgtccggctggaccggcagcaggtcggcaagcggcggttcgccgtctaccaaagggaatgaaaatccaaacaggcaagagccacggcggagggacgcgccgtggctcttgcctgcaattcgttttgcggatcaggtcaggggatagacgtagaggtagatgtcctcgtagcggccgtccggcaggcggaacccgccctcgacgcggcccacgcaccggaagccgatccgctcgtagagcgcgcgggcgcgggcgttgccggcgaccacggcgttgaactgcatggcgcggaagccgaacccccgcgcgcgggagaggctgtcgcgcaccagggcctcgcccacgccgcggccgcggcagtccccgcgcacggcgtagctcgcgttgtcgatgtggccgcagcggcccacgttgttcgggtggaggatgtagaggccgaggatcgcgccggtttcggcgtcctcagcgacgccgcagccggtctggccggcgaagaaggccgcgcccgaggcgggcgtcagctcctcctcctggggaaaggcgtccccggcgcgcacgacctcgttccagatcccgcacatggcggcaaggtcgcccgggccataggggcggatggaaaacggcatggggaaaagcgcctccttttttggcggaatcacagcagcgccagcaggcgctcgacgacgaagaccgtcgcgcacgcgcccagcgccaccgtcaggagcgacttgttccggaaggcgagcaccagcgccaccgcgatgcccgccagcgccgagagcaggctggccgtggcgtgcagcgcctccggaatggtcatggcggccagcaccgcgtagggaacgtagtagaggaaggactgaaagaaccggttttcgatccggcgcttgaagacgacaaggggcagcatgcgcgtcaggtacgtaacgcaggccatcacggcgaccgagccgaggaaataggcggtcatggcgcttcctcctctccggcgggctcgtcgcgcacctcggcgggcacggggaacttccaggccatcagcgccgaaacgcccaccgcgcacaggatgatgacccacccgcgcgacagctcccgcaggaggggcgcgtagtagaacagggaggagacggcggcgctgagcagcaccgcgaagagcacgggccgcaccttccgcgccggcgggacgatgatggccaggaacatgccgtagatcgcaaggcccagcgcggagcgcaccatctccggcagcgcgccggccaccgtcgcgcccaggatcgttcccccggcccagcccgcgtacacgcagagcacaaggcccgcaagatacggcgcggtcacgggccccttctgctgcatgcagacggcgaagacctcgtccgtgttgccgaaggagaggagcgcgcgctgcagcgtcgtcatgcgcgcgtcgaccttctgggaaagggagagggacatgagcgtatagcgcaggttgatgacgagggtcgtgacgccgatctcaaacaggggcgcgttcgcgagcaggagcgtgagccctgcaaactgcccggcggaggtgaggtttgtcatcgagatcagcgccgccatgagcggggagagcccgctctccacgcacatcatgccaaagacaaaggcaacggagacgtagcccaggcagatcggcacgccgtcgcgcgcgccgcgaagaaaggatgctctcaagtcggtctcctctccttgtcaaagagcgcgcggcgcgcggtggagcggcgcatccgctcgcgcaggtccgcctcgtcctggtcgatcaggtcctggcgcacggcggcaagctccgcggaaaaggcgtcgatctggcggacgagcacctcgcggttgagcaggaagagctcgctccacatccggtcgttgatgcgcgcgatgcgcgtcaggtcccggaaggaatcgcccgtgtaggcggccaggtccgggttgtcgttgcagttcatcagggacatggcgatcacgtgcgtcagctgcgagaggaagccgaccatctcgtcgtgcgccttaggcgtgagcacggagatgcgcgcaaagcccaggatctccgccagctcgtgcaccgcgtcgacggcggccttcgtgttgcgcgccgtgggggtgatgaggaagttcgcatcctggaagatgcgcgcgttgctgttgcgcacgccgctgacctcgcgtccggccatggggtgcgcgccgacgaactccacgtccggccgcaggaaggactgcacctcgtccacgacgccgcacttgacgccggagacgtccgtcagcagcgcgccgggccgcagcgcgccctggtgcgcccgcagccaggcgagcagcgccttgggatagaggccgaagatcaccacgtccgcctcgcgcacgagggcctcgtccatggccgcgccgcgggcgatgatcccttcctccagcgcgtaggcgatggcgtccgggtccgtgtccagcgcgcagacgcggtggcccagggccgtcaggcgccgcgcgtagcagccgccgatcagcccgaggcccacgatcaggaatttcgtatcgctcttcattcctctaacacctccacctttccgcccagggatttcaggtccgcaaagaagttcgggtagctcttgcgcaccgcctccgcgccgcgcaggatcaggggcgcgcggcccagcgtcgccgcgatggcaaggctcatgaccacgcggtggtcgttgtgacaatccacctcggtctgcgcccacggcgcgcggccggcggggaagccggaaacggtcaggctgtcccgcgtggaggagacgcgcgcgcccaggcggcgcagctcctgctccatggcggcgatgcggtcgctctccttgtcccgcaggcgggcggcgttgacaaggcgcgtctcccccgcgcagaagagggccaacaccgacaggaccggcgcaaggtcggggatggggtccacgtcgatctcccgggcggaaaggggggccgacgaaatgtgcgcgccgtccacgccccattcgacccccgcgccgcaagcgcgcaggatctccaggatcgcgcggtccccctggagggagtcgggcgcgaggttcgcgatgcgcaggccgccctgcaccgcgcccgccgcggcgaagaacgcggcctgggagtagtcgccctccacggcgacgtcctgcgccgcatagcgctggcggccggggatttccagccggtcctccccggcaaagcccgcgtgcacgccaaagcgcgcgagcatttgcagggtgaggtccacatagcccttagaggagaagggcggcagaatccgcaggacggaatccgcatccagcaggggcagcgcaaagagcagcccggtcaggaactgggagctgacgtccccgcgcagcgtccacgccccgccgcgcagggggccgcggacgcgcaggcagtccgccgcctgcaaaaagggcaggccctgggcggcaaagaggtccgcatagaccgactgcggccgggcgaggagccgggccgagccggtgaagaccgtctcctccggcgagagggcgaagagcgggatgaggaagcgcagcgtggagccggattcgcggcagcagacgcggcgcgggccgagggcctgggggaacgccgcgccgcgcacgagcagcgcgccgtccgccgcgcgttcggcctgcgcgcccagcgccgcaaggccgtccagcgtggcgagcatgtcctgggagtccgaaatgccggtcaggcgcgaggatccgtgcgcgagcccggcgcacagcagcgcccggtgcccgagggacttggacggcggcgcggccaccgcgcccgaaagatgcgcgggggataccttgacgatcatggaaacgcctcctgccgggacttagagctcgcggtcgatgaccgcggcgatgcgccgggccttcttgaccagggaggcgtagtgctcgggcgtgagcgactgcgcgccgtcggaccaggcgcgctccgggcaggggtgcacctcgatgatgaggccgtccgcgccggcggccaccgccgcaagggacatgctctccaccaggcgccagtcgcccgtggcgtgcgaggggtcgatgacgatgggcaggtgcgtcttctccttgacgatcgggatgacggacaggtccagggtgttgcgggtgtacttttcaaaggtgcggatgccgcgctcgcagaggatgacgttctcgttgccgccggccatgatgtattcggcgctcatgagccactcctccatggtgttggcaaggccgcgcttgagcagcacgggcttgttcgtcttgcccagggccttgagcaggtcgaagttctgcatgttgcgcgcgccgacctggatgaggtccacgtgctccacgaattcgtccaggtgctcgatggccatcagctccgagacgatgggcaggcccgtggccttcttggcctccacaaggtccaggatgccctccgtgcccaggccctggaaggcgtagggcgaggtacggggcttgtaggcgccgccgcgcagcatcgtggcgccggcggcctttacggccttggcggtctcgacgatgggctccaggccctcgaccgagcaggggccggcgatcatggcgatcttctcctggccgccgatgcgcacgccgccgcagtcgatgaccgagtcctccgggtggaagaggcggttgaccttcttgtacggcgcggagacgcgcgtcacggtgtcgacataggggttgacggcgatctgcgtctcgtccacgcgcgtggtgtcgccgaccaggccgaacacgttgtagtcctcgccgtagatggtcgtgaccgacaggcccatctcctcgaaggagcggacgagcttgttgatttcctcctggggggcgccctttttcatcgaaataatcatcgggtttccttcctttcctggatgtagttcttgaggaagcagatcgcctcttcatagccggcaaagcccttgccgtagacggtcttgacgcatgccttgcccgggtaggagatgtggcggaagtcctcccggtcgtagatgttggaaaggtgcacctctgccgcgggcaggctcacggccttgagcgcgtccagcagcgccacggacgtgtgcgtataggccgcggggttcatcacgatgccgtcgaacttgccgtaggcctcctgaatccagtccacgagcacgccctcgtggttgctctggcgcacctcgcactcgatgccctcgcgcgcgcagaccgcctgcacaaaggccgcaaggtccgcgtacgtctgccggccgtagatgtccggctcgcgcaggcccagaaggttcaggttcgggccgttcagaatgagaaatttcatcggcacatctccttaaactggtcttcgatggcgcgcgcggtttcctccgccgcgccctcgttggaaacggaaaagtccgccgccgccgtgtagagcggcaggcgctcggcgtacatgcgggcaagggcctccgcgctcgtggagagggggcggctcgggtccgcgctggacaggcgcgcaaggccgcgctgcacaaagcagaccgccgcattggcgcgcagcaggcgcacgttctccgggttctttacgatgccgccgccggtggccaccaccagcccctggcgccccgcgacctcccgcagggccgcggtctctcgcgcgcggaagccggtttcgccctcgcgcgcgaagatctccgggatggaaagccctgcgtcccgggcgatcttttcgtccaggtccacgagctcgcggcccaggcgcgcggcgagcaggcggcccagcgtagtcttgccgcaggagggcatcccgatcagcgccagggagcgcatctcccgcgcaagctcgccgtagacgcggtccgtcccggcgtccggcagcggcgcgccgaggaagtgctccgccgcggccttggcctgcgccaccagcatccgcagcccgttcgcacaggggatgcccaggtcctgcgcctgctgcagcaggcgcgtgcgcagcgggttgtagatcgcgtccacgacaaaggtcaggcgggaaaagggcgcaaggtcgatcggcgcgccctcgagcttggggaacatgcccacgggcgtggtgttgaagaggccctcggcgtccgcgtgcccggcggccgcctgctcgtaggagatctggcccgggccggacaggcggcggctgacgacgagcacctggcgcgcgcccagggactgcgccacggcgcaggccgtcttgctcgtgccgccgctgcccagcaccaggatctttttgcccgccacggcaaagccgttggcgcgcagcaggtccgcaaggcccgccgcgtccgtgttgtacccgaagagcaggccgtcgcggttgacgatggtgttcaccgcgccgatgctgcgcgcgacggggtcgatataggtcaaatacgggagaaccgtctccttgtaggggatggtgacgttgatgccggcgaactcccgccgcgtcaggaacggcccgacctcctcccgcggcaggggcaggaggtcgtattcatagccgcagagccgttcgtggatcaccttggagaagctgtggcccagcttttccccgatcagaccgtaacgcatggcccctcctttctcgcccacaggtagccgaagcggcccatcatcaggtcgcacagcgccatggccgccgcggcgtccaccacggcgcgcgcccggtggaagatggccgggtcgtgccggccgcggatgcgcagcttcttcggctcgcccgtgcgcacgtccacggtgtcctgctccttgtagatggagggcgtgggcttgacggccgtggagaacaccacgggcatgccgtttgtgatgccgccgttgacgccgccgttgtggtttgtgcgcgtcacggcgcggcccggcgcaagggcggcgaagctgtcgttgagctggctgcccgcgccgtgggcaaagccgaagcccaggccgaaggccacgcccttgaccgcggggatcgagaagagcaggtgggagatctcgctctccacggagtggaagaacggctcgccgatgcccgcgggcaggcccagcaccgccgtctccagcacggcgccgagggaatcgccctcgctctgcgcggcctcgatggcaagcagcatcctgcggcgcgcggtctcgtccagcacggggaagccgggggacaggagcgaggcgaggtcctcgccgaggcggtcccaggcgaagtcccggtccgcgatgtcctggcaggacttcacgtgcgtgcccagggtcacgccgtgctccgagaggatctgctgaaagatcgcgcccgccgcgacgagcccggccgtgacccggccggagaagtggccgccgccgcgcgggtcctgatagccgccgtacttggcaaaggccgcgtagtccgcgtgggaggggcggggcaggaactgcatctcgtcgtagtcctccgagcgctgggcggtgttctcgatgacgaaggtcagcggcgtgccgcaggtgcggcccttgtagaacccggagaggaagcggaactcgtccgcctcctggcgctgggtggagatcttgcccgccgggcggcggcgggtcagcgcgtcgcggatgttttgcaggtccagctcgatgcccgcgggcaggccgtcgagcacaaagcccaccgccgggccgtgcgactcgccaaagagcgtgagggaaaaattcgtgccgtagctgctcctcatgggacatcc

SEQ ID NO: 1651 - DNA, 17103 bp, Unknown
  16S sequences of unknown bacteria
cagcgcggcaagcgtgaacgacagcagcttttttatcatatgcgtttttcctttccgaaaaatttcgtacatcttgattatacagcttgattgtaacttatttgcacggctttgtcaagcactgccgccggaccgacgtttattttcgcaaaatacaccggaatattttttcgtatcgttgacaatatattttttgtgtggtagaatatattggttggtaaacactgctttatattatttcccggatttgccgtaaggcggcgaagattaagaggctttgcgccggttttcgcggcaagatttcggcacggatttcgaaaggaaggcagcccgtattcgggcaaggtgattaaaatgacgtattcagaagcaaaagcaaagcttgaaaagtacggacaggaacagcttcttcgctattacgacgagctttccgacagcgaaaaacaggctcttctcgatcagatagattctgcggacatgtcggttgtgtcgtattatgacaagcgcggcgaggtcgctcccgccggtcatatcgagcctcttgccgcaatggagcttgacgagatcagaaagcgcagcgacgaattccgccgcatcggtctcgacgcgatacgcgcgggcaaggtcggcgcagttcttcttgcgggagggatgggcacacgtctcggctccgataatcccaagggaatgtacaatataggtatcacgaaggaagtctacatcttccaaagaataatcgaaaatcttctcgacgtggtcaacgaggctgagtcgtggattcaccttttcatcatgacaagcgagaagaacaacgaggcgaccgtaaactttctccgcgagaagaaattcttcggatacaatgaagaatatgtgaccttcttcacacaggagatggctccggcagtcgattacaacggcaagatattccttgagacaaagagcagaatggctacctccccgaacggaaacggcggctggttttcgtccatgctccgctgcgatgtggttaagatcgccaaggaagcgggcatagagtggctcaacaccttcgcggttgacaacgtgcttcagcgtatcgccgatcccgttttcgtcggcgcaacgatcaattccggatgcaccgtcggtgcaaaggtcgttaaaaagaatgctcccgatgagagagtcggagttatctgcctcaaggacaagcatccttccatcgttgagtattacgagcttaccgacgagcttatgaatgcgaagaacgagaagggagagccggcgtattacttcggcgttattctcaactatctcttccgtcttgacgagcttatcagcatcgcaaaggacaaaatgccgcttcacatcgtcgagaagaagatcagctattacgacgacgcgctcggcaagaccgtaaagccggagaagccgaacggatacaagtttgagactcttgttctcgatatgatccagctttccgaaagctgcctgccgttcgaggtcgtccgcgagaaggaattcgcgccgatcaagaacccgaccggaatcgactccgtcgagagtgcgcgcgagctctgcaaggcttgcggaatcgagctttaaaacagaaccgaaagggctgacgcattttgcgtcagccctttttgcgtattgaggcgcggttccgccgatctaccgataaaaccggataaagcgccgctttgcgcgggcttggaaactttttttcaaagctcggtcttctcgatctcctcacgcgcggaaaaacattttccgcttaccatcgcgtcttttccgccgcccgatattttcagagcggtcttcatcttttgaagaattttcacggcttcgcccgccgccgacgcgagtacgaaggtgtatccgtctttgtcatttcccgaaaaagccgcggcgttcggaaatcggcggagcgcttcgttgaccgcgatcctcagatcctccgccgaaaacgagtcaaagaacatgattccgctttccgagtgctcggcggtctttgcggcgagcgtgcgcttcagcccagcgcattcgactttcactgctccgagccgttcctcgagcctttcaaccgcctccgggatctcgacgggcttgaccgacagggaacgcgccgcgtcgtcaagcgcatcacactttgcaagaacatcgtcaagcgcatcgccgccgcacagcatatggatgcgcatcccgcccttgtagcgtatcattccgatgaattttatgattccgatctcacccgcactttttacatgggtagccgcgcaggcgcagcggtcataaccgcagatctcgactatccgcacggtttcgtcctcggcaaaatccttctttgagcgaaattcgagatcggcgagagtatcgcgctccggataaaatatgttgacggggatattctcatagatcgcacggtttgcaagaagctcgatatttctcagatcgtctttggttatctccacattgatgtcaagcgtgacatcctcgcttcccatgtggaatcccacgttgtccgcgccgaaggtgctgcacagaagcccggatactatgtgctctccggtgtgattctgcatcctgcggaagcgtatgtcaaaatcgatctcgcaccggacatttccgctcaccggagcatctgtaatatgcacgatgtcgtcgctgcggacaaaggcttcgcttacgcgcacaccgccgatgtaacccgtatcgcacggctgtccgccgcctccgggatagaacgcactccgattgagcacgacctcaaatccgcgatccgtttcggtgcaggataccgtctgcgcgtcaaattccgatatatagctgtcgtcgtagtaaaggcgatgtgtcatgtgttttctccgttctgacgatttttgagaagccgctgcgcgccgagcgcgtgcggcacatgccgcaaagttttatgagatgcggaaaacgcggtgaaaagcggagcgtcgccccgttttcgggaacatgataagtgaacgtacaagttgggtcagatggtataccatgttctctaaactcgcggacacggtaagtgaacgtgcaactacagactaattttataccgtgcgtcagtcgcgggtttgcatcggagtttgacgcgcggcgtcaaactcgcggacacggtaagtgaacgtgcaactacagactaattttataccgtgcgtcagccgcgggtttgcatcggagtttgacgcgcggcgtcaaactcgcggacacggtaaaataacgtgcaaccgcagaataatgtaataccgtgcttctgcctcggattaacattggagtttgacgcgcggtgtcaaactcgcggacacggtaaaataacgtgcggttacagattaacgttataccgtgcgtcagccgcgggtttacatcggagtttgacgcgcggcgtcaaactcgcggacacggtaagtgaacgtgcggttacagattaacgttataccgtgtcctattatacccgctttttttgcgaaagtaaagcaatttcgcgtataccggagcgtcattttgcagatactctttgaaaagggaaaggagcgcgcgttttcgcgcggttcggtatggataataaaaaaagcgcaggcttgatctttccggcggatcgtatatggatcaatgcatcggcgagcgcggtcggatgcgaggaggcatcggggcctctcggcgcatactttgatatcaaaggggataaggacgcgcttttcggaacagaaacctttgaaaaagccgaggcaaagatgcagtatctcgcactttcgtgcgctatgcagaaagcgggtgtcggggaagaatccctcgggatgatattttccggcgatcttctcaatcagtgcgtaagctcggcatacggacttctcgattacaatgtgccgtttatcgggctgttcggcgcgtgctcgacctgcgcggagggacttctcgaggcggcagctttctgcccgtctcaggtgaagtgctgcgcctgcgtgacatcatcacataactgtacatcggaaagacagtttcgcttcccgctcgaatacggcgggcaaagaccgccgagcgctcagtggactgtcaccggggccggtgcgtttatcgtttcatcggaaaaggggagcgcgtccggcggcgccgatgtcgaaattgccgatgccatggcggggatatccgtggattacggaataaacgacgcgaacgatatgggagcggctatggctcccgcagcgtacagcacgcttgaccgctatttcagggcgacgggaagccgcggagcggactacgatctgatcgtgacgggagacctcggacggcgcggatccgagctgttttcggcgctgtgcagtgagggcgggtacgatatttcgcggtgccgcgcagactgcggagagcttatctacgatatcgaagcgcaggacaagcactcaggcggctccggctgcggctgcagcgcggcggttatggcatcgtatattgttccggggatgcgcgcgcgccgttattccaacgtgctttttataggaacgggtgcgctcatgaatccgcaggcgcttatgcagggcgaaaacatagtcggtatcgctcacctcgttcacctcagaatttccgattaacaaagcgaaaaaaagcgatcaggcgcacggactgcggcggtaacacgaaaccgtaccgtcatggaagctgtccgccgtgcgcggcagattttacggaatgcggacgtgccgtggacgcggttgttcgaagaaaggcagagaatctatgtttgctgaatatctgaaggcttttgtcataggcggacttctgtgcgcgatcgcgcagatactgatagacaaaacaaagctcacacccgcgcgcatacttgtggcatacgtttgctcgggagtactgctcggcgcaatcggcgtatacggtccgcttgccgattttgcgggcgcgggcgcgacggttccgcttaccggattcggttatcttatatcgaccggagtccgtgaggcggtcgacgagcacggcttgctcggcgcactttccggtccgatcacggcggctgccgtcggaatcacggcgtctctcgtgttttcgctgatcgccgctttcattttcaagagccgcccgaaaaagtgagcgcgcgtgatagttcgacaccggagcctgctgcggatacggtcggcataatagaatcaggggctgcctttttgcggcagcccctgtgtcggttgcgttcattcgcctgttaccgttatgatacggcatccgccttcaaaggcagcatcagtgacatactgcggaattttccctcccacgagatcttcgtggttgaaatggagatgtcccgtgaatatagcaaccacattggactcgtctgatatgacatattcgtacatattgcgggtggctgcagagtagttgatgtcgctttcttctccgagagtgatgtcgcgcccgccccaatctgcttttgtatcctcgacaagagtcggggaatggaagggaatatgagccatgagcagtatcggttttccgagatccgatacttttttgagctcttcaagctgactgtcgtaataggtattctcgtcgttcttcatcgaaactatgaagtagtctcccatgtcaacggattcaaagtaaatgtctccgcccatgaattcggggaatttcttgagcgcgtacgccttctgcgcgaacgacgactgatagttgtcgaagaacgaccagtcatggtttccgaagcagtatgtgaaatcgattccggattttgagaggtactctttgaacatacggtcgatgttcgcctcggacgagaagtcgatcatgtctccggttgcgagaatgtgcttcgcttcgaactgacgggcgtattcaagaaaatacgggaagcggtcggcagagttgatgcctcctccgagagaggtgaaaagtgcggttctgtcgatcgcgttctgcgtccgctttgcgccggttgcacccgttccgaattcgtcgtcgtacatgagtgtaaaatgcgaatcggtaagctgcacgagagtatcagtccctttcattccgggaatcttcaccgtgcagaacacgggatcaatgaggctcgatgcgtttatgttctccgcaacgtcgaaggccttgtcgtaggagacggttacttccgctctcatgccgcactttgcgtcgagagcttccttgtttgagtataccgcaaaaccgtcgtcgcttttgtacccggtgatctccgctataattccggaggtgcttcccgccgatattaccgcaaggtatgttccgtttttcaagaagccgtgagcgtctccgtcagccgatttcgtgctgacggtcacgatctgctcgtcggacgacgaagcgtcgagcgttccgctcttctcggctcgaggctcggaagcaacggtggaagcgtagtctccgttccaacggtagacacgaagattataggaggcatcgctgccgactgcagcatcgaatttcagcggaacggtgatcccatcgcaccacgagagcggcgcaacgtaaaatctgagcgcaagctcgcccgcgcggagctgaactgtgctttgggtatccttgctcgtgcagaaacgctcggtaaatgttccggcgatctcgatttcgtcggaagccgtgggctgcgcaaacgagacatcccatcccgagcagtagcggataatgaagatgatgtcacttgcggaggattttccgtcgccgctgacgtcggcgtattcctcaaagaatccgtccacgtcccaaccgacatttttgcgtatgaaaagcacgatatcctttgtatttatgtcgccgtcgcggttcacgtcgcccattacataaatcttcgcgcggtcggtgacgatccctacctcggtgagctgcagagtgcttcccgcgggaacaaagctgtcgtccgcaagaacgctttcaccgtcgggtgcgattacgtcaacaccacggctgcttacaagctgtgacttcatttccgcagccgtcatttttgcgggcacgttgactgcgatccgatccgaaccgacgagagagtagacagccgactcggaggtcacaagtccgtcggaatacaaagtttcggacgaccccggctctgccgttgccggaactgcacataaaataagagtcattgcggcgatcacaatggatacgatccgtcgtttcattttttaatatcctttctgctttttttgcttaattgtatcataagtacagcgcgatgtcaatcgcaaagcatgagattgtgcaccgtgcggggaacatcccgaaaaaacgatatccctccgcaaaacggagggatatgcgggcggggcattattcgtcctccgcctcttcttttttcttttcggttgcgcttacccattcgagacgccgctcatgaagcccgtcggaatggagaagcagatgctcggtctcgacgtcgatcggaacaccgtcgtctggaatcttcgtgagtctggagaacacaagcgaaccgatcgtgtctattccttccttatcctcaagcgagatcccggtctcctcctcgaattcgtcgagagggcacgatgcgtgaacgagccatgtcgaatctccggtgcggcttatttcgggatcgcggtcgtcgggggtgtcggactcgtcgtaaatgtcgcccacgatctcttcgagaaggtcctccatggtcacgactccgcacgcttcgccgtattcgtttacgacgatcgccatgtgctgtcccttctgcttcatttcgcggagcacgctgtccgtctgcatggattccggcacgaacagcggcgcacgcacaagctcggtgaacggacgcggagagccggagagacggtctgtcagatattctttggcgatgagtattcccgttaccgagccgatatcgtttttatagaccggatagcgcgaatatcccgtatcggaaattgttttcagtatttcatcgtcgggagtgccctcgcatatcgcggtaacatccatgtagtgggtcattatctcgcgaacggaatgctccgaaaaatcgaagatgttttcgatcatttcacgctcttcggaattgagcgcacccgaggtctcgccttcgtcaacaagcttcagaatctctttttcggtgacatccgtccgtgcggcgtccggctcgacggagaaaagcttcagtatgagtcttgagatcagcgcgggaattcccgcaaaaatcagagagaatttacacgccgcgtcggcggctttctgagccggaacaaacgatgcggcattaccggcagcggcggcgggtatgtatactccgaagcagagtatcacgagcgccgacacgcagatcacgatcggcagtgcgagaaagcttacggtgtccggaagtgctcgttcgagtttttcggcaaatgcataagaaacgcagaccgaggcggcaagcgcacagaaaaccgcggaacaagcaagacgatagcggcaggcattacgttttctgtaaagcttcagtgaaagaggctcttcgtcctcctcttcggattcgtccggaatacggatcgccgagagtacggatgcgctgaatgaaaaaaatgcacagaaaacggtaaagataatgcagatcgtaagacatcgcccgagagggtccattgaattatatctcctgtgtttggattagattcagagaatctcaattggttatcagtatagcatgatattacgcatttgtcaataacaaaacgatagtgtgcgtcgatcgttcggcagagtgatctttcaaaggctatggtaataaactgcctcggatgtgcgtcggacgatctgttccgcgatttcatcgatcgggaatatgcaccgccgtcttgcgggaaagacagaaaaagctttctcccgaggaacagagcggaatttttgcggctgcggatacatcggtcgggagcatggaaaaacaagcgaaaaataacatgccgacggttgcgccgatgctgcggcggaccgtcggctttaccgtatgcacggaccttgccggaagagagtcctttattcgacgttcgaaattcgctaaaacattccggctacagcgtatattatgccgtacaggaatccggcgaaggtaccgtacagtatgacggggccggcgatcgtgaagatttttgccccgacgccgagtacaaagccctccgcttttgaatcgatcgcgcacgatgcgaccgcgtttgcgaatccggttatcggaacgagcgttccggcgcctgcgtgcgatgcgatcttgtcgaatacgccgagtccggtgagaagcaccgcaatgaagatcagcgtaaccgaagtgagagacgcggcatccttcttttcgagaaacatacggtaaacgttcccgagcccctgtgccgctgcgcatattgctccgccgaataaaaatgcgcagaggcagtttttcattatcggcgaccccttcgatgcgctttcggcgagctttttgtagtttttcttatccaaaatccgacctccgttcggcacgcaccgtttttgcggaccgaccgctttgcacagcgccgcggtgcgtgatgctaaagatattattctcattttttctcacattataagaaaatatttgacggctttcgttttttgtagtataatgcatttgtaaagcggtcttctgccgatttgcggattaccgcattttcaaaaaagaaagaaggtaacggttcatgtctatttgggatgatattgcaaaaagtgcttcggacgcggcatcgtttgccgtaagaaaaacgggagaattcacgtctctggcaaagatgaagcttgcacttcacacggaggagacgaagctttcggattgctacaatgagataggcagactttattatatgtatcagcgtgagggaaaggacctcgtctcggagattgcgcagcgcattgcggatgcggatctcgtccgtgagcgcatagctgcgatcaaatcggaaatatgcgatcttcaggacaatatgatctgtccgtcatgcggtgagaagataagcaaaaattttgagttctgcccgatctgcggaacgagacagacaaaaaaatcgcaggagtccggcggcgaaacgacaaaagccgaggacggagcagctaaggaataattgaccgtaaaaaaagacaagcaggagcaaaagcccctgcttgtctcggcttgtgatgaaatcagtcggcataagatatctgtgaaaccgtgtatcctctgttctcgagggacgcgacgaggccgtcgtctccgagcatatgcgcaagtccgacaacgtaaaatacgtttttgtgatctcggagatattccgatgcgcgttcgaccatgagcttgtttcggactacggtcatggcgttgttgtattcttcggcggcggctttctcttcatcggtcgcctcttcgtcatcctcggagaaaagaagatcgtcaagaacatccgtctttccgtatttccatgcgtcgtacagctcttcgagagatgaagagtaattctttatatactccggatcgaccgtcgacgaaaggagaagctcctgtgtgctttcggaaagagttgcgaaagcgtattcggtctccatgtagtcctctatttcgagaatttcgatcccgagcttttcggagtttttgaggaaataacggtcaacgccgaaatcggatgaaaatctgctttcttccgtcagcgcctgatcgatgatctgactccagatcaccggaaaatagtagtccatcatcgagttgtagtagccgaaatggtcgagtacgccgcgcgctgttttgtacaggtccttgtctatgtgcgccgatatcgtggtggaatcggtgtagatgaacatcttcatcatttcgatctgcgcgtttgtatcgcgctcgagcgagatcacgtcggattcgactgcgagataggcgcatgaattatatgcgtcgtaaatttcgtctgggtaaagattcgtatccacaagcccgacgtgaatggagccgagcagatagaaatccccttcgtatccgttgccggataccttccagaaaagcggctcggagacatctccgcttccggacggggcaagctttttgtcatcgggtatgggatcgctttcggattcgaatgcgcttaccgatgaaggattgtcgttttgctcgattaccgatttgtcgatgaaggcgagcatgccgcacgaggtcagcacggaggaaaagcagagtacgagcacgagcagggacagcgttattctttttctcattttgctttttcgcttttcaggtaggaaaagcgtcctttcttgacggaatgaggtcggcggaatcgggtatttcggaatgtgttttctgcgggcgggacctgctcccggacgtgcgcccgaccgattcgcacattgtattccggatatcggaacacacgcgccgtttcccggcatggtcggttagggcattctcgcagagaggatgccgatcgttttttctttaagtatatcatatccggcgcaaaaaagcaactttgtatttttattacatgacacgcggcgaaaaccgatgtgctttcgcacgcgcacaaatcataagaacggcggcggggcacttcatcctccgccgaacaaaacaaattcacgccgaacggcgtacggaggaatcggattatggatgattttatgaataccgtgacggagaagatagttcccgaagcgatcaggcttattatagttatcgtgcttgccgcactctgtttctttctcataaagcgctttacaaaatttatcgcgcgtccggcgcacctgtcaaagctcagcccgtcggtcaaaacttttctcgtgagctttctttcgatcgcgctgaaaacgctcacagtgataacgggcgcgtcgatgctcggtgtcccgatggcatccgtggtcgccgttatcggctctgcgggacttgcattcggacttgcgcttcagggaggactttcaaacatagcgggcggatttatgatactgatattcaagccgttttccgtcgggcattacatcgaggtcggctccttcgccggaacggttactgatatcggtgtgttctacaccactcttctcacatatgacaacgtaagagttgtgatcccgaattccaccgtcacctccggaacggtcgtcaattattcctccgaggagaagagaagagttgatatcgatttcacggcggcatattcgacagatgtggaaaaggcgaaacgcgcgattctcgaggcggcttattcaacggggaagatacttccggagccgtgcgccgaggtcgtgatgaccgagcacggagaaagcgctctgaaactttcgcttcgcgcgtggtgcgcaacctcggattattggacggtcaaatttgaaacgacggaaaaagtaaaggcggcatttgaccgcgagggaatcgaaattccgttcccgcagctcgacgtccaccttgacaaatgaatattcaggactcttcaccgggaaaactcattttcccggtgatttttttctgtccggctttgattttacattgtcccaataagcctttgcagcctgttcggtcttgtttgtgccgaattcgtaatatttacgtccgcgcagatcctcaggcagatattcctgacggaggtaatcgttttcgtaatcgtgcgggtagcggtatcctttgaacttcggcgatctcagtatttccggcaccacggttccgcgcccggcgcgtatgtcctcggcggcgcggtcgagcgcacagtacgccgtgtttgacttcggagcatttgccagagttaccgccgcgtttgcaagcggaatgcgcgcttcgggaagtccgagctcctttgcgctttcgacgcacgcgcgcacaatgaccgccgccatcggatatgcctgcccgatatcctcggaggctatcaccatgaggcggcggcagggggagattatatcgcccccttcgagaagctttgcgaggtagaataccgccgcatccggatcggagccgcggatggatttctgaagtgcggaaagcagatcgtaatgtacgtctccgtcggcgtcgaattgccctgcggcgacagacggtgtgagagaacggacgaattcctcgtccaccgtatcggtgccgcttccctttgcgcagtttacggaaagctcgagcatcgtaagcgcacggcgcacgtctccgcctgcgcatcccgcgatgaaggcatatgcttcgccggtaaacgaaagagcgctttcgccggattcttcgaataccgccctgagcctcgggatgatgtccgatgccgtgaccggcttgaattcaaagaccgagaggcgcgagagaagcgcatcgtatatataatagtacgggttttccgtggtcgatgagatcagcgtgatccgaccgtcctcaatgtattcgagcaggctctgctgctgctttttgttgaaatactgtatctcgtcgagatagagaaggattccgccctgaccgatcacgctgtccgcttcgtcggcaatctttcggatatcggcaagcgcggctgtcgtggcgttgagacagcgcagctccattcctgagagggatgcgatgatcgacgcggctgtggtctttccgcagccgggaggtccgaagaataccatgctcggaattctccccgacgcgacaagcgcccggagcgctccgttctttccgataagatgagcctgcccgaccatttcgtcgaatgacgaagggcggctgcggtcggcaagcggcgcatttttgtaagtgtaattattcattgcgaaacctcataatatagttaaggcggtcattgccgatgcgttatcgcttcttatgcgtacaggcggcgcatcggcattaataatgatatcacattttcgtgaaagcgtcaaggaggagccgtggagtatacgaaaaaggtaacgtccggagcgggattttccgtttcgctcccgcagttcgaggagtgtccgagaatgaacgacttctacggatatgcgagggaaataattacggagaatttcagacgcgcgagggaggagacgaagcgcggatttttcacggcggatttctccgtgacggacggcggcgacgggtatgtgacggttacggtgcgccaaagattcagattcggcggaaagtgcgaagcggaaaagaaggtgtcgcatacatggtacggcggcgagatcgctccgccgaggcgaaaacgcggtgcgcttcggccctggggataatgaaacgggcgcgtttcggcggcagtgcggcgaaacggcggaaaatcggacagcaggattaaaaatctgtcggcggagaggacacttttgcttcgtcgccgttcacagtcgcttattatatgaaaaggggcggacggtttcggtgaaaaacggataaacaaaaatcggcaggcatcttgcgatacctgccgattttgtggagctggtggtgggaattgaacccacgacctgctgattacgaatcagctgcactacctctgtgctacaccagcggaataaatctgcgcaagcattattatacaatagcattcatgccttgtcaagtcttttttcgctttatttttgtgcggaatcggcgcggctctttcactgcctttttcccggtacagaaattttgccttcaatttccgagaagttattgacaaagccgcggcggacaaatataatttaattgactgcgcgtcggaaatgacgaacgtgcgtaaagtaccgtgaaagggatttgataaatggatcagaatatcgaaagaagaataaccgagctgatttctcagatgaccgtcagagagaagatcggacagcttaaccaggtcggcaatccgagacatagggacgcggagtttgagaagctctgcgcgtccggcgacgtcggctcgtttattctcaatcttataggaacatattacgacacaagcgagggcgccgaggagatccgcggcgttataaacgaatttcagcgctgtgccgtcgagggaagccgtatgggtattccgatcatcttcggacgcgacgtaatacacggcttccacacgatgtatccgaaccccatcgcgcttgcggcgtcgttcaatcccgcgcttgtcgaaaagtcatacagatgcatcgcaagagaggctgcaaactgcggcgttcactggacgttcgctccgatggtggaccgcgctcaggacccgagatggggacgctgcgtcgagggacccggcgaggatccttacctcggcggcaagatggcggcggctgaagtgcgcggcttccagggtgacgatctttccaagcgtgacagcattgttgcgtgtgcaaagcattacgtcggatacggcggtgcagagggcggacgcgattaccataaggcggagatttccgatcagacgctcagaaactactacctccccaatttccgcgccgccgtcgaggcaggctgcgccaccgtcatgaatgcattcaacgatatttccggaattcccgccgcatcgaaccgctatcttctcacggacgtgctccgcggagagatgggctttgacggattcgtgatcagcgacgaccacgctatcgttcagcttgtccgccacggcgttgccgaagacgaagcggaagccgccgcaatggcgcttaacgcaggacttgacatggatatgcgtgacggtctttacataaaccatctcgaagagcttatcgattccggcagagtcagcatggagacactcgacgaatccgtgcgccgcgtgctccgcatcaagttcagagcgggtctgttcgatcatccgtacaccgtatgcgttcccgtcgattacgacgcacatcagaaggttgcgcgtgagatcgcggacgagacggtcgtccttctcaagaacaacggcgtgctcccgctttccaagaagacctgcgtaggtatcctcggatcggttcagagcgaccgcggaataaacctcggctgctgggcaagtgactacgatttgaagaggatcaaaacctttgaagagggtatgcattatattgctcccgatgcaccgatccagtcattccagggaacgtacatcgatgttatgcttgctttcctccgcgaccccgaggttatcgttcttgcgctcggcgaaagcccgtacgtttccggtgaaagcgcaaatatggcgaatattgagcttcccgaggagcagaaggtgctcatcgagaaggcaaagcgcaccggaaagaagcttgtcggcgttgttatgtccggacgtcctctcgcacttgagacggtcgagccttaccttgacgcgatcgtctgggcttggcagaacggcaccgaaggcgccgctgccgccgctgcggttctctacggcgatgtaaacccgtccggtaagctttccatgacgcttccccgcgttatcggtcagattccgctttactacaaccagacgacctcctgccgtcagaacgagggatactattccgacgagcctatcagaaactaccgcgatacgctcggttctccgctgtatccgttcggctacggtctcagctacacgacattcgagtattccgacctcaaagccgaggaggacaagatctccatcgacgatattctttcgggcaagtccttccggatcagcgtccgcgtaaagaacacgggagaccgtgagggtaaggagacatcgcagtgctatatccacgactgcgttgctcagataacccgacccatacgcgagctcaagggctttgtcaaggagaattacaagcccggcgaggagaaaaccgttacgtttgagctttccgaaaaggagctcggctattggaatacagagaaaaagtatgttgtcgaccccggcaagttcaaggttttcgtcggcggagactgcctcaccaaggacgagatcaccgtcgagatcacgaaataaattcatatcggcagaattatcggacgaaagcccgattgcaaaagagcctgcggtcagtacggactgcaggctcttttctgctttgccggacataaggtgcgaatccgcaccaaacaaaatcggtacttcatacgaagcgctgctttcggcgcatgccgcttgctctcagcttgaaaaattcgcggattcggacgcgcctgtcccgtttatcgtacagtcgattatgtatactgaatatgcggagcccctaaattgccaaagtgaagttgcgatttttggggtaaaaaaagagaaaaaccct

SEQ ID NO: 1652 - DNA, 5928 bp, Unknown
  16S sequences of unknown bacteria
acagctgccgcagccggcagcgagatgagcaattccagcgtcatcaccaatgaagagggatggctcaagcgcgggctttcctcatcatatggctattgccgattcgccctgctggatcccgcgctgacgctgagcatgccgatggaacagacgatgagcggctgcaccgatatcctcatgcatgcgctggaacgcttctttacccgggaagcgcaaggcgagctcatcgatgagatgacctatgcgctgatgcgcacggtcatccgccacacacgccgccttcatcatgatctctctgacttagattcacgcgcacagatcatgtgggcaagcgaggccgcgcataacggcatgtgcggcgaccgcacgctgggcgactgggcgtcgcatcagcttgagcatgagctcagcggcatgttcgatgtcgcccatggcgccggactggccgcgctgtggccaagctgggcacgctatgtctgctcatccggcaccgcccgctttgccgccctcgccagaaatctcttcgacatccgcataccggatgatgaagcatgcgcttacgccggcatcgacgccatggaagcgctgtttcgagagatcgggatgcccgtgcgcatccatgaactgggcatcacgctgagcgatgagcagatcgatcttctcgcacgcaaatgcagctacgatcacagccggaccatcggcaagatcaaagcgctggatgaagaagacatgaagaacatttaccgtcaggcacgctgatgcctgtgaccagaccagctgaataaggcaaaagggtcgggacgccgccataatggcagctcccggcccttttctcctgtcctcttctcgatcccgatgagacaggcaaaaaagctgcgatgcgcaggatgaccaaaaggtcctctgtgcaccgcagcatcttgttttcttattcctctgcttcgctcttcgccgcagcgatgatcttatccgcaatgttggacggtaccgggtcatagcgctcaaagctcatcgtgtagctgcccatgccctgtgtcatcgcacgcaggtcgatcggatagcgcatcatttccgccatcggcgcctgagccgtgatgatctgatagccgtcaaccagatccattcccatgatggatccacggcgcttattgaagtcgcccatgatcgtaccggtaaattcatccggcacacgcacttccacgttcatgatcggctcgagcatgatcgggttgcatttggccatcgcgtctttataagagaggcgcgcagccatcttgaatgccatctcgctggaatccacatcatggtacttaccatccagcagcgtagccttcagtttcaccatcttatatccggccagataaccatgctcacagcattcgcgcaggcctgcttccaccgccgggaaatactgacgcggcacggcgccgccgaataccttttcttcaaagatcatgtcctcggtgctttcatccggctcgaactccacgaagacatggccaaactgtccatgaccgccggactgtttcttatgacggccttcaccgatagcctttttacggatggtctcacgataaggcactttcggatcttccaagtagacctcgaccttatatttcgatttcagcttggccaggatgacatcgatatgctgatcaccgacgccatacatcacggtctgatgggtctctttgttgttgacgatatgcagcgtctgatcttcctccgccatccgctgcaatgcgctgctcagcttatcctcatcgtttttcgatttcgggaatacggcctgcgcatacatcggctcatcaaagctgatcggctcagcctttaccgggcgtgccttgtcacacagcgtatcgttggtctgcgtatactgcagcttgaccactgcgccgatatctccggtaaacagctttccggctgccgtctgatgcttgcccttgatgatgaatacggacgagatcttctccagcttctccttgttggcgttgtatacggtcgaatcactgcccagcacgccagagagcaccttcacataagagatgcgtcccacaaatggatcgacgatcgtcttgaacacctgcgcgctgagattttccttctcattggtctccagcaggagctcttcgccgttttcatcatatgcggcataatttccgctttcgccatatgccgggaaatatttgatgatcaggtccatcaatcgctcgatgccgatgctctgcagagcgcttccggagaataccggacggatctcaccgttgcgcacgcccagacgcacgccgcgggtcagttcggcctcggtaaagctctctccgctgaagaatttctccatcagctcatcatcgcccatggcgaccgcttctgcgatctgatccttatagccattgactgcgtcgaccatatcatcaggaactggctgcgccttgtcaggatcagccagaggtcctttataataccatgctttatctctgagcacattgacgcttccgatgatctcgccattttccacaatcggtacttcaaaggggatcacgcttttgccaaacgtctcacgcagctgctcatatgcctgttcaaacgaagtgtgttcctcatcgagcttattgatgaagaagatcgtcggcagcttgcgcgctgaagcgcgttcccatgcgatcttagtgcctgactggatgacgtctctcgcgttgacgacgatcagcgcattgtccgcggcagccaatcctgcctctgcttcaccggcaaagtccagatagcccggcgtatcgataaaattgatcttgcattctttccattcgatcggaaccagcgaggtatataccgagatgccccggcggatctcctcactgtcgtagtcgatcagcgagcttccttcgctcgtcttcccgaaacgatcgctcgccttggtgaaatagagcatggcttcgagcacggccgtctttccgctgccgctgtgccccatgaccgcaacattgcggacctcatgtgataaatagtctctcatgtcattccatccccctatttcagtatcggcttcagctgtgcgagacagtgctcacgcacatagtgcacggccttattgccttctttatccgtcatgtctttgtctgcgccattggccagcagctcttcgaccaggctggcatatccgccatacgctgcacgcatcagcgccgtgcagccgttgttgtcgaacaggttcacatccgctccgcgctccagcaggatccggatgacgccctttttgaatgcgacgcacgcctccatcagcgcggtgcgtcctgcttcatcctgcgcattgatgtctgcgcccgcatcgagcagcacttccacgcagcgctcctgtcccaggaatgacgcacgcatcagcgccgtacggccgcggtcgtctttcgcattgacgtctgcgccagcctcgatcagcttcttcaggatggtcttgttccccttcttggccgcgcccatgatggcggtctttcctttattgtctacctgattgacgtcggctccattgtcaagcagcacgcggacgatgtccttataatcccgctttgcggcgcgcatcagcgccgtacggccgtctccgttttgataattgatgtcgcagcctttcttgatctctgcgcagaccgccgcaaaatcaccgcttgcacatgcatcccagaaaacctgactgtaaccctgatccatgataatctcctccttcgcatccatcatttcaaggtaaaaaaagcggacgtaagcaaacgcctacatccggtataagcatgatgaaactccggtgtcttccaccggtccctgagtgcgcagctgaatgcattttctgttctgattcatcttgaccacactcccttcatcactgttgtctgaatacattttatcgcagtcatgtcattttgcaagcgttttcacaaaatcctcataatctcgtcagttttgccgaaacactgactgattttgccacatccgttctttttctttctcttttcgtgcggtataatgaaagcagcgaatcatatactgaaacgaggaggatacgatgaagaccattcagccggaaacactgcagcacaatctctttgatctgatcggcaaacgatggatgctgatcacagcagagaaagacgggatcgcaaacacgatgaccgcttcctggggaagcatgggcatcctgtggaatctcccctgcgcctttatctatgtcaggccgcagcgccataccaagacattcatcgacagcgcagagcatgtctcgttgagcttctttgacgagtcatggcgcaaacagctttcttatctgggcacagtgtctggcagagatgagcccaagatcgaaaaagcgggactgcacatcatcagcgatgaatccgctccacgctttgcagaggcatcgatgaccatgatctgccgcaagctgtatcgtcaagacatggacgaagcatgcttcatcgaccgctcgctcatcgacagccattatccgctccatgacctgcatacgatgtatgtactgcatatcgaaaagatcatggtcagcgattgacgctttcaactgtgtttattaaggtggtaaagaccaattttacccccttcaccttccgcatccaccgtacatacagcttatttacggtgatctccaatctatacgatagaggctggatgacggtatcaggcctcttttttatagcttgcatacatgatcacatatcatgatcaacataaactgaatgatctctcctatcgtgcttccacgaaaaaagcacactgcttgagcgtgcccagtaaatacacttgttaacaaatcaaaccctcacgtttcttttcaaattccatcaactcgtgtttgagttcgttatattcaatagctaattttttatattgatcaggtactttttcaagatcaaacaacatcgtgtctaaattcaaacttttatacttcactacaagaatagaagcatgctcatcatctatttctagcattctatcaagaatttctcttcctttaaatctagtcatgattgttattgatgttcctttccactaatgcgttcttcgtcgagttgttcaaactcctcgtcggataatttgagctagctgcttttctatgatttttattgattttattattcttatttcttataacttcttctcatattcgcgccggttcaaatttttagatccaaaatagagccagtcagaaccactatctgcgctccttcagcttcttcaatatcgtcataacatctggctgcgttggcgtaaatttaatgccacgtttcaacatccccataacttttctcgcttttcgctcaatctctctagcagtatgctcacttgtcaacatcagatgatttccggcaatcgttcccgttcaatgtattcttctgttatcgggaacatatcctgtatcaaaaatgcgctttcccggctatcgtccagtttaacgatatggagaatatcacaaggctttcctgctttttccttcttctccataattcgtctgtatttgtcaatacggctggacagtggtatcatccagtatattcctatacttgtatcctcaaagcagtaataatgtggtctgtttcccgccttatttcctttaagatacgggtctggcatatcttcaaaaaattcatctttgataatataaaatcctgttttcttcatttacttatcctcattatggaaaaagtccctcgccttgcggcgaaggactatactttcgacccaaccacttatataccgcatattggtcagcggtaaactttcaacccgaccatttatataccacatatcggtcagtggtaaactttctttgtacttacattctagcaagcgcaaagaggaaagtcgatagcgctttccatgagagtgtaatataaaccgtgtaagttgagaacatgcagctcaactttcacggtt

SEQ ID NO: 1653 - DNA, 6141 bp, Unknown
  16S sequences of unknown bacteria
tcggcagcgtcagatgtgtataagagacagctgctgcagcaatggtagtattggctgttgtgatcacgctttgtcgctgaggaaccgcagaggaagtaaggaggaaaagaaggatgaattcgtttgaacaaatggagtcggtgattgcgcagcgccgcgcgcagccccaggcaggttcttatacctgctatttgtttgagaaaggcctggataaaatcctgaaaaaagtgggagaagagtgtgctgaaaccattattgctgcaaaaaacggcgaaaaagcggaactggtaggtgagattaacgatattttctatcatcttctggtaatgatgaatgaatgcggcgtcacgctggcagatgtgtgtcaggaaatggatgcgcgcgcagagaaaatcggaaatctgaaaacatttcatgtttctgatcacaatacctgagcggcagaataaggaagcagcagctcgttaaaacaatactttcatgatccatcgacaaaaaagccaactcaaaatgagttggctttttttatattctattaggatttgagaaaatataaattgagattttgctacaaataggagggagcagattgagaaattacggatatgtcagggtcagtacgaaagatcaaaatgaggacaggcaatatatcgcgctgcgtgagctttgtattccggaagaaaatatttttatggacaagcaatccggaaaggattttgtgcggcctcagtaccgcaggttggtacggcggctgaaaaaagacgatctgctctatgtcaaaagcattgatcgtctgggccgcaattatacggaaatcttagagcagtggcgtattctgaccaaggaaaagggagcggatattgttgtgctggatatgccgcttttggatacgcggcggggaaaggatctgatgggcacctttctcagcgatattgtgttgcaggtgctttcttttgtagcagaaaatgagcgcagcaatatccgccagcgacaggcggagggaatcgccgcagcgaaagccaggggggttcgcttcggaagaccgccgcttccgctgccggagaattttcaggaggtataccgggcctggcggggcaaacagattacgctgaagcaggcagcccaagcatgccagatgccagaagggacattttatgcaaaagcggtccgcgtggagacacagaccggcagatgagacgcttccacaatgtgtacctttttgaactgagacactgccggctactttccgcaaaacttgaacacgctgaccatacttatggcactgagccttctgtcagttgctgctttgggcggcagaaaaaactactgacgcagcggagaattgttttacgataaaaacaatcagcctgtcctggatgaaaacagaaattacacgatccggctgagtgcacagtggaaaccagtgcgttgccgcaccgggcaatatgccgaaggcgcagtttcagaaagttgtggtggattaggccaattctgcaggatgttgtatccaagccgaaagttgcagacagtctggtgaagcagagcgacggttcctatgcaacgaatgtgatacggtcccttgtgcaaagcaaaaaaccgcagggagtatatctccctgcggttagctgtgcgcttagttcgaacgttttctattggctttttccataaaacggtcattatcgataacggcacgctggtgggtgccttcaccgatcaagcccatttcatcgtaagcggatactttaaaatctaccattttaccgttagcggaaatattgataacttccgcttctgcgtatactctcatccctacgggggtcggggaaatgtgggttgtgttcatggcggtgcccaccgtacccttaccctcgggcaatgtagccgccatcaatgtcagggcggcgttttccatcagagctaccatgaacggagtaccgaatacctgcaggtttccggagccggctttggcggcggtgttttcaggggtgaccaaagtctccactgtatgcttcattccgatttccagtatcattgtgtacctccatttattcagcctgcctgggtgagacccaagcgcagccattcactgtcgtatagttccagagaagcctggtccagattgacgaagggagcacaggtggaaagataagcttcatcaggataaagaatgggactgtcgcgatattcctcatccagcatggcgcgggcgccagaggaggggaaagcatacccgatgatatcaaagttgcgcacgaaagatgtgttttcacacataaaattaataaaagccatggcgttgtcatagtttttgcaggtggtgggcacacacatggaatccacgaaccagttggcgccttcttctggctgtacccagaccaagtcaggattgtcctctaccataataaggtagtcgccggcgtaataaacgcctgctgcagcttcattgttggtcattttgtcgaagatctgatccatgacataagcctgcacgatgccatcttgcttttgtttgaccagaagatccacagcctcggtaatctgggaagcatccgtggtgttaatatcgtagcccagagccatcagagcgatggcaatgcagtcgcgtgaattgtcaaacatcaaaacgctgtgggttccaactttttcctcatcgaagagatctgcccatttggtaataggctgctgcaccatattgggattgtatatgataccggtggtgccccaagtataaggaacggaatattcgttgttgggatcataaatcatgttgcggtactgctcgtcgatattggcgtaattgggaatctgatcaaaatccaatttcatcagcataccttcgtcaatcaaacggctgatcatataatccgagggaatgatcacatcgtaattcacgctgccgctgcgcagcttggtgtacatggcttcattgctttcgtaggtgctgtagttcactctgatgccggtctgttctgtaaattcatcgaacagatcggtatccatatattcaccccagttgtatacactgactacaccgtttgttgctgcagtgccgccgcagccagccagcatgccggcaaggatggcgccgacacaaagaaaagaaaaaatacgttttaccatgaaaaaacctccttttactgtgctgcgtctttgcgcagagcttggagccgtttggctttttcctgttcctgtcgaaaagagcggatattgataataatcaaaagaatcagcacaatgccgaacaagatagtggaaatagcgttgatctccgggctgatatggcgtcttgccatggcatagatctccatagcaaggttggatacttccgcgcccgcggtaaagtaagagatgacaaagtcatccaccgacatagtaaaggcaatgatggcgccgttgacaatgccgggccgcagctgaggaagcactacttttgtaaaagcctgcatgggtgtggcgcctaaatcctgggcggcttcggacaggttacggtcaagctgccgcagacagggcattaccgatagaatgacatagggaatatcaaaggtaatatgggccagcaagagagtcgcaaagcccagctggaaattgacgggaagccacagcccgaaatgattgccgatccaatataccaagccattgagcagctgggtggagaaaacaaacaaaagcatgagtgatacgccggtgataatttcggcgttggtcatggggatgttgttaatactcatgcaaatgctgcggggacggcgcttcatggagaaaaaaccgatggctgccagtgtgccgaacacagtggaaattaacgcagccagaaccgccacgctcagtgtggtgataaaagcgtcaatgatggcatcgttgtggagcaagtccgcataccagtgcaaagtgaaaccggtccagacggcgcggtttttggattcgttgaacgaaaagatgatcagcaccaggatgggggcgtacaaaaacacataaaccagaatgttatatagtctggaaagctttggcgttgttgttttcatagcagcaccgcctcatcttctccttcgccaaagcgattcatgatgcccatgcacaatagcactacaaccatcatgatcagggaaatggcgctgcccaagtgcggattgtaggtaccgcccaggaactgcatgtcaatcacatcgccaagaagccagtgcagtccgccgcccagtaagcgggaaatggcaaaggtactgaccgatgggatgaataccatcatcacgcccgagagcaccccgggcaaggacagtggaaggatcaaccgggtaaaggtctgtatacggttggcacccaggtcctgggctgcttcgacaagccgccggtcgatgccgctgattacagtataaataggcatgatcataaaaggcaagtagttgtagatcatgcccaagaccacagcaaagctggtgttgatcataggaatataatccgtgctcagcacaccgatgccatttaagtagtcgatcaggccgatagccctgaaaaattggttcagaaaaccgttgttttccaggatagacatccaggcataggtccgcagcaggaaatttacccacatgggaagcataattagcagcatagccactttttgtgcgggagggcgctcatgtgcgagaatgtaggcaaaaggatagccgatcagcaggcatatgatggtggcgatggcggcctgtaaaaacgaatttttgaaaacggatgcatatacgccgagatcggaaaagttttccagtgtaaaagagccgtctgcattggtgaaagcatagcctacaataaagagaagcgggacaatgacaaaaatagccatccatactacataggggatggaggcacagcggacaaaggctttagaattcatcctcggccgcctcctcgttaccgtcttccccggcaaagttgggatcgttgatctcttcatattcatcgctgtaggaactgtaatcgcccacctgatcggaatagacgctctttttcattacatggatgtcgtcaggtgggatcacaataccgatttctgcaccgagcgggtggaagtcagtggtttgaatcagccatttaaaaccgcgaatatccacgataatatcgtaataaatacccttaaaagtgatggaagtgattacgccatgcaacaggccggcatctggagccacaatgtcaatgtcctcgggccggataaccacgtccactttttctttcggggcgaatcctttgtccacacaaggaacctttgtaccgaggaattctaccaagaaatcttggtgcatacagccgtcgagaatgttggattcgccgataaagtcggctacaaaagcattttgtggttcattatatatatcttccggggttccaatctgctgaatgtggcccttgttcatcacgacgatagtatcagacatggcaagggcctcttcctgatcgtgtgtcacatagataaatgtgattcccgtttgctgctggatgcgtttgagttcattctgcatatccttgcgcagccgcagatccaatgcgcccagcggttcgtcgagcagcagtactttcggttgattgaccagcgcgcgggcgatggccacacgctgctgctggccgccggacagggcgtcggctttgcgatgttcaaagccccgtaagctgacaatatccagcatttccgtcacacgccggtcgatttcggccttcggcgttttggaaatacggagaccaaaggcgatattttcatatacgtccagatgcgggaagagggcgtatttttgaaataccgtattgatctgtcgcttatggggcggtacatgcgtaatttcggcaccgtcaaagtatactgtaccggatgtgggtgtgagaaaaccgccgataatacgcaatgtggtggttttgccgcatccgctggaaccaagcagcgtcagaaattcgctattatcaattgtaagattcaagtgatcgagaacaagctcgtcgtcaaacgccatgcagcaatctacaaggcgaatcaactctttggacatttatcctcccccgtttcatagtaatagtcactgaaaatgttgcgcatgataaaggcataaattcgtatccgtaacagttcccccttattgaaaacttgccaagacaacacagaaagaatac

SEQ ID NO: 1654 - DNA, 17764 bp, Unknown
  16S sequences of unknown bacteria
cctgcgtgtttcggcgaagccgaaacggcctgcggcccatgcctgccccctgcttaaatccccccaatgcggcggcccgccccctggaaaagcaggaggcgggccttatcagcaaaccattaaaagtaggatatcactcggtggtgtagttatcgaagtagccctggatgtagatgattggggtgcccttatcgccgctgccgctggtcaggtcgcacagggagccaatgaggtcggtaaggttacggggcgttgtgccctcggagaccatattgcccaccaggctggtggagtccttctccttgatacgctgggtaatggcttcctgcagagcggtaccggaaagatcgccgaaatcgtggtcagccaggtacttcagcttcagctcattgggggtaccgataaggcccttggtataaccgggggccacaaccgggtcggccagctcccaaatcttgcccgcgggatccttaaaggcgccgtcgccgtaaaccatcgcctcgatatggtgtccggtggcttcgctcatcagctggccaattttttcggctaccagcatagcatcacgggggaacagcttcacacggttttcatccgccttattggaacccagcagaccatactgggcattgtagccgctgcccgccacaggagcggtcatcaggtcatccagccccagaaccacacgggcaccagccgcctgcagcaatcgcttactgcgggcacgggtatgaatatcacaggtgatgacggtatcggtgtagtccagaatggtctgcacgcggttggcaaaaatcacttctacctcggcgccggcttcccggataaggctggaatagtactccacatagtccacgccagtaaaaggatggatcacagagccgaactcagcacggaagcgctccaaggaaagaacatcggtccaggggtcaatgcccctttcatccaggcggtccatgctgatgagatggttgcccacttcatcggaaggatagctgagcataaggacgaccttctggcagcccgcggcaatgccggaaagcagcacggagaaacggttgcggctgagaatggggaaggtaacgccaacggtcttgccgccggttcgggcctttacatcggctgcgatctgttccactgtggcatagttgccctgggtacgggccactaccgattcagtaatggcgacaatatctttatcgtgcggctccacactgttttctttcagggccttcaggacggtatccaccgtgccctttactacatcatcgccttcccggaagatgggggcgcgtaccccgcgaacgacagtaccaaacattctgctcatggctttttctccttttatcacctgtgaattgatgaaaacgaaaacaaaaataggggttgcttttcacaaccactttagtataatagatgcgtattcataagtaaagtatatattactaatgataagcataagcaaaacagatagaaaggaagcccgcaaacatggccgttaaactggagctttaccgtattttccgcaccgttgccgaggaggaaagcatttccgccgccgccaaaacactgtttatctcacagtcggcggtcagtcagtccatccatcagctggaggaacagctgcaggtacggctgttttcccgccaaccccgcggcgtcaccctgaccggcgagggccgggtgctgtacgattatgtgcgcagcgccatcagcctcatcgaaaccggagaggaaaaggtgcagcagacccgggagctgatgatgggcgagctggttatcggggccagcgataccgtgacccgcagtttgctgctgccctatctgcaaaggttccacgagcggtacccggccatccggctgaaggtgctgaacggcaccagttatgaggccctgcaaatgctgcgggcgggacaggtagacctggcctttgccagtaccccgcaggagagcggcaacctgcagatgcggcgctgcatggccctgcacaatgtttttgtggcggggcgggactacccctgcgagaccgaccgggcctataccctggcggagctttcccgcttcccgctgatgctgttggagcgcaaatccagcgcaagacggtacctggaacgcttttttacccgcaatggcattacgcttaaaccggagatagaactgtgcagtcacgagcttctcgtcgatctggcggccattgggctgggggtggcgtgcgtcacccgagaatatgccctgcccgctttggaggcggggacgatccgtgaactgcgcaccatcccggagatcccggagcggagcctttcggtgtgcaccttgcaggatgtatcgcccagccccgcggcggaggagtttttacggttctgggcgtaaggcgaaatgaacggagactatattaaaaagcacccccacgggatctgccgcgggggttgtgttatatttttacgggagggaatacagaatagccaccgcagcgcccagcagagcaccgcaggccacctgcagcggggtgtgccccaggaattcctccagcagctgctccggcggagtgtcgctcagcttcagcagcagctcattgatggtatgggcatgctgcccggcctgccagcgcacccccatggcatcgtgcattacaataatggccagcaccgcgctgatggcaaactgaaaggaagccgcgccgtattgcagcagggcggccgccgccaacgccgttaccgtggcggaatgcccgctgggcatcccgccgtcccccgtcaaccgctcccaatccagtcggtgatgggcgatcagttcgatgagcagcttgcaaagctgtgccacagcccaggccagcaccgccgatatcagacaggtattttgcagtatttccataggtattcgcctctttttcctgtcaaattacgatgccgccattggggctgaggacctgcccggtaaaataacgggcatcctcccccgacaaaaaggcaatggcagccgccacttcctccggcgagcccatgcggcccagcgggatctcctcctccagcatccggcgttcttcggcggtaaggtgggcattcatttcggtatcgatggccccgggcgcgacacagttgacggtgataccgctgggggccaattccttggccaatgcctgcgtaaagccaatgaccgccgccttggaggcggagtagtgcacctcgcaggaggcaccgcacagcccccagatggaggaaacattgataatggtgccgctgtgctgctgcaccaaatacggcaccgctgcgcggcagcagtgatagatgccatccacattggccgcaaacatctgccgccattcttccggggtaatatcggtaaacagcttgatctgcgaaatgccggcattattcaccaggatatccaggtggccgtactgctgtaccgcaaaatcgataagcgctttagcttcctcggctttggtcagatccgcccggaaggaaacggcttccccaccggtctcccgcagctcccggcaaaggctttcggccttttctctgctgcggcaatagcccagcaccacataacacccctgcgcggccaagcggcgggccactgcggctccgatgcctcctgatgcgccggtaataactgcgactttactcatactgtttccctccggtgtcaaatctgcaatgggtgctggtttggcggcaccctgcagaaatttctacccatgataatagcaaatttgttcccggctggcaagtcccctcagcggcggggcggctgatctgccagcggccagtcgtacagttcggcatagctttccgcttcctccggcgagcggggcgggataggctccagcccggtggcttcggtgccacttaccacatcatgtggcaggtacagcgggcgtcccgtcaccgggtcaatgggtcccaaaacaggtcgttccatggttattccccctttcaaggggtagtatcaccaacagcaaaaaaactatgcggcgtccccttgcgactggggcaaaatcatgctacaatagcacaaaaatccggctggttgcgccatagttggtggcggcaaccgctgccccaaaaggagtaaatcacgatgaataacatggcacacgccgtcctgcggctgctggagaaaaacaaaatagactacacactggcggagcaccccgctgtattcaatatggaagaattgtacgcgcagggactggagcactgtgacgccattgccaagaatctgctggtccgcgaccagaagaagcgcttttactggctgctggtactgtacggagaaaagcgtgccgacctgaaagcgctgaaagcccggctggggcatggggcgctttcctttgccggggcagaggagctggccgatctgctgggcctgacgccgggctctgtcactccctttggcgcactgaatgacaaggagcaccgggtcaccctcctgctggatgaggactaccgcggcaagctcatcggggtccatcccaatgataataccgctaccgtttggctcccggcggatgccctggttgagctgctgcggcagcagggcaccacggtggagtttatcccattttgatcttataaatgtgaaaaagccccgtaccgcgcagtacaggggccttgttcttatgtagatcactttttattgtggaagaacagcgggatcttttcgaggtagatgatatcggtgcggtccgcggcatcgccttccgccagcactgccgcgcgggcaattacttcgccgccagattccttcaccagcttttcgatggcctcaatgctgctgccggtggagatcacatcatcaatgatggcgaccttcttgcccttgatgaactcggcatcgtgctcatctaccaccaggatctgctccttacccatattggtgatggaattaacggtggtgatgatgggattgcgcatatagcccttgactgacttgcgggcaatgacatagcggggcatcttcatcactttagccatctcataaataagcggaatgctcttggcctcagcagtcaccaacacctcggtctcggggggcagcttttccgccagggcacgggcacagggctctacaacatcggtatcgccaaagataacaaagccggcaatggacatgttttcattgatggggacgaccggcagactgcgtttgacgcctgccacggtgatatcatagaattcctgcatgggaatcctccttttccgaaaaaattgggcatgacgcccttaacctatttattataacataattctgctatcttggatatagattttttaacatttagccataagcaatgcttatatcagttttcagcatttgctttttccgctttctatgctacaatagaactaaaagcaggcgccgggccggcagcctgcgcatttacaagcttgtgcagagtccggacgggggccgcaggccgtttcggctttgccgaaacacgcaggctccgcctgcgtcggccgcttcgcggccgggcctgcggcccatgcccgcccctcgcttaaatttccccttacatcctgccgaaaaatgtgctataatataggcagaaacagtaagggagggcaccacagtgtttgcaaaaggaacaaagatcatgtatggcaataccggcgtctgcgaggtcatggattacgccacccccgatttgcccggcatgccgcgcgggaccaagtactatgtcctgcgccccctgttccaaagcggcacgatctactgccccgtggagcagccaaaggtctttatgcgcccggtaatgagccgcgaggaggccgaggagctggttgccctcattcctaccatcagcgtggagccattccataccggccgcctgcaggagctttcagagcattaccgcagcatcatcggtacccacagcaccaccgacctcgtggagatcatcaaatcggtttacagcaaaaagcgggaagccgaagccgccggccgccgcgtcagccagatggatgaccgctatatgaagctggcggaggagctgctgcacggcgaactttccgttgcgctggagatccccagggatgaagtgcgggaatatattcgccaaagggtgaaagctgccgaagccgctgaataactttatcacaataaaaaagagcccccatccgggtttccggataggggctttttgtatgggtgcaggttattcgacgggaaagaatgtatacaaggtatacagctcgcagtcgctggcgtcaaagacgtagttcgtcatttcgttgccgaaggtcaccaccagccagccattatagcaagcggtaaacagcacattcccttccgtgtcataggcagtcaggcgcagcgcgccgcccgtggcggggtttggcagcttttcatacaccgtaagccggtcggcgctctcggccagcagcccgatgagctgtccggctttttcgggggtcagctccaccggctcggtcatggtgtgatccatggccatcaccttggcgatgttcccggcacgaatgacctcccgccagcgggccagctccttttcggtgcccgctacatgcccgatcggggtctccacgccgggctttacggcatacaccccggcggcaaattccatcaccagcgcctttgcggcgtcgccggtttggccgggcagccacagggaatagtcaaaatccccctcgcagcttttccacagcgccacggtgccctcgctgtgctccttcacggtgacggtaataatgccgccgtagctgtgacacaccgaaagctcgctctcctcggcatcggggtagtaaacgccggaaagatcctcgccctcgccggtatcggcggcacagcgcagggtggcggtttcataggagatctccccgatggtgccgccgatgagacagaacccggtgggcttcatgccgtcccggtcggggtagccggccagcttaaaatcggggaactcgtcgttttcataggggactctcgggttcgggatctgggtgttcccgccgatcgccgcaccgggatcggggtcggggtcgggcgtgggggcaggcgtttcgccgcaggtggccagtcccaccgccagcaggcagcatagggtcagtgccagaattcgggtcagttttttcatgttgtttcctcctgttgtatattgttggtgtcaggcctacactgaatataacgaatgagcgccgcaaaatgcaacatctattcgtaaataaagtgtaataaatcccgtgttttattgcagcctcgcaaaaaaaatccccgcagactcaaaagcctgcggggaaattttcagtttatcgtgttctcttacttaatgatagagaagttaactaccagcgcggcaaatacgatggaaaccatcgacagcagcttgatgaggatgttgatagcggggccggaagtatccttgaagggatcgcctacggtatcgccaacgacagcagccttgtgggcatcgctgcccttgccgccgtgtacgccgctctcaatgtacttcttggcgttatcccaggcgccgccggagttcgccatgaagatagcgagcaggaagccggaaacggtagcgccggccagcatacctactacgcccttgtagcccaggatcataccgactacgatgggggtaacgataccaactacagtgggcaggatcatctcgtgtagggaagccttggtgcacaggtcaacgcagcgggcgtagtcggcatcggcattgccgtccatcaggccaacgatctccttgaactgacggcgaacctctactacaacggactgagccgcgcggccaacggactgcatggtgagcgccgcgaacacgaagggcaggcaggcgccgacaaacagaccgaccagaacaacaggggtcataacggagaagtcattgaaggtagcagcagcgccaacctcctggaccttctcgatgtaagaagcgatcagagccagagcggtcagagcggcggagccgatagcaaagcccttgccggtagcggcagtggtgttgcccagggaatccagcgcgtcggtgcgctcacgaacttcgggctccaggccggccatctcggcaatgccgccggcgttatcggccacggggccataggcatcggtcgccagggtgatgcccagggtagccagcatacctacggcagccagcgcgatgccatacagacccatggaggtggaagcagcgccgccggaaacatagtaggcaaccaggatgcacaccgcaacgataacgatgggcaggatggtggagagcatgcccaggcccaaaccaccgatcatgatggtggcggagccggtcagggcggtgtcagccagaccctgggtgggcttgtaggtgtcggaagtgaaatactcggtggaagcaccgatgagaacgccggcaaccaaaccggccaggatggcaaagtagataccggtgtactcggtgcccagtacgccgcgaaccaggaagaaggcagcgacggcgatgataagagcactcaggttggtgccgcgacgcagagcggaaagcagggtgcgctgatcggtggattcaccggtgcgtacaaagaaggtaccaatgatggaagccaggatgcccagggccgccatgatcatgggcagggccatggccttcagctcgccgccgaaagcggcaacgcccagcgcggaagcggaaatgatggagccaacatagctctcgtacaggtcagcgcccatgccggctacatcgcctacattatcgcctacattatcggcaataacagcggggttacgggggtcatcctcagggatgccggcctcgaccttacctaccaggtcagcgcctacatcggcagccttggtgtagataccgccgccgacacgggcaaacagagccatggaggaagcgcccataccaaaggtcagcatagcgctggtgatggcagagggatccagcttaaagacgaacttcagcagggtgaaccagatggaaatatccaaaagacccaggccgactacggtaaagcccataacggaaccggcggagaacgctacgcgcagaccgcggttcaggctggtgcggcaggcattggcggtgcggcagttggccttggtggcgatgcgcatgccgatgaagccggacagaccggagaagaaaccgccggtcacgaacgcaaagggaacgaaccaggtcagcagaccggtagcggccatgatgcacagcacaacgaacatgcaggcaaagaagatggccacgatggtgtactggcgcttcagataggcgttagcgccttcacggatggatgcagagatcttctgcatcagcggggtgccttcctcaaacttcaggaccttcttcgcggtgacaagagcaaataccagcgcgatgacggagccgaggaaagtcaagagaacgagaactttctccatttgtttttagcctccttgtgaattcacgataaagtgtctatcaaataatagcgaaaaacaaggtctttgtcaaggtgttggggccgacactttacccaaaaactaaccaaatttttgagattttcgctcaaaaagaacgccatctcgcacaaggcaaaatggcgttgatttcagtacttttccggctgcttttttgtcaagggattaacaagttccgctatgcgaaaggtgcatcaatgctatattgtgatactttcacaaacactggcgtaattttggccaaaatcagcgcaaaacatcaaatcagattgcccaaaaacggcgcgatcaccaccgtcaacagtgcagtgatcaccagtgaaaggctgcccatggcgccttccacctcgcccatttccagcgcccgcaccgtgccaaaggcgtggctgccgcagcccatggccaccccctgtgccaccgggtcagtcacatggaaccaccgtagcacctgcggccccaggatgttcccaaagataccggtgatggagatggccgccatggtaatgccgccggtaccacccagctcctcggccagcggcatgcccaccgcccccgttaccgatttggggatcagcgttacaaagtcgtagtgccccagctggaacaccagcgccacggccagcacgcacagagcgttcaccgccactccggtcaggatacctgctacgatggccaaagggtactcccgcaatttttggatctgccggtacagcggcagcgccaggcaggcggtggccggggtcaacaggtaggtgatataccgggcgctttggttgtaggcgtcgtagtcaatatcaaaaataagcagcgccccaataagcagtgccaggcagatgaggatcggattggccagcgggtgcccgatccgatcgctgatgcggaaggacaccacatagatgattagggtcagcgcggccccaaagtaggcggaaaaggcaatgtaatcattcatgctttttaccctcccgccgtttggcttcctgccggcccaccgcctgggcggccttgccgctgatgccgatgaccagcgtagtgcccagaatacccagcagcaccaccggcccgcccatcaccgccaggtgttccggctgggtgataagcgctactgtgggggcaataaacagcaccggcataatggagataaagaaatccgcgacggtactgatctgctccggcttgatgagtccggtcagcagtgccagcagcattaggatcagaccgtacacgctggcgggaatgggcagcggcagcagatatttgatgagttccgccacggcgcacaccgcggcgataatggcagattgccttagaattttcatgggtatttcattcgtccttcggttcgcaaaaataggggagagccttactggatcacatggacatccagttggttaaaggggatggcaatgccgttctggtccagtacatcctttatcgcctggttgatgctccacgcctcgtcccagtagtcgtcggtctttacccagtagtgcaggcccagcaccacgctgctgtcccccagctcctttacatataccagcgccttttcggggttcaccagcggcttgcggctcttgataagcgccgtcagcagctcaatggctcgggcggtgtcggcctcataggcaatgcccaccgtggtggaaagccgccgcaccggcagtacattatagttgataatattcccggccgagagattcccgttgggaatggtgatgattttgttatcggccatgcgcagcgtggtaaagaacagcccgatctccaccaccgtcccctcgatatccgaagcagttttgatgtaatccccagtcttaaaggggtgtaggaacatgagaatgagcccgcccgcaaagttggaaagactgccctgcaatgccaggcccaccgtcacgccgatggaacccagcagcgccacaaagctcgccgtcggcacgcccaaaaagtccgcaataaaataaatcagcagtgcccacagcgctactcgtaccagcgagcgcacaaatttggccacgccgggatcgatctttgtcttgttatccagcagcgccacccggctcagaaatttctcgatgagccagcgccccacaaaaaagataaccagtgccagtgcaatatgccacagtgcgttcagcaccaccggcgaggcggttttaatgaatttctggatcgcggtcagcgattcctgaatatccggtacctccggcaggtcggccgtagcggtcgtcagtgcaaaaaatctcatggttctctccttgctatattcaacctatattacagcgtttcatcttcgccggtccactggtgccgggccatatccacccgcccgtccggcagaaaagcgactccttccgcttccagcagtgcccgctgcgctcccgtcccgccaaaggcaaagcccggcgccaggctgccatcccggaataccacccggtggcagggcgttttgccgggttcggggttgcggtgcagtgccccgcctacaatgcgggaagcccgggggctgcccgccagcatcgcaatctgtccgtaggtagccactttcccggccgggatacggcgcaccgccgcatataccgcccggtagaaattctcctgcattttcgcttgccccctcttggaataatatctcattatatcacgcagctcctccgttgtcgagaaattgcgcggcatttcctcgtccagtttctgcagcatcccggctggggcccgcagggccgaggagctttgcccctcgtgggcggccttcggccgccccaaagccgcctgcggcggcctgccctgcgggcccctccctctgcacaccgcctccgcccccttgcaaatccccgccgaacgcggtagaatagggccgtaagcaccgaacaaagtaaagggagaatactatgaggatcgtaattgtcggaatcggaaaggtcggccgggccctggcggagcatctctcccgcgagggccacgatgtcgccgtcatcgataaccgccccggcatggcggagcgcctggcggaggaactggatgttttgggcatcgagggcaatggcgctgcttatactgtgcagcagcaggcccgggccagtcaggcggatctcgtcattgccgccaccagcgaggatgaggtcaatatgatcgcctgcatgaccgccaaaaagctgggcgccaagaataccattgcccgggtgcgcagcgtggaatacgaaagtcagctgcgattcatgcagcaggagatggggctttctctttctatcaacccggagcgggagactgcccgtgatatcgcccgtatcctgcgctttccggcggtcgccaaggtggaaaccttcgccaagggccgggtggagctggtggaataccacattccgcagggcagcctgctggatggcatggccctcaaaaatgtcgccgcctccctgcaggtcaaggtgttggtctgcgccgtccgccgcggggaagaggtcgttattcccgatggtaactatgtgctgggcgcgggagattgcatcagcgttaccgccaagccccaggaactggagaacttcttccgggcgctgggcgttttccgggaccatgcccgcaatgtcatggtggtcggggccgggcgcatcacccgctttttggcggagcagctgagccagatgaagatgcgtgtgcgcgtggtggaccgggatgaacagcgctgtgttgatctcagcgaggcagtccccaccgctttggttatccacggggatgccaccgatgtgcatctgctggccgaggagggtctggatgattccgatgcctttgtggcactcaccggcctggatgaactcaatatcatgctggccatgtatgcccgctgccacaatatcgaatgttctgtggccaaggtcaaccgcaattccttcaccgagcttatcaataagaccgccatcgtggaaagcaccgtttccaccagcgtggttactgtcagccgcatcctgcagtatgtccgcgcgatggaaaacagcaccggcggcggggtcattgccctgcaccgcatggtagaaaaccaggtagaagccctggaattccacattaccgccggctcgccgctcatcggtgtgccgtttaaggatatggccacccgccccaatgtgctggtgggctgcatcacccgccccaatggcgaggtcatcatcccctccggcggcgattccctccagcccggcgattccgccattgttatcaccacccttaccggcctgcgggatatccaggatatcctcgcctaaaatattgtttttttcaggctccgtttcctccgggaagtggggcctcttatcatctctgttatttttgtaacgatttttcgtaaaaaccgtgtaatattgtttgtatcccgccgataaatgtattataataaactgtgtatagctattttgcatgtcgctgccgcatagcagttatgcgttgtcgcccggcggcggtgaaaatgggtgctggctgcgtggccgcccttgacaggcatcagcctgcctgcgtcaggcaagagcctgcctgcgtcaggcaagagcctgcctgcgtcaggcaagagcctgcctgcggccgtccgcttgccatcccgacattttccctcgccgccagctttcatcatagaaaggggttttacccatgccgcaccagtataccgtcccgcttaaaaagctcatcaaggacctgaacctgcagatcctctattatcccaaaaccgaggaggagatcctggtcagccacgccgagctgatgcgcccgggcttggccttcaccgggttcttccagggctttgtcccggcccgcatcaatatgatcggccgtaccgagctggcctatctggaaaccttgccgccccacctgctgcggcagagcctggagggtttcctttcccgcagccccaaggccgtcatcatcactcaggatttctccttccgccccctctttttggagctggcggaaaagtactgcgtgccgctgatgcagtctccggaaaataccacccatatggccgcccagctcaatgccaagctgagtctggagctggcgccccgtaccaccgtccacggcgttttgatggagatctacggtgagggcgtgctgcttaccggggattccggcgtcggcaaaagtgagaccgccctggagctcctcaagcgcggccaccgcctcatcgccgatgacgccgtggaggtccgccgggtctccaataccaccctggtcggctccgccccggataacatccgccactatatggagctccgcggggtcggcatcatcaatgtcagccggctgtttggcgtcggctcggtcaaaaataccgccaatatcaatttcgtcattcagctggaaacctacgaccccgaaaaggtctacgaccgcatcgggctggaggaggaaaccaccaatattctgggcatgaaggtgcccgccgccaccatcccggtccagaccggccgaaacctcgccgtgatcatcgaggtggccaccatgaactaccgtcagcgcgccatgggcaataattctgccaaggagctgatggaacagctgggccttaccgatgatgtgcagccctgaccgccgaaaggagcaaaccccatgaatctactggaacagctgcaaaatgcgggcatcccctataccgaaaatgaacccatgagccgccgtaccacctttggcatcggcgggccggcgctgctgctgcacccccgcacccgtacccagctgcaaaccgccgtttccctctgccgggcggcggggaccgacccctttattttgggccggggcagcaatctgctggtcagcgatagcggcattgcccgccctgtcatccggctggatggcgactttaccaccatctcccggcagggcaataccctgcgctgcggggccggggcctctctcatcgctacctgccgggccgctgcagaaaacagcctttccggcctggaatggggctttggcatccccggttcgctgggcggcggcgtttatatgaacgcaggcgcctacggcggcgagctccgggatgtcctcacggaggtcaccttcctggatgaagccggggaataccgcaccctgcctgccgcggcgctggaactttcctaccgccacagcatctttgaggagcgtccgggctgcgtcatcgtggaagcggtgctgaccctcacccccggcgaggaaaccgccatccgcgcggccatggaggactacatgtcccgccgccgggaaaagcagcccctggaatacggcagcgccggctccacctttaagcggccggtaggcaactatgcctccgccctggtagatcagtgcgggcttaagggcctttccgtcggcggtgccgaggtcagccaaaagcatgccggcttcatcatcaaccggggcggtgccaccgctgccgatgtacggcagcttatcgccgaagtacagcgcatcgtccgggaaaagaccggctataccctcgaatgtgagatcaagtatatcgaatgagccggcgccgggtgcggcggctgcccctttgcccatccctgcggggtgcgggaaggcgggccgccgcaggcgggcccgcgagcgaagctcgcggctttcggcggagccgaaaggggctgcgcccgccacggccccctgcaccaaccgtcccaccccgctgcgggacggcggtaaaaatgaacgctggctgcgccccgtccttgacaggcatcagtccgccttgcgtcggacaagggcctgcctgcggccgtcccttgccatcccccatttttcctcgccctccccccaaaattcaccccatcaccggagaataacaccatgccctcctttaccaccgccgccaaggatgagatcctttccaataaagccgtgcgccagcacttccccaaccagcagtcctttgggctgatggtcttttcccgcgagttctcggtgccccaaatgcagatgctgacccgggagcgccgggccgcccagtactattcccagctggtgcagagtgtccgccccatgaccggcaccgtcaccctgcgggaggaaaagctctccaccgggcagctggcctaccgcgtcaccgtggatgacatggccgaccgcatcgacctgtataaccacttcgccatgctctaccctgagggcgtcaccttcgagctgctgggcggcgatgagggagccggtgcttttgtgggcggcgtgtttttggcctgcggcaccctttccgatcccgaaaccaagtaccatctggaattcgccgtcccacgcgaggagctgctgatgatgttcgtggctctgctgcaggatgtcggcttttccccgcttttgacccagcgccgggggcaaaccatcgtctacctgcacgatagcacccagatcgaggacctgcttactttcatggggtgcccgctcacctccatggagatcatgaacgccaagatcctcaaggagcgccgcaacgccgccaaccgcgccagcaattgcgataccgccaatatggataaggtcgccggggcggccgccgggcagatcgccgccatcaacgccgtgggattggattccctcccggaggaactgcgggccctggcggagctccgtctccagaaccccttcgattccctgcgggagctgggccagaagctcaccccgcccctttcccgttccggcgtcaaccaccgtctggaaaagattatcgaccttgccgcccgaaaggattgacccgcaaacccccggcaccgccggttgaaataaacccacccgaaaggattgacctgatgaaaagctatcccaccctgccgcagggctatgtccctttcgccaccatcgatctggtgcataacaaaaaacagttttggatcgtcaacggactttccgttgccctgtgtgtgatcatgctgattttgccctttctgtggggccgatcgctgcggggctttgtcggggagggctcgctttctgcgctgctgctccggctcggggtcgttgcggggctgcttgcctacatcgccctgcacgagctgacccacggcgccgtgatgaaagcctgcggcgcttcggtgcgctacggctataaggtggcctacgcctacgccggcagcgatgcctactttacccgcccggcctatgttgccattgcgctggcgccggtggtggtgtgggggatcgtttttgccgtgctggccgcctgcctgccccgggaatggttcccggcggtgtggctgtggcagcttgtgaatatcagcggggcggcgggggatttttactgcacctgccgcatcctgcgcgcgccccgtgacaccctggtgcaggataccggcaccgccatgaccttttactgcaaaacgaactgacccgccccccgcggccccgccgaaacaaagac

SEQ ID NO: 1655 - DNA, 14958 bp, Unknown
  16S sequences of unknown bacteria
cctccaaacaaaactcaaaacttgtttcaacttatgccgaacccgcgaaaatgccgttttccgcaaaacgggcgcaaagtgctcttttccgtcttcagtatgcataaccatgcgcatacgtgtatctgataacgttaatattttattttattttccgctttctgtcaatatttccttagaaacaggctcctttattttacaatttattccatttataagttatttctttttcttatataagggaagttttcaccgtttttcaatgtttcccgatttttccggatttttcatatcgtctatcgacgaaatgtatatttttttcttccataatatagaatctgacggatatggcatatttttcgggaatgaaccgcagaaattaacagaaatttttcagattattttcctgaatgagataaatagattttttcactcatgttagaataatataaaaaacaaaattcaaacgacacgatttttccggatttcagaaacccgattccatttccaatttttccctgattctgtaccgatgtgatccggaaaaggaaaaaacgagacgaggttgatcagaatgaacagagataaagtgatctgcccctgctatcaggtcacaaaaggcgatatcgccgacgcagtggaacagggagcaaaaaaattcaaagaagtgaagaaactcaccaaagcaggaaaaggctgcggcaaatgcaagaagaaagtaaaaaagctgattcgccggctaaaaaaagccgattgacattattcacgataaaaaccgaaaagaccccccgcccggcgaagatcgaacctgaaatcgatcttcgccgggcgggggtctttcaccatccccgagccgtcgctcgcgctgcaaagacacgccgcaccggtatgatattattcggactcaaaacagccccgcttcagtccgagaatcgccgccgcaccggcgagggtcgtaccgtaaaagataacttccttgccgatatcgagatattttacgaccgatccgttgcagatcgtgcttccggtacagagaatcaaatccgcccacgccaccgcgtcttcataagcgtcgattccatgttccactgtcactccgtacttttccgttcctacattttccggattcaaatcgagaatacgcatctcaaaattttctgccacattctgaaaaatcgccggctggtatcccacctgaaggattttcggggaaccgtaagtttcttttaaatacggcacaaattgctgcgcgcacagttccggacctctgtttttacagtgaatcgtgcggtcggccaaaccgagataacgcatgaccgcattgagagatgcgatgaaaagcgccctggcataagcatcgttttcaatgtcggaatccaggatttcctgcagcgtaccggaaaaagcagcgggtgaggaagtgaatgcctgtccgatacagcctttgtattccgcctgcagcatcacctcgcttccatcgagaatcgggtaatccttgcgctccgtgatcccgatcgcttcctccggagaaagcgctgtggaacggattttcactccatccgcttcgagatgattttcctcgataattttctgaaattcgtccttcagttttctgaataattcaacctctgtcatttgactctcctctactgacctgtcacctgcagaaaaacagcgagcatctttgccgcctgcgctctggtagcgctgctctgcggataaaactttccattgatgtcaccgctgacgacgccggctttctgcagctgataaaccgcctgtttcgcgtaccctgtgatggatgcgtcatccaagaatgtgatacctgcctccatctgcgggatctccgcattgaccgcctgcgcatagcgctgaatcatcaccgccatctcctgttttgtaatcttatccgacggccggaatctgccgttggaaccatttacgatccccgcttcctctgcccatgccacataaggggcataccaggaggataccgccacatctgtgaaagaaggcgcctttccggactcctccgaaacacctgccgcagccgccagcattttcgcaaactccgctctcgtcacattttccagcggagcaaactgcgtttccgtgcggcctttgacaacgcctttttcggccagatagtacacatattctttttcccatccgctgacatcttcaaagaaaaactcatcgctgctatcgtctttcggctcatccgaaatcacgctgccgtcataaggccatgcatagacgatcacatccaatgtctcgccctcttcggcctgggtatcttcgaatatgattttatcaccatcctgcgtcattttaaaccgtgatgacagttccgggagattttttacgctgttttcaaatccctggacgataagctcagcataactctgctccgtcagttcaggtatcataatgtctccggaagcagtgggaataaatgcgtgagcatgaataacataagaaccttcgtgatcgaactgatccacagggaacagcggctggccgtctttcagaagctgaatgtacaccatgctgcgcacgttcgcccgatgcgtcacccgcttcgtcacggaagcgctctttcctgccgcgcctgcctgagaatccactgtcgaaagctccagtccgcacggaatgacagactcgatatatctgagattcaccggttttccgctatcggctgtaagaatatgagaaatccccgcctctgatgcctgaatctgtatggacgcattcgtctgcttcacaaactgtgcccccttcacactgcctatagttatgatcaatttcgtatcgtcttcaggatctgcagtcacagaaagcgtccgattgctgaccccgttttccgtgttcggagactgatccagcgaagatccggcgatttttacagaaacgtcttcttctgcaccggaatctacacgaatacttttatcgaactgcaccgttacctctatattctgatcgtcttctgctcttctgtcgttatatgtccggatacgaaacgattgtgcctgtgcctgctccgatacctcggttccgttttccgccgctccgcctgcagcgttgtccgccgcaaaagataccgacgcccctgcgttaaaaaaggtcgataagatcagcgctcctgtcaacaccgcgctgagcttattcctctgtctcttttcttttcttctcattcgccatacctccgcattctgtccgtcgcttcctgccgcggtattcagtttacgatttccgtccgccgcttttccgctgcgctccactccggcccgtcatatgatctgccgcaatcagctaagtcccgctgctcccgcagcgggacctccccgatttctgcttttatgcctctgtcgtcttctgcatcaccatcgccagcatcttgcatgcctctgctctggtggcattatccttcggagcaaaattattcgcaccttttccgctgataattcctgcctgctgcatggaagctaccgcatctgccgcataagaagaaatggatgaattatccgcgaaatccactttatcattgacattctccagctttttcggcgctaatttttccacatatctgtcgataataaccgccatatcctgtctcgtaatccggctgttcggattgaatttatctccgctgcccgttacgataccattctcggctgcccatgcgacataaggagcataccacgcgccggcatccacatcactgaaagaggatcctgccgcagacgccacatccgcaccggccacgcccgcgatgatcttcacaaattccgctctcgtcacaaaatcattgggagcaaacgtatttgctgtcttgccgctgacgatggatttttctgttagataagtcacatattccgcataccatgcatcggaaggcacatcctggaacgaaatctccggaaccggatctgcatccttttcggtccacttggcatacagggtaaaagatttggtaacttcggaaccaaaatcatatgcagtggtcataccgctgtccgtataccatccttcgaaaacaaatccttcctttgtcggatcttccggtctgcttaccttctgaccgtctgcgaccgtctgcttttccaccacagatccgccattgctctcgaaaatcaccgtatattgttccgtttcagacgaatcgccgcctccggaacttccgccgttatttccagatccaccgttcccggaatcatctcccggatctttatcgtcaccgccccccggctgctccccggaatcatcctgaacagttacggaaacggtctcttctgcggtattatactctctgagtgcagcggtaatcgtaatctcagcgtctcctgcagacttggcggtaatcgtgatactgccattgccatcataagatgtctccgcaacgccggagtccgaggaatccactgtaaccacagcttcaaataattgcatttctttaccgttgcagacacattcctgctgaccgttgacatattcgatgcaattcttttcaccacatatttcaggacattccggcatctggcatcccggataatgttcttctgcatacggagaaacgctcagttcaactgtctcacccacctgaagcgtatagctgctgtcgccctcaatctttacatcgcctctgtcgatgtaagcgaaagctgaaaccgccgtcgccgacagaaccatcgccgcggaaactgcgcagcagagcgcccttttccataatctttttttcattttttcctcctgaataaactttgttttacttcattttctgacggataaagtccggtgcagattcgtagggtaaaaacttgtaaatgtattcgctgccgcccgtcagcttcaccgcggcgatataaccgccgccgctcataaagtacgtgctgcgcagagcaggcgcgatttctgaaatctgttccgcttctgtaaactccggccgtgtcccaaaatcctgacggaatgggaattcgtcggcagaatctgatttataggactgaaacagaacagatacaggatcggaaatgcgattcatcgatccgtagggatcgaatttctggagcgtaatgctctctattttctgtgatttactgtctgcagagacctgcgtatcggcttcagatgtaccggctccgtcaaaatagatttccgcgccccatcctttcaaaagagctacggtctcctcaaaatcttccgtaatccagacggagacattcgatgtactgtaagcaaaggtatcgagatcgctctcgccgttcagagtgaaaaacagccgggctcccgcatcctcttcaggaaaataccggtcgcttacactctgggaagaaaggtccgatgcgatcgccgtcagcagggcccttcgactctcttctcccggatcgatccgccggatctcgcccagccacgggtccgcgagataaatttctcccgcggcaaaggcctcggaattccacagagtcgaagctaactctccgcggaccacagcagaagaagaactgcggaattccgcacaattctccaaggttaaaaacgaagccagctctctcaggcggatacgatcgtagtatcggctgattcttctgccggatttcaatgtatagtccacttgaatatcatagggaacgacggtcccggaaaaatcgccgtcagaagatccgagatcatgtatgccgccctccgacagtttctgatggagctcctttgcctgtgcgacactttcttcttccgaaagaataatctgtccgctgcagtaatacgccgctccgctgctgctggcctgcacctgggacggcatgagagccggctgtcccacataactgatcgaaacagaactgatctctccggtttccgggatcttcgatcctgcgcccagcattcctgtatctgtcagcaagatgccggcggcgaggatacaggtcaggcatgcgcactgaatcagttttcttctaatctgtattcccctgcctgaaaccgcggagaggacaaaaaagaccagaaggaaacagaaataggccgccacagccgctatacgacggttcacatctctcattccgtccaaaatcagcgcaaaagcgccgagagaccagactgcaggaagaaaaatgccataaaaccggctgagtccggaaattccggcattctccgattttctgcactgaaagagccagcccaccgcagcagcagcagctaaaattacggcaatctgtggcagaagaggcagcagaccgaccggttccggatcagccgacgccatttcccggctgtaaaaatagtgggttttcagctcgttgtagaaaaagatcagcggattggccggactcagtttttctatcagacccggcgctacgttctccatagcgtacgtcgtctcaccgaagacattcccccaaagataggtcttcatcagagcgttgataaaatagaaaaaaatcgaaggcgcagttgccgcagtcactcccagcgccgctgcttcagagaaagtccccgcaatacagcaggccgccgccgcgatgagcagagcgcaaaaggcctgcaccgtcagaccggcaccgatatatgccgcgtaggacaacagaccatcatatcttccaagagcggaacagttcaacgccgccgacgctaaaaccggcagcgcgatgctcactgcgataaccgcaaaaccggcagcgagccggttcccgtacagctttttccgcttcagccctaaggacatatagaaggatgtccgattgcgatccgtaagaaatccgaagagccgcatcccgcaggccgcgccgaaaatcaccgacgctgcctgaatcagaggcagtacttcatcggcgcaaaagcgaaatttcagctgctgatgtgtataatctacgttaaaaatcgacgtatccggcaccgcgcaggtggatacgggaaacagaacagcaaacacgatcagccccagcagaagcagcccgcggctctgcttcatcaccagaagaaagtcatggcgcagaataccgctcccgctatttccatctcttcttctgctgtctttgtttttgctcctcgaaaaagcaccgtctttctcatctcttttctttttcgaaaatccccggaacttcttcgtcgaagagacgttcgatttcatcttcatccacctcacttttttcgagaaaatagctttccagcgatccgccgcgggtatcgggaacgatgagacgatcgccgtcgatcatcccgatctcgtctgcgatgtgctccagctcatttaaatagtgagacgtcacgatgaccagcgcgttccttctcgaagtataatttttcagaatcttcgtgagcatctgccgtttggcgatatccaggccgtcaaatgtctcgtcgagaaacagataccgcggcatcacagacagagccaggagaaggctggtctgtcgctgcatcccttttgaaaatccggcgattttcgccgttccctccaaaccgaacaaatgcaggagtcttccgtacagctcatcgctccaggtcggataatatccgcggtaaattttccgcattccgtccggcgtactctgaggatcgaaaaacagttcttctgtcataagaaacgaatttctcctgaattcctcattctcgtaagtggacactccttctgccagaatctctccctcttcctggcggaaaatgccggcaatcgtctttaaaagcgtcgtctttcctgacccgttgtatccgatcagcccatagacctttccattttcgtaaatacaattcacatcacggacaatcgtgtgttttccgtatttttttgttacagatttcaactcaatcatatgtatttatcactatttcttttctctgtccctgaacatccgaatacatcgtatttacacaatccgcaggcgctttatcctcttttcttccggataatcagcgctcctgctgcaagaataatcagaacagccgctccgatccccgctgccgcagctgtgtttatgcttccttttgccggagaagctccggtgagaacgtaagaggaacagtgatccagggaaaatgtcacataaccgttttccacagaaatatcctccgcggcaggttctaagtttccgtcctcgccccactggtagagcgtaagaacatctccgtcacggaaaactgatgataccccggcataaaattccgcttctgccggcagattcccttcatgcgagaaatcgaaaaaaagcgcatcctctccgccgatctgtttccgtattttttccgggatctcagtggtgatatccacactgagatcgatatcttccgcttccgtcagcttcgtcccgtcaaacgtccaggagtattctacattctcgccggttttctgctgaaacgtcacgaacctctgatgatccaaggctgcctgcagataggatttcacgtcggtattttcatcaagaggcaccatttcataaacgccccttttcgtttccatcactttgcttccgtccgcagcgcccggatcctgttccgcgctgctgttcccggagatatcttctcccgaaatcgcgtcatccccggtcggatccacagaagtcactttcgctccgtcctgtctttccccatctgcacctccggaatcctttgttttcttctgtgcttgagttcctccgcctgcagagtctgtcgtcacagttaccgaaatcgtctttgtactgctggtatactgccgcatactgcccgtaacggttatcgtcgttttccctgcggacatccccttgatggtgagcatgcctcctccataagaagctgtcgctaccgaagaatttcccgataccgctttcacgctggaataatacgtctgataggaagtacctccgcaggtacattctccgtactcattgagacatcccgtatttccgcagctctgcggacattccgccataccgcagcccggcagctgctgttccttaatcggatctatcgttaccgacacagatgcgctctttccgactgcgagattgatacttgactgtcccagctgcatcgacaccgtaccacggttaaaataggcgaaggacggtacagtgaacaggcactgcatcagcgctgccgcacacaacagcgccaataatttttttctttttttcattcccgatcctcttatctgctctttctctgtatttccgcagcatcgccgcttgtccgcacatttacaatctacggcctgtgcggaaatgcagtatgaaagatatctttctttcttcaaaaatccagttatctgaactttcttcacagctctacggaatctgtctgtccagaattgtcagcatcttacaagcttccgctctcgaagcatttgcagccggcgcaaacctctgtccgcttcttccgttgatgatcccggccttttgcatggctgtcacagcgtctgtcgcataagatgcgatctctgaagcgtcggtaaacatctgaacagtattttcatttttcagggagattccattcttttctgtgtaccggtagaggatcaccgccatatcctgacgggaaatttttccatcgggatgaaatgcggcggtacccgtaccgtttataattcctgcttccgcaccccaggccacataaggagcgtaccacgcgtccgcctttacatcgtcaaatgtcgatgtactgtatttcgtgacatctgcgccgtcaatcccggcgatcagcttgacaaattccgctctcgtcaccggcgcttccggtgcaaacagagattccgtcctgccgtttatgatgcctttttcggacaggtagtccacatattccgcataccagctgtctgctgctacatcggtatattttgaagaatcgctctgtccatactgagatttgtcgacatacaaatccacgcgaatgcagtcgccgctggtctcattgcggtaaccgccgtataccccgtccagattagccagacccgcgataaacggtccgctcacattttttacgagtccgatctccgtttcaaaccctttcgcgagagcattggtgttaaacgtgttatagtccacattgccttccagatcgtgatcatggtccggcaaaaggggatatccgtttttcgacaccgcgatgaccggaaccgcgccgctcaccgaaaacgtattggtgagctccagatagtatctactgtagtctccgtctttcgggaaaaaatatgccagatcctccactttcccgaaaagatcgttatcccttccgtagaacagagcgaatccttctccgtctttcagccccgcctgttccctgagaaaccacgacatgctgagaccttcaaaataatcactgaatccgcccagtcccagagtatctttcatttcctcgtttcctgaaattccgaaatagtttccgaaaacctgttccggatgatctgccatcattttttcgatctctttcatggtataagtaattgttttgaacggctcagcctcctcgccctccttgaaactgtctttatctacaaaattgacagtaaacgtcatatcctgcatataagaaaggggtccttcggaatgaaatccataatgaggatccgacaagtcttccggcgtactgacgagaatcttcgtaacgccttccagcactgaatccgctccattttctccgccgctcagaaaaatcctctttccattttcttctgacgtcagaagagcttctgatccgttctgattcagttctctcagacgtaccgtctctgccggctctaccttatcttcagtaaaaatctgaatcacgacgtcctccggcgcgtcgttctctacgccgcacatcatcagaaacgcggccagatcgattccctttacttccacaggagtcccgctcaccagataactgcgcaattttgtcagaccgagagattccgcttccaaaatttcattcagatccttgccgctgaaaatctgttcttccggcatcagcgcgcctgtaatcttcagaggctggtagagaatatttccatttcctacgaaggcagtttcggctccggctgaaatactgccgctgccgcccgctacctcaattcccgtctccgccgcacagacactgtacaccgacgtcatgctcagcagaaccgccatacatcccgctgcaattttttttctcgcattattcatatcgtttttacctatctattgcacggcagaaagatagcgacagaatctgccgctatctctactgctttttgtattaaaggaaatcagaatccgaagactacgcttccatcatcttcatgagaacagtcagcatcttgcacgcctctgctctcgttgcgttatccttcggagcgaaggtatttcctcccttaccgttgatgattcccgcctgctgcatcgcctttaccgcgtctgccgcataagatgaaatctgcgcgctgtcggtgaagttcactgctgccgtatccgtcggaagcgtgaatctcgcaaagtcagtgtagcgcttgatcatcgtagccatatcctgacgggagatatttccgttcggatggaaagtcgtctcgctcgtaccgttgatgatgccgttttccacaccccatgccacgtacggaacataccatgcgtcggacgccacatcgctgaatctggaagaagacttaccggagacatcggctcccgctactcctgcgatgatcttgatgaattccgctctcgtgatctgtgcgtccggagcgaaagtatccgctgtctttccgtttacgatgcctttgcctgcaaggtaggacacatattccgcataccatgcgtcagccactacgtctttgaaggaggttgacggttcaggctcagcgcctttttccgtccacttcgcatacagcgtaatggatttcgtcactttggaactgaaatcatatgctgtcgtcagtttgctgtcggtataccaacctgcgaattcataaccttctctggtcggatctgccggcttattcaccttctctccggaagtgaccgtctgctttgcaacgtcagaaccgccgttggaatcaaaagttaccgtataatcctttgccacagcagaaccaccgccgccaccgccggaactttcgcgggaaagagaaacctcgacagtctgatctttagtgactgcaacagtacccgtcttctccacataacctggagctgatacagtgtaagtgtacttataggaactcttacctgctgttacagaatatgtaccatcttcattcggttcaatttcattacctgcaatatctgttaatgtaatatccgcatccgccggagttgtatcaaatgtaagaaccgcaggctcttccactaagtcgataccatatacctgataagtcgctctcatcgtcgtattctctgtagatgaaagctcttttccatcctctgtcaccatcgcggttcccaacaagaaacggaaacacttatctgctgccagattttcatcatattccacgtctgtcagaggtttatcatccaaatctacattcggatcttccacaaactgataagcgatcatactctgaacttttaccttatcgctcttggccattgcttcacgcaatttcagattgtgttcggctaccgcattgtcatcatttttattaatggatgcactctcagcatatactttatacaaatcagaattagaattatacagatcctggaaatagtatctgtctgccatcagtgcactatacggagtgctgatcattccaaaataactatccacagtaggatcgtcattcttatccgtcttatcattgctatcatttgttctgaacttcaccattgtggtatttggattaaaatcctcaccttcggtaagtcccgctgcttcgattaaagcagacagatatgcgccgtcgcctttaaacgctctggaacctgtcatggaacaagctgtgctgtaaattatgccctctcctccattagcttcactcttagccatgctctcgatttcatctttcgtaaatgttctctctttgacagagccatccttagctaacaggcgaatcgtaaaggatgctgaaccataaaagctgacggtcacttcctgtgtcactgtcgcataccctttagattcgatagttacagtgtaatctgttgtctttgccgtcgtctgtcccggtgtatcgaacaccagactcttaatcttcagcataccggagtcaaatgaataatccgtatctttctctaaaaccttgtcgttcagcttcacggattccacctgatcaatccaatcctgaccgccgagcagagacagactcaccgaaccgttggatcgtgtcacgctcgtcgtagtgatggcgttatcctgcgcgccgtccactgcagactgaagatcggctctgatcgtctgccatttcacgccactttgcactgtatcaggctttacaagctctgcctgcgcaatagcggtattcagcgtatccttacactcctgcgcaacggagttgctttcttcaatctcagctgccctctcttttgcagccgagagttcttcacggaataataccggctgaacgactgcgtcaccttctgaataaccgaaggctctcataacggtattttccgctaaatcggtattttcaccgttttgctttgcggtgattgtcacagtatcacctttcgccgtcatatcgtactcttttgagtaaaaattatccgccagctgcgatgcccatttttcgtttgttccgctaagatacatatgagtatgtacattaacagtaccgcggctctcgttacagtctcctccgagggttaaatctttgccgtcttcaccttctccaggtttcacttccgtgcagacaatactttcaccatttaccagaatctgtaccggagaagcgcctctgagttttacatcgcctgtcagctgaaatgtaacggatgccggtttgtcaatatcaccgtttactgaactttgtttctcaaattccagaccggtctgaacgtaagtgtggatatctgtccactcgctgacttcattgccgtcagcatcgacaatatcctcgtagtaatttgatttcagagagacatccaactttccgctgactacatatgcccaagaatcgtcccccttatcaattcctttcagatcgataatcagttccgttccggagggcttcacttctgaaattgcaaaccccatatccgttaaagatctgttatttatcgatatatcaaaagcggatttcgtataatttgtactgcccatcgctttatcaaacattaagttgataagaatctccgatcccgcttccgttttaggatctgtatttgctacgctgatactgtaatctaccagcttcggtcctgttccttcttctgtctgtccctcagtcgcaaaagaagagactgtcatacatcccagcattgcggataagaccatcgcaaatgcgaggatggataagactgactgcttttttcgtttttttcattttgtcaactcctaaagctaatccttctgtttgagatatactgttatatatgataaatgtgtgcgtcggcatccgcgcgtcatgcctgtactcacggttatcaacaaatgtaatgttataaatatcctaccgctgtctttgctctgcgtccgtcaggagccaccgtatcggcgacgcccgttcgaatcccataaatttcgtccatcagagcgcaggtaagaatctcatcggtatctccggtgagatattccccgccttttttaattacggtcaccttagaggataccgcaaaggcatgatccggatcgtgagtcgtcataatgaccccctttcccgcctccgccaactgtctgacgcggcgcagcacccggacccggttcccaaaatccagatttgacgtaggctcgtccataatcagataatccgattcctgtgcgatggctctggcgatgagtaccaactggcgttctccgccgctgatctctgtataggcctcgtccttcagatatcccacgcccatcagttccagcgcttcctcggctatttcataatccttttta

SEQ ID NO: 1656 - DNA, 17747 bp, Unknown
  16S sequences of unknown bacteria
atgaagaatggaggcgaatgtatatgacctggcaaattcgtcaacgggaagcggagctgctcggggaaaagcgcggcattgccattggcaaagaactcggggaaaagcgcggcattgccattggcaaagagctcggcgaaaagcgtggcattgccatcggcgaagagcgcggcattaccattggcgaaaagcgcggcaagttggaaacggcgcgggccatgctaaaagaattgcccatagaccaggtcgcgcgcttcacgggcctctcgcgggaagaactacaatcgctggccggcgaaattgccccgcagggctaaggggcgaatatatatgacctggcaaattcgtcaacgggaagcggagctgctcggtgaaaagcgcggcattgccattggcaaagaactcggggaaaagcgcggcattgccattggcaaagagctcggggaaaagcgcggcattaccatcggcgaaaagcgcggcaagctggagacggcgcgggccatgctgaaggaactgcccgtggaccaggtcgcgcgcttcacgggcctttcgcgggaagaattgcaattgctggccagcgaaattgccccgcagggctaaggggcgaacggatatgacccatctggcgcatgctcttccttgggaatgggcatgtgcctatatctttgcgccggattgaagcaatatccgcgcctttagcggtatccccgctttgcgggagcaagcaacggccgtagcaggcggtatgggccatttgggcccaacgccggctccggctattttttatgcagctttacccgcttttgctacagcgctggaggcgcgctttttcgaacggacggcgtcatacggattgcgctcgcccgaaaagcttcgccgcatcgcggcgacatttcccttgttccatgctgttttttccttccctttctccagtttgatgcctgatttttcccagaattgcttgacgcgatcgagtgcgaaagcgggctggacaggcgcttatctatcctgtataataaatggaacgaataaaactaggagttcgaggcgttggacgctgaaaaattcgcgctgccacggcggcgcggacaggaggaaaaccatgcactatgaaccttatgcgcagcgcaccctggcgaagctccgctcggccaatgaattgtatgccaagtggatgctgagaaaggtggcgcacatcgacggggcggaagctttacaaacccaagagcatcttcgaacgcccccggaggatggctgggaaccgataaacgcgggcgcggcgtggggcggcgaatggaacaacctgtggctccggttgaatgtgaagatcccgcaagaagccgcgggaaaaagcgtgtatttgcggccggacaccggcgcggtggaaacgctctgttttttgcgggatgtaccttgcggcatcatcaacagcaagaaccactttctgggcggggagcacagcgcgctgtttctcacccaagcggcgcaagcgggcgaggaattcccggttgcgttcgaatgctatgcgggacaccattgcccgggcacgcagccctatgaaaattacggctgcgacgaaccggcggaaggcgcgttttcccacgtgttccgcggcgtggacgtgctggtgctggatgaagcggtacacgcgatgtgcttcgatttgatgaccgtgctcgaggcggcggatttgcccgcggacaactttttgcgccgcagggcgcgcgcggcgctggataaggtttttgtggatctgatccaggatccggccaaccacagcgcggaagaaatccatgcctcggcgcaggcctgccgggcggatatggcggatgtgctatctgcgcgcgaaggagaggacggcacgcgcggtttcgtggggatttttgggcattcgcatatggacagcgcctggctgtggcccatggacgagacgatccgcaagtgcgcgcgcacgtattctcaggcgttgcgtctgatggaacgctatcccgaataccgtttcttccagtcctccgcgctgcacctggactggatgcgccaatattatccggcaattttcgaagggattcgccagcgcgtggccgaaggacgctacgagccaaacggcggcgtgtgggtggagtgcgattgcaacattccttccggcgaatccatcgcgcggcagtttttgtatggacagcggttcacgcgcgaacattttggctacaccagcgattgtttctggctgccggatacctttgggtacaatgcggccctgccgcagattttgcgcgaatgcggtgtgaaatatttttgcaccaccaaaatcggctggaacgatctcaacaaattcccggtggattcctttgtgtggcggggcatggatggtagcggcgtggtcacgcatttcaatttgatccacacgttcccggatgtgaagaatgtggaacgcgccatcgcggaaatccccgataagcaggcttcggaccagaaactgttggccttcggctttggcgacggcggcggcgggccgacggaaggcatggtggaattggcgcggcgcacggtaaagatgcggggcatacccgcggtgcgctatgtgtgtgcgagcgaattcatgcgcaggctagaagaacaggcccaggagggcgcgctgccggaataccgaggcgagttgtacctggaactgcaccggggcacgctcacgcagatgcacgatatcaagcggaacaaccgcaaggcggaaatcgccctgcacgatatggaattcgccaatgtgtacgcgcgcaagcccaaggacgcgcagacggacgcgctatacaagattttgctgcaaaatcagttccacgacattctgccgggcacgtcgatcgccagtgtcaatgagcgcgcccgtcgggaagtgtcggacgttatccagcgtgcgcgggtgcacacaggaggctatatcctgaagcggttgatcgccacaaaattgcttggcgaggaggatggattgcgcacgtttgaggggcagaacgcagacaatgcggccgcttcgctgaagggcagcgggcatgtgacgctggtgaacacgctttctcacgcgcgcaacgatgccgtcgttttcccggatgaagggatgaccatcgcggacgcggcgtaccagcgctatacggatcctttgggccgcgcgcagatcgcctgcgtgggcgtgacgctggagccgttgtcgatgcagtcgttcgcgctcactccctgtgggccggatatggaaagcgcctttaaggtttcgccggacgcaacctgcgtggaaacgccgctgtatgttgttcagttcgacgaatgcggctatattgcttccctgcgggataagcgggccgatggacgggaattgcgccgggcaggcggcgagccgctgggcacgctgtatctgggcgaagacgtgcccgccgattgggacaactgggatatcgattccgaccaggcagccaagcttcgccctgtgcggcggctgctctcgcgcgcggttgtgagcgatggcgcggtggagctgcgcattcgcgcggtgtacgccctgggcgagcattcctccgccaccgtcgatacggtgctgtacgcggaagatccgcgcgtggacttccacctgctggtggattggcaggaaaagcacgcgctgctcaaggcggggttcgacgtgaatgtcagcgccagcgtggccaagcatgaaatccagtttggccatatcgagcgccccaccacgcgcaacaatagctgggaagccgccaagtttgaggtgtgcaaccacgaatggacggatctttcggaaagccgctatggcgtcgcgctgctcaacgattgcaaatacggcgtgtccgtgaacgaaagcgatatccggcttacgctgcacaagggcggctgccggccggatcccagcggcgacgcgggccggcatgaaatgctgtatgcgctgctgccgcacttgggccccatgggcgcggagaatgtgatcgcgcctgcgcgcgagttgaattatcccacgttgtgggcgccgggcctcacgctgcaggacgagcctttggcgacggtttcgcaaagcaatattctgattgaatcggtgaaatgcgcggaagatgtggaggacgcttttgtgctgcgcctgtttgaggccgagcgttgccacacgaagtgtacgctgagtttctcctgcgaggtggcgcatgtctatcgcgtgaacatgctggaagagattgaggaagaactctttgtgctggacgattgcgtggagctttccttccggccctttgagatccagtccatcctggtaaaacgcggctgagcgaacaaaaaatcgaacgcgagatgaacaatggcggatttcgcttgacagaccgcggctgggatggtacaatggctacaatatttcaatcctgtgatgcggaaatcaaaccgttgcgcgcgcccacagagagcgggggaggctgagagccccgcggcaaggcggcacggcaaatggcccgcggagggcgaggggaacggcgcgatgcccagtatccaagccgtaagccggcgttaacggcaggggatgtgttggcattcctgggaaagagcggcccgctttggcgggcagcaaaggtggtaccgcggatggaagtccgccctttgacggggcggacttttttgtattctcacaggggaaaacgcgtaaggagagatgcgaatggaactgttgatgggcaacgaggccattgccttgggcgctttggccgccggggtgcaattggtttgcggctatccgggtacgccttcgaccgaggtgctggaaaccgtggccaagcgcaggccggaaggcgtgtacgtggaatggtcggtgaacgaaaaagcggcgctggaagtggcggcgggcgcggcgctggcgggcgcgcgcgcgatggtcacgatgaaacaggtgggcctgaacgtggccagcgacccgctgatgagcctgaactatttgggcgtggaaggcggcgcgctggtggtgctggtggccgacgatcccggccccatttcctcacagaccgagcaggatacgcggcattttggccgctatgcgcgcatcccggtgttcgatccgcagacgccggaacaggcctatcagatggccaaggacgcgctcgcctgctccgaaaaatggaagcggccagtgatcctgcggcccaccacgcgcgtgtgccatagctgcgcgagcgtggcggcggaaccgcccgccgcgccgcggggcgtgcgcggctttgccaagagcgaaaagtgggtgatcttcccccgcctggcctatgccgccaagaaacggctcgtggcggaggaggaagcgctggccgcagaattttcccgctatgcgggcaaccggctgtatggagaaggcaggctgggcattgccatgggcggcgtcgcggcggcctatgcgcgcgaggcgggattccccgcgcgctatctggaaatcgccacgccctatcccttcccggaagaattggcgctatcgttcctgcgggaagtggacgcggtactcgcgctggaagaattggatcccgtgattgaggacgcgctcacgcgcctgtgcggcaaacaccatttgcccgtgcgcattctgggcaaacatacgggacatgtgcccgtggcgggggaactgagcgtggaaagcgtgcgcgcggccatggcggcgttcctcgggcgggaagagcataaggcggcggcttccgcgccgctggagggcaaattgcccgtgcgcccgccggtgttgtgcgcgggctgcccgcaccgcggctcgttttacgcagtgaaacaggccatgaagggacaaaaggcggtcttttgcggcgacatcggctgctatacgctgggcaacgccgcgccgctcaacatggtggacacctgcctgtgtatgggcgcgggcgtaacgatggcgcagggcattgcccgcatggaaaaggataccacggcgtttgctttcatcggcgattccacgttcttccacacgggcattcccggcgtggtgaacgcgatttacaacggcgcggacgaagtgatcgtggtgttggacaattccaccacggccatgacgggtcgccagccccaccccggcacgggcgcgaccatgatgggcgggcaggctgcgcccatgtccattcccaaggtgctggaaggcctgggcgtgcccgtgtggcgcgcgagcgccttcgatttgcaggcggccaaggcggccatcgcgcaggccgcggcgctgcgcggccgcgtgcgcgcggtggtgctggaggggccgtgcgtttcgctggtgaagggcgcaaagccgctcacggtggatcgcgaggcctgtctgggctgccgccgctgcgtgcgcgaactgggttgccccgcgctgtttatgcaagaggggaaggcgcaaatcgacgcttcgctgtgcacgggctgcacgctgtgccagcaagtttgtcccgtgaattgcctgaagggaggcgctggccgtgaataaaaactgtcttttgtgcggcgtgggcgggcagggcaccgtcctcgcgtcccgcctgatcgcgcaggcggccatggagtgcggccattttgcccgcaccacggagaccatcggcatggcgcagcgcggcggctgtgtggtgagccatgtgcgcatcggggaagaatgccaatcgccgctgatcccgctgggcaaggccgacatcctggtgggctttgagccaggcgaggcggtgcgctgcctgccctatctcgcgcccggcgcgcccgccgtggtgtgcgtcacgccagtgcagcctgtgatgggttcgctggcgggcgaagtatacgatgtggaagccctgctgcgcgatttgcgccgccgcgtggcggcgctcaccacgatcgacgcgcggcaggtggccgaaatctgcggcacaaagcgcgcgctcaatgtggcgctgctgggcgcggtcgcccggcagggcgcgctgcccattgcgctggaggatgtggagcgcgcgctgcgcgcaaagctctccggcgcggtgctggaaatgaacctgaaggcgctggaattcggcgccaacgccaaggaggatccgcaatgcaaatgacagaaagcatcctgcaaaacattcgcgggcagattgcccacttaaaaaccattcccaatggattttacgccaagcggtttcgcgatatcgagccgggcgacgtgcgctcgcaggcggattttgaggcgctgccctttacggacaaggacgatttgcgcgcagcttatccgctgggcctggccgccgtgccggaagagcagattgtgcgcatccactcttccagcggcaccacgggcacgccggtgatcatcccctatacgaaaaaggacgtggccgattgggcgctgatgttcaagcgctgttacgagatcgccggcgtcacggccaaggatcgcgtgcagatcacgcccggttatggcctgtggaccgcgggcatcggcttccaggcgggctgcgagctgctgggcgcgatggccattcccatggggccgggcaacacggataagcaactgcgctttatggaggatatgggcagcaccgtgctgggcgccacttcgtcttacgcgcttctcttagcggaggagatcgcccggcgcggcatccgcgataaactcaagctgaaaaagggcatcatcggttccgagcgctggggcgaaaaaatgcgcaagcgcatcgccagcgaactgggcgtttcgctgtatgacatctatgggctgacggaaatctatggcccgggcatcggcatcagctgcgacgaggacagcggcatgcatatgttcgatgactatgtgtattttgaaatcgtcgatcccaaaaccggtaagcccgtgcccgagggcaccattggcgaattggtgatcaccaccttgcaaaaggaaggcgcgccgctcatccgctatcgcacgcacgatttgacccgcgccattcccggaaaatgcccgtgcggctgcgcgtatccgcgcgtgggcatgatcctgggccgcaccgacgatatggtgaaggtgaagggcgtgaacattttccctggccaaatcgatgaaaccctgcgcgatgtggagggcgtgagcagcgaataccaggtgatgatcgaccatctggaaggcaaggatatcattaccctcttttttgagaccgaatggactggcggggcgcgcgaggcgctggccgagcgggtaaagcagcacgtgaaggcgcacatcggcgtgagcgtggtgcccaagcctgtggatatgggcgaattgccccgcagcgaaaagaaatccacgcggatttttgataaccggtattgaggcggaaacagagcggcaaaggaggggatggcttgaacgcaaaggaatccatggagcggttttatgcgggagaaaatgaagaggcccgactgctttcccggcatggccaggtagagtatcgcacaaccatgcgatttatcgagcgctatctccagacgggcatgcgcgtggcggatattggcgcgggcacggggcgctatgcgctggcgctcgcccggcaaggctgcgccgtggacgctgtggaattggtggagagcaacctttctcgcctgcgcgagagggcgcgggcagaaaagtccattcgcgcgtttcagggcgatgcggtggcgctggactttttgcccagcggcgcgtatgatatcgtgctgcttctgggcccgctgtatcatttgttttcgcgcgaggagcgcgagcgcgcccttggcgaggctgtgcgcctcgccaggccgggcggcgtgattttcgccgcgtattgcctgatggacgcttccattctgggctatgggtttatgcgggggcatgtgcaagaattgcttgagaagggcctgctggacacggagcggttcattgcccgctcgcggcccgaggaggtttttcagctcagccgcgtggaggatattgaggcgctggcgcaaacgcagccggtagaaaggctgcatttggtggcgaccgacctggccacgctgtatatgcgcgattgcgtggacgccatggatgacgatacatttgccctctatctgaaatatcacttttttctgtgcgaacggcgcgatatgattggcgcatcgcaccatgccctggatgtgctgcgcaagcggacgtgagcgggcaaagcgtggaaaacggcggtctggccgcggaaaagcccctgattttttggggcgtttcagcggccagaccgtttatgcgtttgcgaggtttttagtgagcgttttcgatatagccttccagcgcgtcgaaggcggagcgggcgaagctggcgctggcgccccaatcgaagcgaatgaagatgccttcgccgccaccgccgcccaccgagcgcacgcgcgtttggcccgaaaaatcgtcgatgagcacgctgagggtgaggcggttgcctgcgcggtaatagaatttttcaaataccatggcgatgagcgttttatcggccgcttgccgccgcacttcgtccaggcactcgccggagatagaatttaaaatgtgcgcgcggattttgtccgccgcttgttgcggcgaaagggaaaccgtggcttcgtatgtttccatggatttctctcctttccgggcatggttctgccgctattgtagggcgcggcgcgtgcgtttgcaccaataccgtgttaaatctttgacacattttagagaagcggagaaaacagacggaaatcaaagatggcatggtaggaatcgatgatattcacgaaatttggctcaaaacgccgggaattcccaggaattcccgggctcgccacttgcacaaaaggggctttttggatacactatccacagtgcctgttagcactcaaatgaatcgagtgctaacaactctacaccattcaggagggacttagagatgaagatcatgcctttgggcgatcgcgtcgtgatccagaacgtcggcgcggaagagcagacgaagggcggattgtatttggccaccaccgcgaaggaaaagccgcagatggccgttgttttggctgtgggcccgggtggcaatgtggatggcaaggaaatcaccatgcatgtgaaggaaggccagaaagttatttattccaagtatgccggcaccgaggttaagctggatggcgaggaatacatcctcgtgcgccagtctgacattctcgcggtcgtagaataaggaggaagatcgcaatggcaaagcagcttttgtatggtgaggaagcccgccgcgcgctggaaaaaggcatcaatcagctggcggataccgttaaaattaccctgggccccaagggccgcaacgttgtgctcgataagaagtttggcgctccgctgatcaccaacgacggcgtgaccatcgccaaggaaatcgagctggaagatccctttgagaacatgggcgcgcagctcgtgaaggaagtcgccaccaagacgaacgacgtcgcgggcgacggcaccaccaccgctaccctgctggcgcaggcgatcatccgcgaaggcatgaagaatgtggccgcgggcgcgaaccccatggagctgcgcaagggcattgagcaggccacggacgcggccgtcgccgcgctggccgagctgagccagcccgtcgagggcaagcagggcatcgcgcaggtcgccgcgatttcctccggcgatccggtcatcggcgatttgatcgcggacgcgatggataaggtcggcaaggacggcgtcatcaccgtcgaagaatccaagaccctgaagaccgaaatgacgctggtggaaggcatgcagttcgaccgcggctacgcgagcgcctatatggtcaccgacaacgagaagatggtcgcggagctggacaatccgctgatcctcatcaccgataagaagatttccaacatccaggagatcatcggcctgctggagcagatcgtgcagcagggccgcaagttgctcatcatcgccgaggacgtggaaggcgaagcgctggccaccctcgtgctcaacaagctgcgcggcacgttcaattgcgtagccgtgaaggcgcctggcttcggcgatcgccgcaaggccatgctgcaggatatcgccatcctgaccggcggccaggtcatcaccgaggaactcggcctggagctgaaggaagccaccatcgatatgctgggcagcgcgcgccaggtgaaggtggacaaggagaacaccgtcatcgtggaaggcgctggcgatccgagcgaaatcaaggcccgcatccagtccatccgcgcccagatcgaagagaccaccagcgattacgaccgcgagaagctgcaggagcgcctggccaagctggcgggcggcgttgcggtgatcaacgtcggtgctgcgaccgaggtcgagatgaaggaacgcaagctgcgcattgaggacgcgctcgccgcgacccgcgcggccgtggaagagggcatcgtgcccggcggcggcaccgcgctgatcgacgccagcaaggaagtcgccaagctgctcgcgcagaccaacggcgatattaagaccggcgtggccatcgtgctgcgcgcgctggaagagccggtgcgccagatcgcggtgaacgcgggcgtggaaggttccgtcgtggtggagaaggtcaagagcaagaagagcaacaccttcggctatgacgccgccaagaacgattatggcgacatgatcgagcgcggcatcgccgacccgaccaaggttacccgcagcgcgctgcagaacgcggccagcgtggcggccatggtgctcaccaccgagtcgctcgtcagcgacctgccggagaagaatccgccggcagcggctccgcagggcggcggcatgggcggcatgtactaagaataatccattgctcaattgggggctgtcgcaaaagccgcccacccataaggaagtaatggtatcttgcaggacagcatggcaaattgctatgctgtcctgctttttctttctcgttcaatggtctgcttgtcctcgtcctgtttcaattccccgacgaagttccagataatctggattttctgccgccggtggccgctggacttgtccggcgcgtggacgataacactatgaatgagtttacaaaagtggacatgaaaagcgaggaaaaatatcgtttacgagtttatgcttatagataagggggagcaataaatggaatggttgaaaaaactaagtgctgcaatagattacatagaaaacaatttggatagtgatttgtcttatgaagaagctgctcgaattgcctgttgctcggttttctattttcaacggatattttcttatgttgctggtatttcgttatcggaatatatccggcgcaggagaatgacacaagctgcttttgaattacagcggacagacgctaaagtgatagatgtcgctttgaaatatgggtacacttcccaaacatcatttaatcgtgcttttcagagcgtacataacatttcccccgccgcagcaaaaaacatgggaagtacgctaaacgcttatccggcaattcatttttcagttcaagttacaggaggaaatgctatgccataccacattgcagaaaaacaatgtatgaggattgtgggagttcgtattccgttgtctacggacatggaggaaaatcagaagaatattcctccattttggcaatctgttttgagcagtaatctattttctgaaatatgcagtttatcaaatcagtccccacagaggatattgggcgtaagcgtatatgaaaatcccaaaaattttttctattacattggagttgctacggatgtgcctgttcctaatggtatgttcgcatttgaaataccagcggctacatgggctgtatttgaaaataacggttatttcaaagagaatgtgcaaagtatttttagaaggttttatacggaatggctgccattttcgggctatgaatatgccggacttcctgacatagaagtgtatcccgtttttgaggaaacacctgttagtggacgttcagaagtatggattgctataagaaaagaaaaggagaataactcatgtaccacttacgattaaagggcgaccattatcaaatgggtgttaagcggggcacgatttttcagaagtgcaaaatatctttccctctacatcttgataagtttcagcttgaacacggaaaacaaagcgaaaaaatactaaaagattttttcccagaggtttgtgaagaaataaaaggcgtgagcgataccataggcacagattacgatacatttgtttcgtggatgttatgtatgggttgctgtatgtataacttggaagaaaatatccccgttgagattagagggtgtactgcatttgcctatgctaaaggtgggcgggtgatttatggtagaaacaatgatttgccgccgtatttgagaaatggaagcaagagcgaaatatatgctccattaaacggaaatagatttaatcttacgacttcttctttcatcaatggtgaagaaggtctaaatgaacatggtttggctgttgctatgacctttgtattgacaagccttgacaaaatacaggcaggttttaattcctgttttattgtacgatatttgcttgaaaaagcagatacggcacaaaacgcaatctctttacttatggaattgccaatagcttctaactgcaatattttagttgcagacaaaagtggggaaatggcagttatagaatgtacgcctaccacaaagagaatacgtaaagcgatttgctataataaaggcaaaatcatatgtaccgttaatagctttacttccaatgaaatgaagacctttgacatggcgaatggagatgattatttttccgataggcgataccaaacggttatagatagtttttcaactcatattcaagacgactatattgaaacgacaaagcagcttctaaaaggcgattacgggtttatgtgtcaatatgatgaccctaattttgaaacggtttggagttctgtatttgatttgaaaacgcttatgatatatcgtgcagaaggtgacccgagaaaaaagaagttcgtggtagataaccggctgcacagtatagtgaaaggacgctaaagttttgaatacagaatggctgctatgccctgtttgctagagcaagacgcggataagattgcgggaagatacggtacttgaaaacttcccgttgttctgtccgaagtgcaaacaggaaacgctaattagcgtaaagcacatgagaatatccgttatccaagagccagacgcacagacgcagagccgataacacgcagatcaaaatgcggttatcggctcttttactttattggaggtatcaaaatgtttgttgatcgtcgcttcatagtttcccatgatatgcgctcaaaaaaagcctttgcacctatatgggattttgcgcttatgagtatgaatacacaaatcatatagttatctctcatagtttatttacccaacgcccatgcggttttatgctgcatgggcgtttgttgttatcaccctcactcggggcagaaagggggtgagaaaaatgatgaacaacgagcagtatcgggaacatatcgagcgcacttttaacgctttttgcaagattgtgctttaccatgcggcactgggcgcttacaagaaaatacggaggaaacagcagtttgaagtgtccctcgactatcttagggagtttgattttgagcctgtcacgacaacagacgagtatttcgtgaaatacgatatacccaccgcttttaccgttcgcggggaaacggtcattgtggaaagcaagcagttagccgccgcgcttttgcgattgccggaaaagcggcaggaagtcctatttttacagtactacctcggttatagcgatgaagaaatcggaaagttattcggagtttgcagaagtacaatcttccacaggcgaaaaagggcattgcgcttgctgcgaaaagaaatggaggcgttagagaatgaagaataggaagtacaatttgctaccctatgaaacgattgtaaaagcagccgccggggagccggaagcggtgaacactgtcattcaaacctataccggctacatcaaatatctgtcctattttcaagggagtatcaacgatgatattcaagattacctcaaagcgtccttaatggaagcactacccaagttccgctttgacagatgataagtagcaaagtcagaaaaagccgtcaaggataaacttcacgcttcgcgtccttgacggcttttcccgtctttgctgtttggtaatcaaaagggcgcaaacggataaaccgctttgcgccctcaaaatattatgagtatgttgttacgcagtaggcttgaaaaaatccttgcgccatgcggctttgcagacttgaaaacacgatagttgagcgtttctattcccaccctcaaaaatggctgtctactgcgtaacattttgccatgccagcgtggatatttaggcgggcaaaaagccttgatttgtgcggcttgcagagggcaaaaacagcgcaagtaatatcatatccctcgaaagcgcaaaaatgcctttctatcgttccacgcggcgcagaaaaagcgggcaagaagtttttgacctcttacccgcttttcgttgcaacctgtctgccagccgttaagttagtttgttttcaaaccttccttatcggtggttggcaaatgcggcagcccttttcactttagctggggttttggttgcattttgtggcgcggccctgtataatatccttataaagagggtttggggaaagtctgaatcgaaaaagagaggtgttccgtccgtatgccggagattagcctgttttatgggataaggattaccatgaattatagcgagaacaatccgccgcattttcatgtggaatccgctggctatcgggcgagtgtgcgcattttggatggggtgattgaccggggcgcgttgccgggcaagcaaatgaaacttgtgctggcatggtgcgaaattcatcgggacgagctgatgcaaaattgggaattcgcccgcgaccaaaagcctttgaaccgcatcaatcctttgatataagggggcgtttcaggatgaatacccagctggatttttcgcgatttttcccctgcgtactgcaggcggtggcgacggacgattttcaggtgtatgtgtatttcaacgatggttctgtgcggctgttggatgcaaagccgctcctccagcccggcacggtttttgagccgttgcgcgatattgcggtgttcaaggacactttgaccgtgctcaacgatactgtggcctgggatcttagcggcaagcgcgatggcgtggattgcctggatttggatccggaaacgctctttgctttgcccgctgtttcggaagaactctgggatacggcgcaatagatggcttggggctgtcgcaaacgcggcagccccatctttgggtttaaggcttttccgtgcagagggcaatcaaatcgtcgagcttggccgtggccaagcgcaccaccgtgtcgctcgcgctgtagtaaatgcgcacggtctggtcgtcctccaggatcatgccacaggggaagagcgcgttggtgcggaacccttcgatttgctcttccgggccttccggcgccatcagcggcactttgcacaggccgatcacccgggaaggatcttccagatccagcagcatcacgccgatcacatagcgcttgcgccaggcgtcttcccagccgtttttgccgcgcgcgggatccacgtccacggaatggaagatcaccagccagcccgcgtcggtcttgagcggcggcgcgccggggccgattttgtcgttgcagaagggcacatcccggcaactgagcaccagacgggaattgccccagtacgcgagatccggcgaatcggacagccaaatatcgaagaaatggccgcccgtggaatacaccggcatggggcgttccaggcgcacgtattttccgccgatcttttccgggaagagcaccatattgcggttgtcgggcacgctgaggctgatgggcgcaaaatggtggaaatcctgggtggagaagatgccgccgcgcacgccatggcgcgtgtccacggcaaagcacacgtaatactgcccatccatgcaggtgatgcgcgggtcgtaggcgcgggagatctcttcatcgcgcaattccagcacgggctggctttccacctgccagtggatgccgtcatcgctgaaagcgaggccgatgttggtgccggcaaaattgcggccttctttctcaaactgttcccgcgtgcagccatagtcgttgcggaacagcatgatgtagcggccgttttccttgacgacgccggcgttgaaggtcaggttggaatcgtagggcacgtccttgctggtgaggacgggctcaggataccgcgtgatgacaggactggtgcgaaagagcgattcgggaatcatgcgcttgcctccttgctgtgcatggcattcgtccacaccattataacgcacaggctacagtttttccatagcgcgagccgatttttttgcggtataatagcggaaatgggcaaagcgtctcacagcttgtcaaaaaagtctttttgacaagctgatggacgggggagcaagctatccacaattcgcaatggtcgtcctgcatcttcgcaccgtgccgtcttcggcggcccggtgtttcgcctctgcggacttcgcttcgctctgtgtcctcgaggcttcagccgcttcgcggcctccgatgagagcagtactcccttgctcattgggcttacttcgcgctgcttcgcccacagggcgcgcgcttcgtgcgccccc

SEQ ID NO: 1657 - DNA, 3902 bp, Unknown
  16S sequences of unknown bacteria
acgcgaaagggctcgaaccttcgacctctaccatgtcaaggtagcgctctaaccagctgagctacgcctccgaaatcttgctttgctattatagcaaataatttatttcccgtcaactgattttcggcgtttttctgattttaataaaaaataatttccctatttcgtcctcaatttgtcggaattagggccgagcgttgactttttcttccaaagagggtataatagaaaaaatgaaacgaaaagagaaagccttttggtaggctttggaggtcagacatgataggaacggttgctctcggcattctgctgccgtttatcggaacatctctcgggtcggctatggtctttctgttaaagaaagaaatcaacccgaaaattcaaaagttgctcttgggcttcgcctcgggcgtgatgatcgcggcgtccatctggtcgctgattcttccttcggtggaactcgccagggacagggggacggtggaatggctgcccgccgcgtcgggctttgccgcggggatgctcatccttttgctgctcgacacggtcgttccccatcagcatatcgattccgaaaagcccgagggacacaaatcgtcgctcggaaaatccaaattgctgtttttgtccgtcacgctgcacaatgtgcccgaaggcatggcggtcggcgcggtttttgcgggacttttggctgcgggggaggaaatttccgtcgcggcggcgctctcgctctccatcgggatcgcgctgcaaaatttccccgaaggcgctattatttccatgcctttgaaggctgcgggcaattccaaggcgcgtgcgttcggctacggggtattttcgggcgtcgtggagcctgtggccgctttgatcaccgtgctcttttcaagcgttattctgcccgtgcttccctatctgctctcgtttgccgcaggcgccatgatctacgtcgtggtggaagaactcatccccgaatcgcagagcggcgagcattccaatatcgccacggtgggcgtgatgctcggcttcgtcgtcatgatgatcatggatatggctttgggataaaaggaaaaaggcttaaaacttgactttttaaacaaagaggggtataatggaatcgatagggatatgctcactttattttttaaacttttttgccaaaaaacgcaatttttcaaagtgaaaaaagtattaaaaattttttgtccaactccttaaaaataaaacgcttaatcggttgactttcttggaaagaaaggtataattagagaggtcgaggcggcgggacggccgctaataaaagaccttcaaaggaagaacggatatggaaagaaactacgaccctttcgagaacgtacagacggtaatggacgaagcggcagcagtcgggcacattgatacgagaatgttcgacattctcaaaaatccccagcgcgaagtgaaggtgtacctgcccgtggaaatggacgacggcacggtaaaggtgttcgagggctggcgggtgcagcattccaatgtctgcggtccctacaaaggaggcatccgctttcatcaaaacgtctgcctcaacgaggtgaaggctctctccacctggatgacgctgaaatgcgcggtcgtaaatattccctacggcggggcaaagggcggcatcagggtggatccgtccaagctttccaaacgagaactttgcaggcttacgcgccgctatacctatgcgatagcgcaaatcatcggcgccgatacggatattcccgcgcccgacgtcaatacgaacgcccagacgatggcatggattctcgatacatataatatgctcaacggcaagccctgtccgggcgtcgtaacgggcaaaccggtggaattgggcggatccaaggggcgcgcttcggcgacgggacgcggcgtggttttttccacgaaattcattctccaaaagtacggcaaaaagctcgatgaggtttccgttgcgatacagggcttcggcaacgtcggtggtcatgcggcggaaatctttgccgaaaacggtgcgaagataaaggcgctgagcgacgtttcaggcggcgtttactgcgaagaaggcctggatatagcggaaatccgcagctttacgtcgggggggaagcttctcgaagagtataaaaaaatcggcgtcaggcacatcagcaacgaagaactgctcgcggcgaaaacggatgtgctcgttcccgcggcattggaaaatcagatcacggcggaaacggcggaaaagctcaattgcaaatttatcatagaggccgcaaacggtccgacgtcggtggatgcggacgcgatcatcgataaaaaggggatcgttctggtgcccgatatattcgctaacagcggcggcgtcatcgtttcctatttcgagtgggtacagaatattcaggaactcacttgggaactggaacacgtcaacaccatgctggaagagatcatgcgcaaagcgttcgacgaggtatgggccacgaaagaggaatgcgggtgcaatctgagaatggcggcatatgtcaccgcgctccggcgcctggttcacgcgcaggagatcaaagggattttcccgtaaggctgaaatccggaatttgacggaaacagggcggcttcgaagaggggaaaagggcaaatttccccgttcttttccggagaaagataaaggcaggtatatacatgatgcgaaaaaccgaaactcatacctcctcggtggtagacgacaccgacttgcagatactttccctcttgcagggcaacgcccgtatctccatcaaacatatcgcggaaaaaacctttctttcgcccacggcgatttccgctcgtatcgaaaagctggaaaaagacggctatatcgagggctactatacgcacatcaatccgcaggcattcggttttaatatcaaggcgttcatcaatctggaagtggaacccgtccaaaaaaaggaattttacccctacatccgcagctgtcccaatgtggtcgaatgcaactgcgtcacgggcgactatgcgatgctgatagaagttcttttcagaactacgaccgaattggatcattttatcggcgaattgcagcatttcgggaagaccaagacgcagattgtcttttccacttccgtggaacaccgcgacgcttttttagaacttcgctgaacatagaaaagactgaaaaaaggcttttttcctccgggaagacaaagcctttttttgtttgaacgcagaaaagcaaaaagacggtgaaaagaggaaaaaatacttaaccgagctttactttttcgaaaaaaacgtatataatatagatatatacgtaaaatgtgaaaagaggaggacgcggatgacattaaaaggtaaagctatgcagtatgaagacctcgtccttcgctatctgcgtccgtatttagaaaacgagtctgtgcaaaaaatgaagacgtatattcagcacggcgatgtcagtacttacgaacactgtcttaacgtcgcctgttatagtctgtatttagcaaaaaagtgggaatggaaggtggacgaggaaagcttggtgatcggggcttttctgcatgatttttatctctatgactggcatatcaataaacggcgcgggcggctgcacggcttctgtcatacggcgcttgcggcgaagaatgcgcgggaaacgttcggggtcagcgataaagtgtactatatcatccgcacgcatatgtttccgctgacgctggcatggatgccccgttccaaagagggctggctcgtatgctttgccgataagcactgcgcctccaaggaaacttccaaaaagaaatccaaaaccgccgatccgcccctttcgagtacgtaatttattaattttgaaatgagaaaagcgatttagaagcttttgcgccgccgaaaaaaacggaagc

SEQ ID NO: 1658 - DNA, 12623 bp, Unknown
  16S sequences of unknown bacteria
agacgagcttcgccgccgggggcatgacatcttgttcgtcggcacgcccgaccacatcgaggcaaagctcgccaagcaggcgggcttcgagttcgtcggcttctccgtcagcggattcgacaaggcccatccgctcacgctcatctcctcgagccgcaagctcctcaaggcgacgaagcaggcacggcgcatgttcgagcaacgtcgccccgacgcagtcttgacgtttggcgcgtatgtctcgattcccgtcgggcgggcggcgagcgagatgggcatcccgctcatcgttcacgagcagaactccgtccccggcatggccaacacctacctggcaaaacgcgcggatgttacggccctcacctacgaggagtccgcacggcacctggaatgcaaaaacgagcccgtcgtcatcggaaacccggtgcgcgcctcgttcgagacctgcagcagggccgcggggcgcgagcttctgggcattccggaagacgcgctcgtcctgctcgtcttcggcggcagcctgggcgcccagcatctcaacgccgccatctgcgccatgaaagagcagcttctcgccctcgatggcctctacatcgtgcattcgacgggggagcgcgattacgacgcgacggtgcaagcgctcgcgctcgacggggagcagaagaagcgctggcaggtattcaagtacatcgaccgcatgggcgacgtgctcgcggcaagcgacctcgtcgtctcgcgcgcgggtgcctcgtcgctcgccgagatcatgacgctcggcgtgccggcagtgctcgtgccctacccgtacgcgcgcggcgaccatcagacgctcaacgcgcgctcgtgcgtggcggccggggcggcggagctcgtcgcagacgctgaggtggaaagcccccgcttctccgaattggtcatggagcttctcaccgacggggagcgtcgtgataggatggcagctgcttcaaagaaactatcgggatccgacgcccgcatccgcctcgcggacatggcagtcgagctggcagggaagaaacaatcgtgagtgacgtaaacagaattcatttcatcggtatcggcggagtcggcatgtccggcatcgcgctcgtggcgagcgcgcgcggcatgcaggtcagcggctcggacatgaaggagtcgcgtgcgaccaaggcgctgcgcgaggcgggcattaccgtcttcatcggccatgacagcgcaaacatcaccgacgacatcgacgccgtcgtcatctccaccgccatccccgagaagaacccggagctcgtcgcggcgcgtgagaagggcatcgcggtctggcaccgctcgcagatgctcgccgccctgggcagggggcgcaagacgctcgcctgcgccggcacgcacggcaagacgacctcctcgtccatgctcgcgacgaccatcgaccgcatggggctcgacccgagctttctgatcggcgggacggtcgacggctacaacaccaacgccaaaaacggctcgggcgagtactacatcgtcgaggccgacgagtccgacggctcgttcgtccacctgtcgccctacgtcgcgctcatcacgaacatcgagcccgaccacctcgaccactacggcacgctcgatgcgatctacgacgcgttccgcgacttcatgaacctgcttcccgagcagggcgccgcagtcgtgtgcgccgacaacccgcgcctcgtcgaactcgcccgctcgacgggcaagcgcgtcatcgcctacggcgagcaggggacgaaagacgccgacaccaccttcgtcatcaccgggcgcaaggggctcggctacacctttgacgtgacgtttcccgacggcaagaccgtcagcgcgtccatttccaagaaccccggtcgccacaacgtcctcaacgcgacgggcgtgctgtccgtcgtgtgggcgctcggcctcgacgttgcgaagggcgccgaggcgctctcgacgttctcgggcgtgcgccgcaggttcgacctcgtcgccgaggtgggcggcgtgacgatcgtcgacgactacgcgcaccacccgaccgagatcaaggcgacgctcggcgctgcggcaaagctcgactacaagcacgtccacgtgctgttccagccgcaccgctactcgcgcacggaatcgctcgccccgctgttcggcgatgcgttcgacgccgccgacagcgtcaccgtcatggacgtgtacccagccggtgaggcccccatccccgggatcagcggcaagacggtcgtcgcctccatcctcgcgcacgacccgcacaagcaggtcgcgtggatgccgcaccgccccgagatcgtcccgtatctcctgcgcaagctcgagcccggcgacctgctcatcacgatgggagcgggcgacgtcacgagcatgggccctgcgcttgcagccgcactcggcggggggagcgacgagtgagcgcgttcgacgcgtacctgcgtctggagggaagcctcgacgggtccgtcctcatggacgagagcatggcgcggcacacgagctaccgcatcggtggccgggcgcgcctgttcgtcccctgcgactccctctccgacctttccctcgtcttctccgtactgcgcgaggaggaggtgccctgggccgtcatcgggaggggcagcaacctgctcgtcgccgatgagggctacgacggcgccatcatcgtcctcggcccggcgttctcgcgtatggacttcgggcaggagcaagacgagacagtgcagccgggtgtgcagacctgcgtgacggtcggcgccggggcgatgtttccccgcgtcgtgcagcgcgcgttcggccgtgggctttcggggctcgagtttgccgtgggcattcccggcaccctgggcggagcgctgttcatgaacgccggcagcagggatgcgtggattgggggcatcgtctgctcggtcacgagctacgttccgggcgtggggctcaagctgcgccgccacgacgacatcgagtggggctaccgcaagagctcgcttcccgcgggggaggtcatcctcgaggcgtcgcttcggctctcatgcgctcgcagatggaatcgagccgcatcaggcgccaggcgcaccagccgctcggcctccccagctgcggcagcgtcttcaagaatcccgaaggcgcgtcggtgggcaagctcatcgagtcgtgtggacttaagggaacgaaatgcgggggagcgcaagtctccgaaaagcatgctaactttatcgtcaacacgggctcggcgacggcgctcgacgtgctcaagctcatccatcaagtgcgcgattgcgtgaaggaagaacatggcattgaactcaagcccgaggtcaggttcctcgggttcccgcagtaggcggaccgcacaatcgaacaggcgcagcagcggcgcgtcatcgcgccggcagcgcggcagtgccggcaagcccatcaagggcaagcgcaagtccgttgcgggaaagacgggctccatcgccaagtccgacgcgtcgtcatcgcgcagcacgaggtcgcgccgcgattccgcggcgagcacgcgtgcctcggggcgcggaagctcgcgctcgagctactcctcttcctccacgaacggacggcgcgtcggcgatatccgcgcgcgcgagcgcgaacagcgcatccgcagccactaccgcaagttcgtcatgcgcatcgtcatcgtcgtggcggcggtcctgctcgtcatcttcggaagcatcttcgtgtaccgttcggacctcttccacgtcaacaacgtgcagatcaacggcgtgtcgcacctgacgagccaggagatcaccgaaatcgcggcggtcccggcagattccacgctgctgcgtctggacgcggcgggcatcaagcagcgcctcgaggacaacgcctgggtgcagagcgcgaccatccaccgctcgctgcccgacaccatcgtcatcgacgtcacggagcgtactcccggcgccgtcgtgcgcatcaacgacaagcagacctgggtcatctccacggacagctcgtggctttcggcggcgacggaagacgactggaacaacgacatgcgcatcatcgacgtgtcgaactccatcgcccagccggtctccggctcggagtgcaccgacggcggcatcaagaacgcgctcgccatcctcgatggcatcagcgacgaccttaaaagccagatccagagcatctccgcggagtcttccatcaagacgtcgctgaacctgaaaaacggcatcacggtcgcgttcggcgactcgagcagcatccagctcaaagaggcggccatcaacgagctgctctcgcagtacgcgggcaagatctcctacatcaacgtccgcgtgccctcgagccccacgtaccgcacgctcgacgcgacgtcgcctgcctcctcggagcaaaacgacgcagacgcctcttcgcaagagggagattcctcggacggccagtaggtcagccgcggggcaaatcccctgttgagcggcatcgtggctttctgaaaaagttctcaaaaatatttcgctgcaccatgatgccgcgggttgaagtgtatacttcaagtgtttaaaaacatcttggggtacaatgcaacgcagtttaaacgcaacaaaagcttgagagtcccgcattgcatatgatgtgtctccagcaggaacgtaggaaggaccaacatgcccgattacacaggagccgaccatctggccgtcattaaggtcgtcggtgtcggcggcggcggtaccaatgcggtcaatcgcatggtcgaggcaggcgtcaagggcgtcgagttcatagctatcaacacagatcgtcaggcgctgctcatgtctgacgcagaccgtaccgtccacattggcgaggagctcaccaagggtctgggcgccggcgccaaccccgaggtcggctgccaggcggcagaggagtcccgcgacgacatccgcgacgcgctcgctggtgccgacatggtcttcgtcacctgcggcgagggcggcggcacgggcacgggcgccgcgcccgtcgtggcagagatcgccatggaagagatcggcgcgctcaccgtcggcgtcgtcaccaagccgttcggcttcgagggccgcaagcgcatgacgcaggccgaagagggcatccagctcctctcccagaaggtcgacacgctcatcgtcgttcccaacgaccgtctcctgcaagtcatcgacaagaagacctccatgctcgacgcgttccgcgtcgccgacgatatcctgcgccagggcacgcagggcatcaccgacctcatcaccatcccgggtctcatcaacctggacttcgcagacgtccgcgccatcatgaaagacgccggctctgccatgatgggcatcggcatcgcgtcgggcgagacccgcgcggaagacgctgctaccgaggccatctcgtccaagcttctcgagtcctccatcgtcggcgcaaaccgcatcctgtactcgatcacgggcagcagcgatatgtcgctcgcagagatcgacgaggcatcgcaggtcatcaacgccgcggcagacgaagatgccaacatcatcttcggtaccgtcatcgacgactccatgggagaccagatccgcgtcaccgtcatcgcgaccggcttcgacggcacgtccacgcagccgagcatggacctgggcggaagcagtgcaccgcgtgcagctcgccgcgcccccgcgcctgctccgagcaacgactccaactacggtggtctgttcgatgacgacatcccggacttcctcaagcgcgaccgttactagcagcgtgcgatgcgtatagattctgacgcattcgacaccagcgaatcgagcctccttccgcagccgcggttgtcggaggcttcttttcatggtgccgacgggacaaagataacgggactgaccgacgagcgcctctgccagagcatcggcacgcgcgtgctgttcaccttccgcagcggcggggtgagctcggcgccgtatggctcgctcaacctctcgtatacggtgggcgacgcagatgctgacgtccgtgagaaccaacggcgtctgctctctgccttcggcgcaggagaggtcgacgggctcgtccagcccaaccaggtgcacggcaacgaggtgctcgtcgtggacgacgttgcggagacgcagcggcttgcgcgtgccggtgcggacgggattgtctgcacgaaggcaggcgtccccgtgctcctgtgcttcgcagactgcactccggtcatcctcgtcgcgccggacggctcctttgccgtgctgcacgccggctggcgtggggccatcgcggatatcgcgggcattggcttgagaaagctcgcggagcaggcctcgtacagccccgcggactgcaactgctacatcggcccgcacatcggggactgctgctacgaggtgagccgggagctgctggacaggttcgtggacgagtgcggcccggattgcgatgcgggatcgcgcctcctcgacctgtccgctgcggtgagcgcgtctctcgtgcgggcgggcgcagatcccgctcgaatcgccgatgcgcggctctgcacgcaatgtaataccgtattactttattcataccgggccgaagacggcgttacgggccgtcatggggcctttgcatatagggaagttgattgatcatgggtctgaaagaacgttgggaaggcgtctgcaaggaagttgcggaagtctgcgagaagtgcggccgcaagcccgaggacgtgaagatcatcgccgtgagcaaaaccgtcggcgcggacgtcgtgggcgagggcatcgagttggggatgaccgatttcggggagaaccgggaaaagccgttcaacgagaagctcgccttgtacccgcaagccaactggcacttcatcgggacgctccaatccaacaaggcaaagcaggtcgtcggaaaggcgtgcctgatccactcgctcgaccgcccgtcgcttctgcatgcgatccagaaggaggcggcaaagctgggcgtcgtgcaagacgtgctcgtcgaggtctccatttccggcgaggagagcaagggcggcatcgcccctgcagacctccccgcattcctggaggagctctcgtcgtgtgccaatatccgctgccgtggactcatgacgatggcgccgcgcggcgacgtcgagacggctcgtgaaacttttgcgggattgcgtattcttgccgcgaaaatggccgaggaattcggtgggcgtgataacatctcgatgaacgagctatccatgggcatgtcggaagactggcccgtcgcgatcgaagagggcgcgactatggtacgcatcggcagaaagatttttagcgaatacttctaggccctgtgaccagggtttttatatataaatgcatgggggcaccacgatgagcctttttgatggagtcaaaggtaaactcggatttggcaacaagtccgattggcaggacgacggctacaacgaccagggcggacagggctacgacgactaccaggacgacggctatgacgatgggtacgacgaccaggagtacctcgacgggccgatagacgacgactacgtcgacgagccggcgggagacgtcgtctccttcgacgcctacaatcccgacaagttcgaaaacgtcaagctcggagaccgcaccccacgtgtggcatcctacgattcgctcggggccacgagcacctcggggcggagctatgcctccacctctggcagcggctatgccagcggggcgacgagcaacgtccgaccgctcggcccgagcaccgaccgcggctacggcgcatcttcgtcgagcgccggcagctggaggtcttcgggcgattccggctacggcaagcagagcacggcggagcgctcgcggcagatcatggacgagatcagtgcccaggcagcaggggcgggcatcgtcatgccggcttctgccggcgcgcagcgcgacccgtaccagtctctcggaaacgacttcatcaagatgaacggcgacccgtctacgcatctcgccatcgtgcgccccacggcgtattcggatgtcgagaagatcgccaattccgcgaaggccggaaagtctgtcgtactcgtggtgcaagataccaagccggcgcttgccaagcggatcttggatttctcatttggcgtggcgtccgcgctcaaccagaacgtggacaaggcggccgatcgtgtcttcgtgatctccaagggctccgagatgctctcgaaagaagagcgcgagtacttggtcaaagaaggcgtgctgaagaagtaaacaagttgtaatacggtattaccttttgatgagtggagtgacactgcaagtgactgaaaccatatcgaagcgcctcggctcggtgctgattgtcggaggcgggcggatgggcacggccatctgtgcagggttgctcaacatcgagggcatgacccccgcgcgcatcaccgtggcaaaccccggcgaggcaaagcgcgtcgcgctctcgagcgagtacggagtgaacacggttgccgatgcgacggcagcccctccggccgacacggtcatcctggcggtcaagcctggtgtcgtgtgcgaggtggcacgctcgctttccgaagcgggcctgcgcgacgccctggtggtctcggttgccgccggtgtctccaccgacaagattgcagctgcgctcgggggcaacgcgcaggttgtgcgcgtcatgcccaatacgccgctcctgtgcggcttcgggatgtctgcgataagcggaggcgccgacgcgacccccgagacctgcgagctcgtgcgcgggctgttcgcgaccatgggacatgccgtcatcgtcgacgaggacaagcaagacatcgtcacggcgatcagcggctccggcccggcgtacttcgagctggtcgtcgagaccatggcgcgcagcggcgagaagctcgggctcgactacgacacctcgctcgagctcgcgttgcagaccatgtacggcaccgccgccctcatcgacaagacgcaccaggacctgcccgccgcgatcgaggcggtcagcagccctggcggcacgacggtggcggctctcgatgccatgcgctcggcgggtcttgccgaggcgctcgacaagggcgttgccgcagcggcggcacgctcgaaagaactgggggcatagcctatggtcctcagcatcatcaccttgatcagaacaatccttttggccgcatgcgacctgtatgtcggcgttattctcgtatacgtgttgatgagctggatccccaacatgggcggtgggctgctttcgttctaccgcgcgttgggcaaactctgcgatccgttcctcgaccttttcaagcgtataattccgcccattggtggaatgttggacctgagccccatcttcgcaatcttggttgtgcagcttgcgggccgcctgatagcatttctcctgtagcgaaaggatttgttcatgagtattacggcgaaggaaatacaggaagagggcttcgagcatcagattcgcggctacgacgtcgagcaagtcgacgtcttcatcgaccgcgtcgcagctgaagtcgatgcgatgaaccgccagatcgccgaactgcagcaacagctcgctatcaaagacaacgagctcgctgctttgcaggaagcccccgtgcccgcccccgaagagctcgagaacgccaagctccgcgcggacaaggccacggccgagctcgagaaggccaactccaagatggccgatgcgctcgtgaaggccgaagaggccgaaggccgcgtgcgcgaggccgaggcccgcgccaaggctgccgaggagaagatcaagcccctgcaggagcagcttgccgagaagaataagctcgacaacgcgatttcgcaggcgttcatctccgcccagcgcagcgccgaccagctcaaggaggaggcgcgtctcgagggcgagcgcatctaccgcgagtccgaggcgaaggcgcgcgagttcatccgcgaggcgctctccaagaaggccgccatctacaacgagatcgacgcgctgcagaagtcgtccgaggatttccgcgaccagtacatcaagatggtcgaggagtttgccaaggacgcgcgcgagcgcttcgccaatatggagccgccttccattccggacggtatcatcaacgagatgcttcccgacatcgagtccatgcccggcctcgaggacggcgcctctgcagatggcaagggcaagcaggcaagcgcccatgaggcggaggctgcgccccagaagacccagagggctcccaagatcaacatccccgagatctaacggctctcgcccgcatccggaagtctcatgctcgtcgccgtctacgtcacgcccaaggctaacgccgacaaggtgatggggtggcgcgagggcgccgatggggcgcgcgagatttcggtgcgggtgactgcagcgcccgaaaagggaaaagcgacgaaggcggctggcaaggtgctggctgccttctttggtgttccgaagaattccgtgagctgcgagcgcggcgagacgagtcgccacaagatgttcgagataccaatttccgacgaagacctggatcgcctgctataatcagcagccgcgaagtgggtcggacgaccgcggcgcgtcttgtacgcgatgaggaaagtccgggcttcacagggcaggatgccggctaacggccggtgtcacagaaaagaagactcccgcgcatgcgcgggaaaagctgaaacggtgcggtaagagcgcaccagcgtcatggcaacatggcggcttgacaaaccccatccgaagcaagggcaaataggggtgctatggactggcccggtctgcatccgggttgctcgctcgacggcgctggcaacggcgtcgctagataaatggtcgtcttcaaggacagaacccggcttacaggctcacttcgcgtctcttgatatcctcaactcacgccccgcatgcgcccaccccgtgtacgcgggatgcgtggcactgccacccttttcatacacagcgcgcgggatgtgtggcactgccactgttcccatgcagaaatcgcagaatatgtggcactgccactgttctcgtgcacgggagcccggtgcgtctcacgttgacgtttatcaaaaagtgtcgattgacggtccgtcaacggcttcataagatacccacataaagcgaggcaatgcacgaatacccccgcatggcaaacatctggcagcgagctttcacgcgcgctgcgggcgggggattacctggattgcgaggcgggtacgatggaatgcgaatccaaagaggcgaagaggcggcgagccgaaatcgtcgctgcggcgcgcgagctcttcgagacgaagggcatcggccacaccaccgtcaaggatatctccgaagcggtcaacgtgacgcgcagtctcttctaccactactttccagacaaagacgctgtcgtcgaggcggtgctggacgattacgtcgaggacttccgcatcatggtccagacctgggatgccgagcgcgcgccgcatgacatcgagggcgcgctgcgcgactgcatcaagatcctgcgcatagccgtgttcgacaacgactcgtttcgcaccgagctcgtcacccacgagaacgcggggctgtacctcaagttcctgcaccgcagtaccgacgtgttggcaacgcgcttttcgcagacgacggctgtcgactacgagcgcgagcacgggctccccattaattacgtgtacgagacgttctacgtgctgatcatcgggctcgtcggctatatgcgggcgcatcccgaagcggaaaacgagctgctcgaggatctggtctcccaggcgctcaggctcgatatggcgtgacagccgcactctgcggcttttgtcccgtccagacagggcggggcgcatagcatacatcggttgttggaaaagggtgcacgccacccctggcgcgagcacgcacttttccggagaggcgtgatcatgctgtttcaagtgtacggagagaatgcgctctaccaatggctcgggtggttcctcgtgttctttggcctcatcggcctcaacgaggtggcgcgacgcacgaaggtgggcggcctgttcatgttcgtggcactgcccatcgccatgaccgtctactgcgtcgtcgtcaccgtcgccgcgtccatgggactcggctgggcggcaaacaacccgacggtgctgttccagaacggctggttccactacgcgaaggtctacgcggcgctcgccggctgcattggcttcatgatcatcaagtaccactggggcaagctcggcaaggcgcaatggttcaaggcgtttcccttcatcatcgtcgccatcaacatcatgatcgcggtcgtgagcgatttcgagagcgcggcgcattatttcagcggcgattacttcatcttggataacggctctgccgcatggatcacgagcgagcacgcgacgcagctgtgcggctggaacaacgtcttcaacggcatagcgggcatcctgaacatcttcatcatgaccggctggtgggcagtgttttccagcaaggacggcaaggacatgatctgggcagacatgacctgggtgttcatcttgacctacgacctgtggaacttctgctacacctacaactgcctcccgacgcacgcgtggtactgcggcctggcg

SEQ ID NO: 1659 - DNA, 32759 bp, Unknown
  16S sequences of unknown bacteria
acaccccacttgttattcagtataccatactgtctaacaaatggggtgctgttcaccgaaaaaaccggaagccctcgctcgtttttcgaagctctactggatgcaggcgagcagcttttccatgttcgcggcgattccgccctcgcggaagaccgacgaggtgcccgcgacgaacaggtccgcgcccgcctggcgcatcttgaccgcgttctcgaaggagacgttgccgtccacctcgatgcgcacctgcggataccccgcgctgtccagcatggcgcgcagccgcgcgatcttggggagcgtcgccgggacgagcttctggcccgcaaagccggggttcaccgtcatgagcaggaccatgtccaggtccggcagaacgtcctcgatggcgcacaggggcgtcgcggggtttagggccaccgcggcctttgcgcccgcggcgcggatggcggagagcgcccgctgcaggtgcacggtggattcctggtgcacggagaccacgtccccgggccgcaggtcgaacaggtgcaggtgccgctccggattcttcaccatcaggtggatgtccgccgggacggcgctgaccttgcgcacggcgcggatcacgtccggcccgagcatgaagttcggcacaaagtcgccgtccatgacgtcgtagtggaagaactgcgcgcccgcctgctccagggcaacggcgtccgcgcccaggttcagcgcgtccgcgcacatcatcgaaggggagatccccggcacgatcttgctcatctgaccaatcgctccttctgcaaaagcattccccttgagtatacgcgcccgcggggggaaacgcaagacgcaagcgcctcaggcgcccagggcctggagcgcctgcagcgtcgcgtccaggttctccctgtgccagctggagacactgagcagaccctcgctgtagaagctcagcatgcccgcggtgcgcagatcgctcagctccttctgctgcgcggtgagggtgacggcgccctcgcccgtctcgatggcgatgcggtagttcagaaggtcctccgacacggtgacgcggcggatctcgtcgtagggcaggcgcagcgagacctcccggcggatgcccgccgtcagcgcgctgaaggggagcagcaccagctcccggcggcagagctgcagcgcgtagaactccatgctgaagaactgcgccaggcgcgcgctcaggttttccggcgcgtactttacgacgatgccgcggtcctcgatcggatcgaagcccgcttcccgaagaatctccaggatttttctttccgtggccatgaaagaacctccttgcggatgaatttcgggatcagtatagaaaaaaaccgcgctgcgcgcaaggaaatgtttcgtgaacagactttgttccttgcgcgcagcgcggtttttagtcgatgcgggcagccccgcccgggatggcggcggagagctgcgcgtccggcacgtcgcggtccatgtagacctcaaagaattcgcccgggaactgcacgtccgtcaccccgtccagcgcgcagagcgcctcccgaatgcgcgcctgcgccgaagcgtccggagcgtccggagcgcccgacgcggcgggatagacggccttgtagtccaggcgctcgatgcggaagaggaccgggcgcgtgccgtccgagcagcaggcgatcatcgtgttctcctcgcgcatccagccgcgcatgagggagccgccctgcaggcccgcgtagatgtagcgggagatggcgtcccaggcctccgagcagtgcggaacctcgccgccggcggtcccgtccgccgtttgggcggtctggcagagcgtgcgcaggcccccatgccagaagtcgtccgccgcgccatagcgcgcaaagaggaaggtatcgcccacatggtagcaggggcaggggccggcgttcggatctgcgcagtaggcggcctgcagttccggatagacctttttgtcgattacggtgagacgaaccttgtgctgcatgatgaaaaccctccaaatccttggaaacgtccccccgcgcgcgggctcacttttccgcgcgggagaggaaggcgcgggtgcgctcctgcttgggcgcggtgaagatctcctccggggcgccctcctccaggatggcgccggcgtccatgaaggccacgcggctggccacgttccgcgcaaagcccatctcgtgggtcacgacgatcatggtcatcttctcgcgggcgaggtcgcgcatgacctcgagcacctcgcccgtcagctccgggtccagcgccgaggtcggctcgtcaaagagcaggatctccgggttcatcatcagcgcgcgggcgatggccacgcgctgcttctgcccgccggagaggcggcccggcatctcgtccgcgcggtcggccaggcccaccttgcccagcagctccatggcctgggcgcgcagatccggccccttgcggcccttgaccaggcgcggcgcgatctccaggttcttgaccacggacaggtgcgggtagaggttgaagtgctgaaagaccatccccatgcgcaggatgatggccttgcgcgccgcggcggaagcgtagacgccgtcccggcagaggtcctggccgtcgatgcggatcgagccgccggtgacctcctccaggccgatcaggcaccgcagcagcgtgctcttgcccgagcccgaggagccgatcaccgccacgacgtcccccttttccacgcggaagctcacgtcgcgcagcacctccagggcgccgaagctcttgcgcaggttcgttacttcgatcatggacatggcgcgtccctcctcattcgtagttcgtcttgcgctcggcaaacttgaacagcaccgtcacgacaaaggtgatgagcagatagatgaaggccgcgacgatgaagggcgtcgtggtgaagtcgcgggtgacgatgccctttgcatagtgcaggagctccggcagcgcgatggaggcgacgagcgccgtgtccttgaccaaggtgatggcctcgttgccgatggagggcagggtcacgcggatcatctgcggaatgatgatgcgcgtcatggtctggaaggacgtaaggcccaggacgtgcgagacctcgtactgcccccggtcgatggagagcagtcccccgcggaagatctccgcaaagtaggccgcatagttcagcgtgaacgacagcgccgccgccgcaaagctgctcagccgcaggtactgcccgatgcccggcaggaagggcaggccgtaatagaaaaagaagagctgcagcatcagcggcgtgccgcgcatgacgaagatgtaggcctccgccagccacttgacgggcttaaagcggcagttcgcgcagagcgtgatgagaaagcccagcggcagcgagagcggaaacaccagcgcaaacagcgccagcgtcacccccgcgccgcgcagcagcgccggcacgatgcgcacgatgtagctcaggtccatggtccttcctccttgtttccgccaaagaaggggcgaacggccgcgcagccgttcgccccgcagagcgcggattgtcttcccttgcggttacggcttgacgacgatgtccttgccgaaccacttctcggagatctcggccgcggtgccgtcctcgatcatctcgtcgaagaccttctgcacggcctcgcgcagctcgtcgttgcccttcttaaagccgatgccgtactcctcctccgcaaaggagtcgtccagaaccgtgtacacgccggggttctgcgtctcgtagtagcgcgcgacgacctcgtccagcagcaccgcgtccacgcggccgatgctcaggtccgtcagcgccgtgacgttgtccgcatacttctgctgcgtcacctgggacgcgatctcgttcttctccagggcgctcaccgcggaggagccgtcctgcaggccgacggtcttgcccgccagcgacgggatgtccacgatgtccgaccccgccaggacgatgatcacctggcggttggccaggtacgggcggctgaagtcgatctccgcctcgcgctccggcgtgatgctcaggccgttccacaggcagtccacgctgccggagttcagctccatgacgttggccgtccagtcgatgggcttgagctcgatctccatgcccaggcgcgaggccacttccttggccaggtccacgtcaaagcccacgatgttgctctcgtcgtcgcggaagcccatgggcgggaagctgtcgtccaggccgacaaccagggtgtccttttccgtcgcggccggggtggacgagcaggccgcgcacagcgccgcgaccagcaggcacagcgccagcgcaaggatgcgctttccgtttctcatttgtgttctcctcctcaagcgtcttgcccgcgttggggcacgggaacattatacactttggcctgctaaattactagtgcaatatcgcacgaaattttcactttctttttttggcaggaccgccgcgcacgacctcccggcggtagaggaagagcatcgcaaggcagggcagggccagcagcaggttgaacccatccgcaaagcgccagaccgctgtgagcgggaacaggcagcccaggaacgcgacctccaaaaaggccgcggtatagagcgcctccgccaggcggccggagcgcagaaagcgcgcgcactgcaggccgtaaaaccaccacaccggcagcgtcgagagcgcgaaaaacgccagcatcccgcacaggagcgcgccgccggccggccccatcgccgcgcggaaggcggacagcgccacctccaccgcgctgcccgagagcggcacgcccgttgccaggaccagcagcgccgtcagcacgcagaggaaggtcgaaaacagcacctcgcacgcgcccagcgcgccctggacccgcgcttctgcgcgcgactggccgtgcgcaaaggccgaggtgcccatgcccgcctcgcacaggaagagcccccgcgcgatccccagcgcgaacagctccgggcggaaggggagcgcgccctggaaaatcgagagcagcgccccgggcagcgccggccgcagccgccacagcgccagggcgcaggcgccgacgtacagcgcgcccgccgccggcaggcagagcgaggccgcccggccgatccgcccgatcccgccccgcaccagcggcagcagcacggccagcaccccgaatcctacggccaggcgcggaaggtgcgccccgcgcgccagcgcctcggagagcacctgcacctgcgcaaggttccccatgcccagcagcgccaccggcagcaggagcagcgcataggccttggccaggcgcggcgcgcgttcctgcagcgcggccagcggcccggcaaggccgctctgccggtgccgcatggtgacgaggatctccgcgtacttgagcgcgcagcccgtcagcgtccccaccagcagggggaggagcacgcccggcccgccctcggccagcgcggagatcgccgccagcaccgtccccacgcccagcgtcccgcacagggcggaggagagcgccgccgccggggacagcgcgcccggcgcctgcgccgcgccccgggcgaacgcctcccggagcgggacgccccgcagctttcccgtgaagtacgcgccgaagagaaagatccccagcgcaacgacgaaccgcagcacctccacgcaaaaatcccccctcgcgcaagggtatgcgcaaggggggaggaaaagaaggaaacccggccgcgcgcgtcagtccctggcgcggcggagccccagggggaggagcaccgagaaggtgatgaccccggaggcgtacttgttggcgatgcgccccttgtggcgcgtcacgatcgccttggccgtggacaggccgatgccgtatccgcccgtctcccgcgcgcgggaggagtcggcgcggtagaagcggtcgaagtacttcggcaggtccgccgggttcaggccctggcaggggttggacacggaaaggagcgcgctccgcccgcgcagggcgagggagacgcgcacctctccgcccgcgtcgcagtactggaccgcgttgtccagcaggatcgtcagcaggcggaagaggttgtcctgcacgccgcgcatccgcacgcccggcgcgacgtcggaggcgaggaccttgccgtccgcctcggccaggggctggaaggcgtccacgttcgcctgcacgatctcgctcaggttgagggtctccatggccgcgggcttgacgctttcctccgtgcgcgctagctccaccaggttgtggatcaggcggttcaggcgcgcgacctgcgcgttggcgctctcgagccaggggctctcctgcgcgccgtccgagagcaggcccaggtccgccgagaggatggccaggggcgtcttgagctcgtgcgaggcgtccgtgacgaagcggcgctggcgctccaggttctccacaaacgggcggatggccacgcgcgaggagaagagcaggatcacaaacacgatcagcgccccggccagggacaccaggagcgtcacccgcagcatgttgagcgaggcctgcacctgcagaaagcagtccagcacgatgaccgtgctcccgccgccctcgtccgcgaacacgccgaagcggtagtagtggtccacgtatcccttctccgccccggagcgcagcaccgcgttcaggctctcgatcacggtctggcggtccagcgcggcgatgtgctccgtgtccacggagagcacctcctggttttcggaaaggcgcgcgatgaagtagcgcgtctcaaagggcgtctcctcgcggacctgaaagtcaaagcccagggccgggttcggggcggactccggcgtggggaaggccccgccgttctcgtagagcagggcgatggcgcggtccgcgcggttggccgagaggatcgcgttgcccacggcgatggccgccacgaggaaggccagcgtccccaggagcgcgagcatggcgatgccgagaaacttccggcgcagcttgcggatcatgcgtcttcctccagaaagtagccctggccgcggcgggcgaggatgcgcacgtttgcgcccacggcctcgagcttgcgccgaagatacgaaatgtaggcccagaccacgttgatctccgcctcgctgtcgtagccccagatgcgctccatgaactcctccgtggagatgcagcgccctttgcggcggagcagcagctccagcatctggaactccttgctgcccaggcgcaggaaggaggcgccgcaccgcagctcaaaggtcgagcagtccagggcgatgtttccgcacgtcaggacgctgggcgtgtaggcctggccgcgccgcgtcagcgcccgcacccgcgccaggaattctccgttgtggaagggcttgggcaggtagtcgtccgcgccgctgtccaggcccgcgatccggtcctcgatctggctcttggccgtcagcaggagcaccggggtcgatacgttttccgcccgcagcgcgcgcagcacctcgatgccgtccatcttgggcatcatgatgtccagcaccaggcagtcgtagttctgcgccaggccgtagtgcagggcgtcctggccgtcgtggaccacgtccacggaaaagtgctcgcgggtcagcagcgcctcgagcacgcgggtcatttccggctcgtcgtcggcaaccaatatgcgcatggggttcctcctttccgaatttcgtcagcgcagggcctcgatcaggttccgaatcgtctccaggctcaggtccgtggaggtgatctcgtccgcgcacttcttgcgctcctgcacgatcagccgctggccgggcagaaagcgcagcggcagggacaggatcatgtgggaactgcggtatccgttcggcttgggcgactggatgtagtccttttcccgcagaacgcgcgcgcccgggatctcccgcaggagggcggccgtgcggtagatgtcctgctgaaacggacagatcagccgcacgcccgccgcgtcctgcacgtcccgcagggcgcttgcagccgtcagcggcaggccgcgctgcgcgagcttgcgctgcatgctctcggcccgcttgatccgcgcctgaaaggaggccaccgggtcgcgctggcccaggtgcgcctggtagcggcggatcatgtgcaggcaggagagaaattccgagatcgcgccctccaggaggatcagcgcgtccccgtagaagtcctgttccgcgctcgtgacattcagggtaaaggggtccatggggaggaaagaatcctcctttcgcggtttttcgcgtcaaaggcgcagggcgcaggccagcgcgccgtccccgcgcagggcgaagagcaggtcgacggacgcggtgtccggcttgagcgtcacaaagctcgtgcccgcggcgtccgtggaagcgtcgatgaccgcgcccgtggagaagcggaccgtcgtgcggccgagctccgccccctgcgcgtccaacaaaatgagcgtcagctcctcgctgcgcgaaagctgcgcaaggcggagctccccgccctccaaggcgtggtccgcgctctgccccccgcgcagcacgcggaccgcgcccgacgacagggcatcgccgccgccgtcctggaagcgggccgtcagggagatctccccctcgggctccggcgcagcaggggcggcgcagccaaagaagggcaggcacacagccgccagaagaagaacgagcgcgcaccgcgccaggaaccgcatcgcgacacctcctttgcaatctgcaggcgcgcaccggttcgatcctcggcctgcaaccattatgataagggagaaactcaaaatcaacctaaaaccggaaaacaaaccgtgaacaagtgctgcggcgaaacgagcgagcctttccccctgcgttttaacttcgttttaagtcgcagcgctacaatctccctatctgaagataggaggaggggattcccctgatcgaaatcgagcacctgaccaagcggtacggagcgcacaccgcagtctccgacctgagcctgcgcatcggaagcgggcagatctacggcttcctcgggccgaacggcgccggaaagtccaccaccatgaacatcctgaccgggtgcctctcggccacggagggcagcgtgcgcatcgatggattcgacatcttcgaggagcccaagaaggccaagaagcggatcggctacctgccggagcagccgcccctctacatgaacgaaaacccggtggagtacctgcagttcgtgggcgaggccaagggcctgcgcggcgcagagctcaagcggcagatcggcgaggtcctggagcagacgggcgtggcgcccgtgcgcaacaagcgcatcgccgcgctgtccaagggatataagcagcgcgtcggcatcgcccaggccctgctgggcagcccggaggtcatcgttctggacgaacccaccgtgggcctggaccctttgcagatcatcgagatccgcacgctcatcaaggagctgggcaagacccacacggtcctgttcagctcccacatcctctcagaggtgcagaacctctgcgaccagatcctcatcatcgcaaagggcaggctcgtcgcctttgacacgccggaaaacctcgagacccgcctgcgcggccagagcgagatccgcctgaccaccgacgccagccgcgaggaggcggaaaagatcctctccgggcttgcggacatcgggcaggccgcgtatgccccgggcgaaggcggcctgctccgcgtgcgcatccagaccggcgcgcaggacgtctacgccgcctcccgccgcctgttcttcgcctttgcgcaggagcaaaaggcgctgtgcgagctcgtggtcaagcgcgccagcctggaggacgtcttcctggagctgacggagagcgccggcgagccgcccgcggagaaaaccggcccgcagagcgcccagcccgaggaaaaagaggaggcgaagaacccatgatggcagtctttcggcacgagctgcgcagcagcttccactcgatgacggcctatgtctttgcggcgtttctgctggccatgatcggcgtgggtgccatgctctacaacatcgagcttgcggtgagcaacttcgaatacgtgctgagctttggcagcctggcctttgtcgtcgtcatcccgattttgaccatgcgctccctggccgaggagcgccggcagaagacggaccagctcctgtactccctgccgctgtccaccttccaggtgatcctgggcaagtatgcggcgctgctggtgctgtacctcgtgcccctgtgcgtcgtcgcgctgtacccgctgatcttcgcgcagttcggggaggtgtatctgcccacggcctacgggtcgcttgcggccttcttcctgctgggggcggcgctgatcgcggcggggctcttcctctcgtcgctgacggagaaccagggcctggccgcggggctgggcatcgcggtgatcctgttcaactacttcagcgtctcgctatcggagtcggtgtcctccacggcctttggcacggtgatcgccctgttcgtgctcgcggtgctgctgagcctggtcgtgtggcggatgacgggcagcgcgagcacggcctatgcgttctgcctggtgctgtgcgtggcgctggtgttcctgacgtacctggacagctcgatgttcaacgacctgctgcccacgctgatggcctcgctctcgctgtttgagcgcttcaccccctttgtcaacggcatgttcgacatgcgcgcggtggtcttctacctgagcgtgatcgtgtttttcctgttcctgtccgtgcagtcgatggagaagaggaggtataacggatgaatcctctgaagaattggctggagcagcgccgcagcaagcccgagacgccgccgcaggaggcggacaaggccgcgccgcaggcgaacaaggccgcgcctcaggcgccgggcaacgccctgcgcggcggctcctattccgtggcgctgacggccgtggtgctggcgatcctgatcgcggcgaacttccttgtctccgccctgccctcgtcgatgacgacctatgacatcagcgcctccaagctctattccgtcaccagcaacaccaaggcggtcgtcggcgcgctggaggaggacgtcaacatctattggatcgtccagtccggcgaggaggacgacgtgctggaaaacctcctctcccgctacgcggcgctctccgaccacatcacggtcgaaacgcgcaacccggacgaatccccgacctttgccgcgcagtacacggacgagacggtcgaaaacaacagcctggtcgtcacctgcggggagcgcagccgctacatcgcctttgacgagatctacgtcgaggagacgagcgcgtactcctattcctacagcacctcctttgacggggagggggccatcacctcggccatcgactacgtcaccagcgacgacctgcccaagctctacctgctcgagggccacggcgaggccgagctgcccgccacctttgccgagcagatcgaaaaggagaacatcgaaaccgagtccctgtcgctcctgaacgtggacgagatccccgaggacgcggacgccctgttgatctatgcgcccgcgagcgacatctcggaggaggaggccgacctgctggccgcctacgtcgaggagggcgggaagctgctggccgtcgccggcccgaccgaggacggcctgcccgaaaacctctacagcctgctgtccatctacggcgtcagcgcgcaggagggcatcgtcatcgagggcaaccgcggctactacgccttccagtcgccgtatgtgctcctgccggacatggccgacgcggacatcaccgcctcgctcatcgaggagaactacatgcccatcctgccccttgccgcggggctgacctcgaccggcggcaccacgcaggccacggtcacggagctgctgaccacctcggacgagtccttctccaaggttgcgggctatgatttgactacctacgaaaaggaggacggcgacatcgacgggccgttcgccctggcggtccaggtcgaaatcaacgacggcggggagataatctggttctcctcctccagcttcctggaggacatgtacaacgcctactcctccggcgcaaacggggacctggccatgaacgcgctctccgccctgatcggcgagcgggaggccctgtccatccgcagcaaatccctcaactacaatttcctgaccatcagcgagtccacagcgtcgctgctgaaggccgtgatgatcggaatctgcccgctcgggtgcctgggcatcggcatcctggtggtcttgagaagaaggaggaatcagaatgcaccggtctaagcggctgctgatcctggtcggcgtgctcgctgtggtgtgcgcggcggcgtttctggccacgcgcgtgcaggagcagcaggagcaggtcgaggcgagcggggaaaccgtcctggccatcgacgccgggaacgtggcctccctcgcctggacgagcggcgaggcggaatacgccttccacaaggacggaacctggatctacgacgcggacgaggcgttccccgtgaacgccgaggccctggaggaactgctcgcgcccttttcctccttcaacgcggcctttgtcatccgcgacgtcacggactacgcgcagtacggcctggaggagccggagtgcaccatcgagatcggcacggccgaggcctcctacaccatcgcgctcggcgacatgagcgccatggacgaccagcgctacgtctccatcggggacggcaacgtctacctggccgtgaccgaccccatagacgcctttgcagtcgagctctcagacctgatcgataacgacgagatcccgcagatggacaccgtgaccgcgctctccctgaccggcgcggtcgaggagagcatcgcctacgtcgaggcgggcggcccctcctacagcgacgaggacgtctacttcctgcagagcggggaggagtccctgcccctggacacggacttggtcgaggactacctcggcgagatccgcagcctcgtcctgaccgactacgcgacctataacgccacggagatcgaactggcctcctttggcctgaacgacccggccctcaccgtgaccgtggagtacgagcagcaggccgaagcggcggaggagggcgcggagcccgagaccaccgccggaaccctcgcgctgcacatcggccgcgtggaggaggcggaggagtccgccgaggagacggatgcagccgccgaggagacggaggagtccgccgaggagacggccgagagcgcggaggacatttcccaggaggacgtgcagtacgcatactacctccgcgtgggcgattcccagctcgtctacaacctctccgacgcggacggcgaggcgctgtttgccggctcctatgacgacctgcgccaccgccagctcttctggggcgactttgacgatgtgacgcaggccacaatcctgctggacaaccagacctataccctcaccgcccagaccgccgaaaccgcggacgctgcggctgcggaggagccggccgggagcgcggaacccaccgccgcggccggggaggaggatgcggagatcacctggacctgcaacggggagcccgtggacgtgacgggcatccgcgacaagctcgccgccctgaccgcggaggcgttcacggaggaggcccccgccgaccagctggagatctccctgacgctcgacctcaacgacgaggacgtcccgcaggtgcgcattcagctctaccgctacgacggcgccggctgccttgcggtgctcgacggggagccggccgccctggtcgcgcgcgaggacgtcgtggacctgatggaggcggtccgcaccctgctgctggggtaaaccgcggacaaaaggaggcccccgccgatcccaacgggatcggcaggggccttgtcttttggattcggggttagaaggggaaggtctccgggtcggagcccacgcgggcgttcttgttgagggcgaagatgcggtccatgtccgcggcgctgagctcgaagtcgaagacctgcgcgttggactcgatgcgctccctgtgcacggacttggggatgcagatgaaaccgcgctgcaggccccagcggaggatgacctgcgccacggtcttgccgtaggaggcggcgatggacagcagctccgggtcctccaggagcttacccgcgcccagcggcgaccagggctcaaaggcgatgcccttgcccgcgcagaagtccgccagctccacctgcgtcagctccggatggcactccacctggtcgaccgccggcacgacctccgcctcgcggagcacatcctcgaggtggtggatgtggtagttgctcacgccgatggaccgcgccaggccccggcggcggaagtcctccatcttcttccaggcgcggagatacccctgctcctcgcgcacgggccagtggatgaggtagaggtccacgtagtccgtgcccaggcgcttcaggctcgcctgcagcgcggcttcttcgttgtgcgcgcggatttcgtcgttccagagcttggtggtgatccagatctcctcgcgcgggatgccgctgtcgtggatggcgcggccgacggaggcctcgttgccgtagacggcggcggtgtcgatgtggcggtagcccgcgtccagcgcgtagcgcaccgcgttataggtctcttccccgtccttggagcggaacacgccaaggccgaagaggggcatttcgcgcccgtcgttcaggcgcttttttgtcgtcaggttcatgggtcaaccctccctttgcatttgtgtttggaaagagcaattcgccggcgccggccggaattcctgccggaaaaggggcatatccattattaatggaaggaaatccgaaaaatagatatgatttcagaaggaattgccgcgcgcgcaaaaagcagccggcggaattttgaaacgagtccggaggaaccattccacccctcggtccgcccgcggtttgcgatttgcagagaagatttttgtgataggttgccaaatcccttgtaaaaaagacggttaaaataaatagaaattctgacattttttcttaacaaagggattgtaaatgtaaaaagaggatgctataataactaagacgaaaacgcacgggccgtccgaaaacaccgtgggccccctggcttgtaaacgcgaaggagggacgcgctgttcccccccccgtcgggcagcgggtgcgtgcaggggttcagaggaacggagaaaggcgccttgtgcgcggctccgtttgctgtaccgcgaggtcatattcttagaacaggaggagaaacaatggctgcaaaatccgcactgacgcccggaacggcaaagactctgaagcacaataaatggggctcgggcgaaatcaagcggcatctggcattcctgacgatgctgctcccgggcttggttttcctgttttgcttcagctacatgccgatgcccgccctggttctggcctttaagcgctaccagctggccaccccgccggccgactactggatccagaaccgcttcatctacagcttgttcattgacaacgagtgggtcgggttctccaacttcgagtacatcttcaacacccctgacgctgcaatggtgctgcgcaataccttgggatacaacatcgtcttcatggtgttgggtctgatcctgtcggtcgcgctggccatcatggtcaacgagctgcgcaaccgcatcctggccaaggtgtaccacaccatcctcttcatgccctacttcatctcctggatcatcgtcgcttacgtcgtctacgcgttcgtcagcgccaacggcgttttcaaccagtggctcaaggctctggggcagaacaccatcaacttctactcctcggcgcagtactggcccttcatcttcgtattctgtaatatctggaagtacacgggcaacaactcgatcatctacctggcgaccctgacgggctttgaccaggagctgtacgaggcggcggccatcgacggcgcgaacaagtggaagcagatcaccaacatcaccatcccgctgctcacgcccacgatcgtgcttctgcagatcctggctgtcggccgtatctttaacggcgacttcgatatgttctactccctccccaacggctccggtccgttgaagaacgtgtccaccaccctggacgtctacgtctacaacacgatgaagtcgggcgcccagctcggccttgcatccgcggcggctttcttccagtcgatcgtcggcttcgttctggttctgaccacgaacctgatcgtgcgcaaggtctcccccgatatggccatgttctaagaaaggaggagcagattcatgacttcgcagacgcacgctacccaaaaggtcaaaattgtcaagaaaaaccgggacatgaacgagatctccaacggcgcgaacactgtactgaacatcgtgttcatcatcgccgtgctggtcacggtcatcccgatctgggtcatcatcgttgcttccttcacgtcggagaaagcgctgaccacctatggctacggcttctggccgcaggagtggtcggttgaggcctataagttcctgttctccaagggctccatcatcggcacggcctacaagaacaccatcatcgccaccgtcgtcggcacggtgctgtgcgtggcttccgtcggcctgtacgcctacccgatctcccgcgcggacttccgctggcgccgggcgttcaccttcatctccttcttcacgcagctgttcacggccggtaccgttgccttctacgtgacctgccgccagatcctgcacatcggcaactccatctgggcgctgttcctgccgctgtccttcagcgcgtactgggtgctcgtcatgcgctccttctacaagtccaacgtcccggatgcggtcatcgagtcggcgcgcatcgacggcgcgggcgagtggagaacgctgatccagatcgtcctgccgctggccgtgcccggcctggccacggtcgctctgttcgccgccatcagcatctggaacaacttcttcaactgcatgctgctggttgacgaggccaagtactacaacctgcagtacaccatctaccagaccctgaacaacatccgcttcctgagagagatggcctcgcaggtcggcgcgctcgcatccatggtcgcgaacctgccctccgagaccttccgtatggccatggccatggtcaccatgggacccatcatcctggcctaccccttcttccagaagtactttgtcaagggcctgaccatcggcgcggtcaagggctaagccgaaaaaaccattgttttctgcggcgacccgagggaatttccttccctcgggtcgcttttttctgcaaaatcgaggggaaatatacaaaaaatgcgacagattttgcagaaaaacaggctgctttttggacccgacgcgcagaaggcccaaaaagcggaaagcccttttcttctcatcaaagggcaggcgcttgcatcaatagaaaagacagagtccgttaaagcgcggggagcggcaaaaaaatcgttcaatgtaaattcaaggttaaccggcggatccggggaaatcttgatgaatacataaaatttatgcggaataaagcattttctgccgatttcccttgggcaaattacgtaaaaataattttaaaaaactattgaaattgtggaaattatatgctatcattcacttaaccccacccgagcccgaccgggaggacaacccaatacaaaggaggaaaccagaatgatcaaaaagatcaccgcgttgttcatggttttggtgatggttctggccatgacggcctgcacgaccaccgagacccctgcggactcccccgccgcgaccgacggaaccgcggaaacgcctgcggagagcgccggcgaagcgcctgccgcctccggcgacgtcccgacgctggtttactacgagttcggcaaccaggacgtcaacgtccgcacggatgtccagaacgcgatcaatgcctacatcgagccgctgatcggtgcgcatgtcgagttccagatcatctcctccggcgactggagccagaaggccctgacggccctccagtccggcgagaaggtcgacatcttcttcaccgccgactggctgagctacgtccgctccatttctcagggcctgttcacccccctcaacgatgacaacggccccaacggcaacctgctggagcagtacggccagggcatcctggaaagcctgaaccccgcgttcatcaccggcacccagtttgacggcgtgaactacgcggtccccaccaacaaggaactgtgcgttcccatgggctgggtctacaacgtcaaggccgcggaagaagtcggcatggaccccagcaccatcacctgcacggcggactttgagccctacctggcggcctacaaggagctctatcccacccaatatccgtatctgacggacggctcctggggcgacgagccctgggttcccggcgcggtttccaacctgaacggcggtctgatctctatgctgcaggaatgcgatgagaacggcaacttcgacgagacctggtactccgtttgggagaccgattggaaccgcgagcacgcggagctgatgtacaagtggatgcaggctgggtatattgacccggattcctctctttccacgtatgctactacagacaccttcaatgctggaaacttcctggttatcccgcagcccctgaagggcaacaacatcaagggccaggagctggtcaacgcctccggtaacccggaccttgaggtcaacgagatctacggccagggcaagtatgtcgtgaccacccactccggcggctccatgctcgccatccccgtcacctcgcaggatccggtcaaggccatgcagtacatcaacctcatgcacaccgacaccgagctgctggacatgatgctctacggcgtgcccgagaccatgtggacctttgccgaggacggccgcgttgagatcctggattcccagtggtacggcgcgcacggcggcgcttggaccatgggcaacaccgtcatccaggacgtcaccaccatcgaggatcccgagaagaacaagctcctccaggagtactccgaggacgcgatcccgcatcccacactgggcttccgctacgtctgcccgactgagctggagagccagtgggccgccgtcaacaacgtccaggatgcaaataaccgcgcgctgctgactggcgccgtagaccctgctacgatcccctcctacgtcgagcagctcaacgccgccggcctgcaggacatcaaggcagacattgaggcgcagtacgcggagtggaagaccacccagaccgcggaataagacgcagaagtttttcctccttacgaaaagagtgttacagggcagcagccccgcgcaaagcgcggggctgctgccaattttttgcaggaaaggccggggatttcgggagatttttttatacaaacataataattgttacgtacaaaaggaaatgaaagcataaagaaatttaccgggaattcatctttcgggggacccgaaccctggccgctggggggagaagttgggaatatccgcaatatcaaggggaaaaatcttatacaagtcgcacaaaaaaatttcaaagagaattaaaaagcatattgcatttgtaaaggaaacgtgttaggattaataccgtaaacggaccctgcccggcggctgccccttcagcggtcgggacggaaccaaacactctaaggaggaattcacatgaccaagaagatcgtggcgttgctcatggctttggtcctcgtcttcgcgatgaccgcctgttcaacgaccgagactcctgcggaatctcctgctgcgaccgacggcggcagcgagcccgccgcgacggacgacggcgccgctggggaggccccggcggcttccggcgatgtctacaccctgacctactacatgtacggcatgcaggacaacgccgtgcgtgagtccgttcaggcagccatcaacgcgcacatcgagcccctgatcggtgcgaacatcaacttcgtcgtcgtctccgccggtgactggaacgctcgtgcggtcaccgctctgcaggctggcgagaagatcgatatcttcttcaccgcggactggcagggctacgtcaacgaagtgacccgcaacctgctcctgcccctgaacgatgacaacggcgccaacggcaacctgctggagcagtacggccagggcattctggagaccctgaaccccgcgttcatcaccggtacccagatcaacggcgtcaactacgcggtccccaccaacaaggagctgtgcgttcccgtgggcttcatcgtcaacatggacgccgcgaacgaagttggtctgaccgaccccgccacgcagatcacctgcctggaggactttgagccctacctggcggcctacaaggagctccatcccgagcagtacggctacctgaacgacggcggctggggcgacgagccctgggttgccaaccaggtcaacggcctgaccggtaacctgatcgcccagaagtatgaccccgatgagaacggcgtcttcgacgagacctggtactccgtctgggagaccgaggagaaccgcaatcacgtcaacaccatgtacaagtggttccaggctggctacatccatcccgatagccccctgtccaccttcgacgtcaacaccagcgcgcccttcgcggctggcgagtggctgttcatctccgctcctctgaagggcgagaacatcaaggcccaggagatgatgatcacctccggtaacctcgacctcaacctccaggaagtctacatgcagggcaaggtcatgatcacgacccacgccggcggctccatgctcgccatcccgcagacgagcgaaaacccggtcaaggccatgcagtacatcaacctcatgcacaccgacaccgagctgcttgacatgatgctctttggcgtccagggcgagcagtgggagttcgccgaggatggccgcgtcgagctgctcgacccgtcctggtacggcgtgcacggcggcgcttggaccatgggtaacaccgcgatccaggatgtcaccaccgacgaagatcccgagaagaaccagaagctgcaggagtactctgcggacgcgatcccgcacgtctcccttggtttccgctacatcgttcccaccgagctggagaaccagctggcggctgtcgtcaacgtgcaggatgccatgaaccgctcgctgctgaccggtgctgtggatcccgctaccacgctggaccagtacgtcgccgatctgaaggccgctggcctggatgatctgaaggcggacatcgagcgtcagtacgcggagtggaaggctgccaccggcgccaccaccgagacgcccgcggagagcaccgccgctgaggagaccgctgctgcggaagcgactgcggcccctgaggagagcgcggctgcgtaaccgctgcgatcccaacgctgaatccatgctgttcccggagaggattccctctccgggaacagtttttttgtgcgcgcgcaggtccggcgctgcgaaaacggaaggttaattttttgttatgtaaacgcagccatggttttgaaacggaaaaatcatagatgtccgcccaggtagggagcggctcctgggtgagatggatgggagacccaagggcttttttgaaatgcagcgggagcagatgcggaaaaatgggggaaaatgattctgacataatcattatattttccaaatcatgcaagaaggagcaaagtcatgcaaagacctgaaaatcgttctgaattcaaaactatgttaaatccgattgagcactgtttcgcgtgtgtaaaattatgagatgtgtggaagtttttcgtccacaatttggacagaatccacaaaaaatggcgcaaattgtgcttaacaaaggtgttgcaaactgttatgagaggtggtataatcaccatcgttcaaagggagcactctcgggggaatgcgcccgagacgagctttgcaagagcgaattctaaggaggaaaaggacatgaccaagaagattcttgcgttggttctggcgctggtcatggtgttcgcgatgaccgcctgcaccagcacggaagagcccgccgagtctccggccgctacggacgatgccggcacggaaagcaccgagcccaccgccagcgccgattccggcgaagttgtcaacctgctctattatgagatcggcaaccaggacaccaactctcgcgaggcggtccaggaggcgatcaacgcttacatcgagccgctgatcggcgcgaacgtcgagttccgcatcgtcagctgggcggactgggattcccgcgcgctgaccgctctgcagtccggcgaggaaatcgacctgttcttcaccgcggactggaagcagtatacccgctccgtcatgcagggcctgttcaccgcgctgaacgatgacaacggcgcctacggcaacctgctggagacctacggccaggacatcaccaacagcctgaacccgctgttcatcaccggtacccagatcgacggcatcaactacgcggtgcctgtcaacaaggagctggctgtgccgaacggctacatcgtcaacctcgacgcggctgaggaagtcggcatggatcccaccacgatcaccggcatcgcggacctggagccctacctggctgcgtacaaggagctccatccggagcagtacccctacgtcaccgaccgccgctggtgcgaggatccctggagcgagagcttcgttgcgggcctcaacttcaacctgctgagcacctacctctcccccaacgaggacggcacctgggacaacaccgtctactccacctgggagtctgaggagtacgcctactacgcgcagaccatgtacgagtacgcgcaggccggttacgtccatccggacacctccctggcgcagtacgacgcgctgacccagttcaacgcgggtgagttcctggtctacacggccccgctgaagggcaacaacatcaaggcccaggagatgaagaacgcctccggcaacccggacctgaacctcagcgagatctacacgcagcccaagatcgtcaccaccaaccacaccggcggctccatgctcgccatccccgtcacctctgagaacccggatgtcgccatgcagttcatcaacatgatgtacagcgacaccaccctgctggatatgctggtcttcggcgtgcccgagaccatgtggaccttctccgacgacggccgcgttgagctgatcgatacctcttggtacggcgcgcacggcggcgcctggaccttcggcaacaccgtcctgcaggacgtgaccgttgacgaggatcccgagaagaaccagctcctccaggactactctgcggacgccgttgcgcacgcgtccctgggcttccgttacaagatgcccgcggagatggagaccaccatcgcgtccctgaacaacgtcgccgagggcatgaacaacgccctgatctccggcgctgtggatcccgccaccgctctgccccagtacatcgcggacctgaaggccgccggccttgacgagctgaaggccgatgtccaggcgcagtacgacgagtggagagagaccgtcggcgctgtcgaagtgcccgctgcctctgcggagcccacggcttccgaggagcccgctgcctctgaggagcctgccgcttccgaggagcccgctgcctctgaggagcctgccgcttccgaggagcccgctgcttctgaggcgcccgccgagagcgaggcccctgccgagagcgctgaggccaccgaagctcctgcggagagcgctgcggcctaactgcccgctgggaaccctgccggatctatccggcggggttctttctttgtgcattgtaaaatgtctgccgtcccctaggaaaaaggcggggaatatgctatgattaggtttgaaatgtgtttttaggagaggtggactatggaatttaaggcgtaccttgccgaaaagatcgccggggccctgcgcgaggccttcgacgcgagcgtggacggaatccctggcttcctcgagacgccgcccaaccccgagatgggggactttgccttcccctgcttccgactgtccaaggcgctgcgcatggcgccgcccgccattgcgggcaagctctccgagcgcatcgcgccggacccggtgatcgagcgcgtggagtgcgtgggcggatacctcaacttcttcctgcacaagacggggtatgcgcagtccatcgtcgagcgcgttctcgagcagggcgagcgctacggctcctcggacgaggggcagggccgcgtgatctgcatcgactactcctccatcaacatcgccaagcgcttccacatcggacacctgtccaccacgatgatcggcaatgcgctctacaagatctatgagcacttgggctacaagtgcgtgggcatcaaccacctgggcgactggggcacgcagttcggcaagatgatcgccgcctaccgcaagtggggcagccccgagcaggtcgagcagggcggcgtcaacgccctgaccgagctctacgtccgcttccacaaggaggcggaaacggaccccgccctcgaggacgaaggccgcctgtggtttaagaagatcgaggacggcgatcccgaggccctgcgcatcttcaacaagttcaaggagatcaccctgaaggacgcgcagcgcgtctacgacatgctgggcgtgcagttcgactcctacgcgggcgagagcttctacaacgacaagatgcagcccgtcatcgacgagctgcgggaaaagggcctgctcaaggagagccagggcgcctacgtcgtggacctggaggacgaggggatgcccccttgcctgatcctcaagaaggacggcgcgacgctctacgccacgcgcgacctggccgcggccttctaccgcaagaagacctacgacttctacaaggacctctacgtcgtggcctaccagcaggacctgcacttccgccagtggttcaaggtcgtggagaagatgggctacgactgggccaaggacctggagcacgtggcctttggcatggtctcctacgagggccgcgccctgtccacgcgcgagggctacgtcgtctacctggacgagctgctcacccgcgcggtggaaaaggcccgcgagatcatcgaggagaagagcccgaacctcgcggacaaggacaaggtcgcgcgccaggtgggcatcggcgcggtcgtgttcttcgacctgttcaacaaccgcatcaaggacatcgacttccgctgggagcgcgtcctgaacttcgacggcgagaccgggccctacgtgcagtacacgcacgcgcgctgctgctccgtgctggccaaggcgggcgagctctccgcggcgccggattacgccgcgctggacaacgcccaggcgcaggaggtggtccgctccctcgagcgcttcccggagctggtgcgggaggcctgccagcgcaacgagccctcgctcctcacgcgctttacggtggagctggcgtccaacttcaaccgctactactacgagaaccgcatcctcaccgaggacgcggcggcctccgctgcgcgcgtgaacctgacggcggccacggcctcctgcctgcgcacggcgctgggcctgatcggcgtggaagcgccggaaaagatgtaagtgcgaaaaaaagagtggattggggagcgccgtcgctcgcggcgttcccctgcttgttggaaagtgttttggtttcccgacggggagggggagaagcatgcaaaaaatcggttttgacaacgatctgtacatccggcgccagtcccaggccatccaggagcgcatcgcgcggtttggcaacaagctctacctggaattcggcggcaagctctttgacgatctgcacgcctcgcgcgtgctgccgggctttaagcccgacgccaagatcggcctgctgcagcagttccgcgaccaggcggagatcctcttctgcatcaacgccggggacatcggcaacggcaagtaccgcgcggacctgggcatcacctacgacatggacctgctgcgcctgatggaccagctccgccgcatgggcctgtacgtgtcggccgtggtcatcacgcagtacaagggccagcccgcagccgacgcgttccgcaagatgctggagatgcgcggcgagcgcgcgtacctgcactaccccatccagggctaccccatggacgtggacctggtcgtctccgacgagggctacggcaagaacgactttgtcgagaccacgcggcccctggtcgtggtcacggcgccgggcccctgctcgggaaagctggcgacctgcctttcccagctctaccacgagtacaagcgcggggttcaggccggatacgccaagtttgagaccttcccggtgtggaacctgccgctcaagcacccggtcaacctggcctacgaggcggcgacggcggacctgaaggacgtgaacatgatcgaccccttccacctggaggcctacggcatcaccaccgtcaactacaaccgcgacatcgaggccttccccgtgctgcgcagaatcctgatgaagatcaccggcagcgactccatctaccactcccccacggacatgggcgtcaacatggcgggatacggcatcttcgacgacgaggccgtgcgcgaggccgccaagcaggagatcatccgccgctactaccgcgccaaggtcgactacgccaagggccgcacggacgaggaaaccgtgcagaagaccgagatggtcatgaagagcctggacctctcgcccgaggaccggcgcgtggtgcgccccgcgctcgagcgcgcggagcagaccggctgcccggccttcgccattgagctgccggacgggtccgtggtcacgggccgcggcgcgggcatcatgaacccggacgccagcgccgtgctcaacgccgtcaagcgcctggccggcatcgcggacgacatctacctcctctcccacatcatcctggagcccatcgtccggctcaagaaggacgtgctgggcatcgcggagccggtgctcagcctggacgaggtgctgctggccctgtccatctgcgcggcgacaaatcccgtcgcggagctggccgtcaagaagctcacggacctgcgcaactgtcaggcccacgcctcctacatgctctcccagagcaatgaggtgatgctctcgcgcctcggcttgcagtacacctgcgaggattcctatccgaacaaggatctctactacgtctaaaaaatccgcctgtgcgcaaaagaaccggtttccccggtttttttgcgttttggcagggcacgttttcccggcgcaaagcgtttatcttcatgggtacagccgtggagcgcgcggcttttttggttgcggattcggggagctgtgccgtataatagaggaagaaatcttggaggaaggatgcccatgaaaaagagaagcgcattgtgcgcggcgctggcgctggtcctgctgctgaccgggtgcagagggcggacgagcacgacggcgagccaggtacacattcgggactacgcgggcgtgcccgcttacgagcagccgaccgcagacggcggggcggacggaacctccgccgcaatcgaccccaacgccgacatccaaatcgacgtctgggtggacggcacgccctccatggcgggatttgtggccggggacctggccacggcctaccgcaaggccctgccccgcatcgaggagaccgcctacaacacctggatcaacgcagcggtcgattactaccgctttgagatctccctgctgcccgaggactttgcggacatcgaggggatggacgagtacctgaatgagagcggccagacgctggaggcgttcacgcgctcgctctacgcctttgcgcccatctccgccggggacacggtccgcgcctacgagcaggcggatttttacagcaagaccacctactttgcggactacagcgcgggcacgggcgacgttttggaggatgtgaccgaccaggtccgctccatcgccgccgtcaactgggacagccagtccctgccgcccctgcgcacggccctgaccatggccgatcccgacagcctcaacgtcatcgtcacggacctctacgaggaaaagggcatggtcgagagcatcggccggctcatgacggagcgcttcctctcccagggaaagaccgtggccgtgctcggcatccagagcgagttcgccggccccatctacgacatcggcgagagcgaccagaccatcaactacggcgtggacgagaaccgcagcttcgtcgagtacaagccgcaccccttctacctgctgctcatcggcgaggagagcgaggtcaacgcctttgcccaggcgctgcaggagaagtttgacgcggaaattgcggacaacgagttctatacctgtgaagtgcagctgatgaagaccggcgactggggcgaggcctcggactattcggacatcaccggctttgccaccgacggcgtgctcaccggccagacccagcaggacgagacgcggctggccagcggccaggtcgcggacctgcgctacaccatcccccgccaggaggctgcggcccgcggccagacgcccgcgcccgccgcagacgtgcagagcctgtcctttgacttcaccgtcccggtcagcgtcgtgacggacaaggacgtggacttttcgaccttcaccttcacggcggaggcgcaggtcgagcgcacggtcctgcaggaggtcgcctccggccggcgcaccggcagcgacgcgggcgcggccaccgcggaggagacgggcctgcccatcaccgcgaccgtcgggtccagccggtatgccggcgactttgccgcggacgagaccgccgcggcgctcgtgcagagcgtcgaggccgtctccgtcggcgcggcgcagcgcgacggggagacgctcacctgcccggtcaccttccgcgtgacgatgcaggccccggaggacatcggcatctaccgcatcctgctcagcgcgtcggcgcagtgcccggcggacctgttcccgacggacctggagccctgggtggacgagtgggatatctcggtggcggacgagctgacctggctcaacgaccccgagagctttgacgggtccaagacgctgtacctgaagcgcatcatgaaccagctcgtggtctcctccaacacggtgcagaccacgggcgagaacgccctgtcgcccacgcacgagctcgtgcgcttttacgtcgacctctatgtggacgagcaggggtacttccgcaccgagtaacgcacagaagaaggggaggatgaagagttggctagaagcaaggacaacaacggcaagcacatcgccatactggtggtgatgtacgcggtgctcacggggctgctgctggcgttcctttcgtggaacatggcgagcacgccctttgcctacgagtttttgcagagcgccggcatcgcgggcgtggagaacctgacggacgaggccgtgcgccaggtctggttctcggtcatggccgggacgtatggcacgacggcgggcctttcggtgctgctggtggcggtctggtacgcgatcttctggaaggcgggcaagcccgaccgcagaagcctggagaacatcctctttgcggtgtttgtcgcggtgcacgtgctcatgacgctgctggtctccatcctcagcggcgtgttcggctttgcgacctccatggtgctggacgcctatgacatcctggcctaccacgggctgttcctgtacaacgtgccgtttatcctggggctgtggctcttctcgcccgttggcatgcgcagttccctgttcaaaaagtggtgagaggaggcggaaacccttgggcagctatgtatttttcgtgggcggctccggttccaagatgctggaggcgaccctgcacgcggcggcggcgggcgtcctgcgccacccgggcgcggccatccgcgcggtgattgtggacctggaccagacgggcggcaacctcaagcgcgccgagagcctgaccgcgctctacggggacatgcgcgcctgcgtctccgccgcgcaggccgaggccgaggaggagacggacatcggcttttccgcggactttgccctctaccgcctgaccgcggtggaggagcaggccatgggcggcatcctgcgctcgaccggcatgggcaacgaccgggagatcgcccgcgcgctctatacggactacgagctggagatgagctataagaagggcttctatggccacccgaacgtgggcgcgcacttctttgcctcggagctgccgcgcctgccggccgagcacagcttctccgaggtcatcgaggagatccggcgcgagctcgtcaagggcgggcagccgcgcatcctgctggccggctccatcttcggcgggacgggcgcctcggccattccctccatcgcccgctacatccgcaacctgacggacgaaaacccgaacccggacgcccggcgcgccgtgggcggcggcgccatcatcggcgcgatgctcctgctgccctacttcgccacgacaaagggcgacggcgtgatcgaggcctcgcagtttgagcccaaggccaaggcggccctggaatactacgcgcgcgagggcgtgggctacggcgaaaacaaggtcttcaacgccatctacatggtcggctcgcaggacaaggtggtctacgactactgcaccggcggccaggaccagaacaacgccgcgcacctggtggactggctgggcgcgcaggccgtgtcccacttcctgaccacgaaccccggcgcctacaacccccaggagcaggacggccactacctgttcaacctggacctgaccgcgcccaacgccgaggggaagacgttcctgacctgggactccttcccggacatggcggtccgcagcggctttgcgcgcctgctgcgggcggcgtatgtgctggccacctcctacggctaccccatggtcaaggacctgacgggcaagcagagcatcttccgcacgcaggacgccgtgacccgccgctacttccgcaaggtccgctcggacgaggagcgggaggaggccgtgctgcgcttccgcacggcggggcggtacttcacggagtttgtgcgttggctgacggagctgatcgtgaccctgccgccgccctacgtccgctccaaccccggcgagggctacgccgtgggcggcgcgggcggctggcgcgtggacgtgcccagcaacgagctggtggacggcgcgctgctggccctgctctacaagtattacctggagatgccggacggccgctacgacgcgcagaagcccctgggcggcgacgcctcgcaggaggacgtgaagaccctcatcggcggcctcaacggcgaatacaccttcgacgcgatcaaccgcagcgtcgtggcgcagacctcggacagcgtgagcggctccacctgctttgagacgttcctgtccagcctgctctacgcgtgcagcgtgcagtgagaaagggggaagagacatgctggaatccatgatcgtggagctcaacgcgggcgaggccctgcccacgctcagccgcaagggctgggagcgcgtcgggtccgacggcaacgcgccctttaacctgtgcgagaagatcgccaagcgcatgaaggcgggcgatgcgctcatctcctcctccttcccggagatctactccaattatttctccttccaggcggccctggagatgggcatggaggacgcggtgcgccagtggcgcggcatgacggccctggccctgctgcaggacgaatacccctttgaggtcaacaccctgacccttgcggcggacgaccggccgggccggccccggtcggactttgcggccatcgggtgcgactacgcgcccgcgggcgaggacttcttcctgcccgcggacgccgcgcacggcaacttcgccccagcgggcatgcaggtcggctgcttcgacggcgcgccgcgcctgatcttttcccgcaggctcctggtcttccccgcggccgtgcggccggaccccaagggcgcgcggaacatcccctggttccactaccccacgggcctgttccgcgacccgtgcggcgcgcagctgcccgtgctgcagcgggacgtgctcgtcagccgcctgacgggcgtgctgaccatgacgcagatgccgaactccccggtgttcggcgaaaagctcatcgcgcgcctggcggaggagttcctgcgcgacctgcgcgccgaggagacgagcgccctgcacgccatgcgcgcttcggaggaggcgcgcaacctctggctgctggtgacgcgcggctatttcctgggcacgtattacgcggacctggggctgagcgtgcagatgggcgaccccgcgaacaccctggagagcgcgcggcgcagcgtgcgcctgctgaacctgaccatggccatggcgggccttccggagaacatccgccgccagagcccgcagggcgtctacctcttctacaacggcaggagcatcgcctacctctcccgggagttcttctgggtgccgctgggcggcgtgtccgacccggcgctggtgagcctcaacatgagcgtggactaccagctcgaccccgcgcggccgcagttctcctacaactgcgacatgatcaacaagatgctgggcgcgctgtcccaggtaaatacactggacgtcgagtgcctgaacctcatcgagcgggcgcgcatgcccgcggtgagcaacctcgccctgccggatacgctggtggacctggacgcgcccccgccggtggagttccccctgcccgcgccgtttgcgcacgtggtcaaccccgtcaacgcgctgccctttgcc

SEQ ID NO: 1660 - DNA, 2173 bp, Unknown
  16S sequences of unknown bacteria
ataaaagcttacctatgccacatgactgcatttcatcagagacaaaaataccttcaatatacattttgacatggaacagtgggatgaaaaaatcacagactgcatcaattatctgatccttttaaaagctctggtaaaggaggaacaggcctatggatcacattgaaacagctatcttaaactgctatgggatccgggaagcagaacagaatatggtctttgctgccaggctcacacaacacggtcatacgatccagaacatggcagatctgatggatctttatcatcaatcctacagtcagaagaccgtagaaaacattgcaggacttccccatccaacagtgcagaaattcatggtcattaccgtagctgttgttggtgcaagcagacgcttcctggcacagatcacaagacatcagaacgaagtaaagtacatgagtgcatctctgcagtacagcaattattccggtcacgctgcatttgctataccatatggaatcatgagagcagataaagaaatccaggatatttacaagaaaagctgtcagtcagatctggatcactatgcagagctttgtgccttaggcattgatcatgattcagccggatatgccacacctcagggacttcgaaacgtactgattatcagtgcaacaccttaccagtggaagcatatgattggtcagagaacctgccggagaaatacggatgaaacccggattgtgatgctccatatctggcaaagattgtacaaattaagcccaatcctttttgcaccagatttgaccggtccgttctgtcagagaggaagctgcatggaaaaacagatgtcctgccagaatcctatttcaaaactttggatgccgtcagacatcttaaaggcagattatccattgctgatccggaaagaggtgagcagccatgaagattaaactgattgactttggtctgaaagcggatcatcatcccttccggccacatgaaaatgatgccggtgctgatgtattcatgccttatgattgcgtattaagaccaggtgaggttgcaagaattccacttggattcggtctcatcataccggatggatttgccggatatgtctttccacgaagcagcatggctgcaaaaggactggtatgtgaacttccaccaatcgactccggttaccgtggagagatccatgccattatcagcaacgtgagcacatcttctcagaccattcataaagacacacgcgtcggtcagttggtgatcacaccagtcgtgattgcagactttgttctggatctcggtgaagaacgaggaaccggggctttcggaagtacaggagaataatactatgattacatttggaagaaaattaaaacatttaagacagaaaaatcatctcacccagaaagaacttggcatggctgttggatttcccgacagctgtgctgatgtccggattgctcagtatgagagtgatgtccgaacaccgaaagaggatcttataaaactcttctcatcaaaactcggtgttccggttgaactctttaccgtaccggtactctcagaacccagggagtatgaggcggcggagtattggaggtatgagttaggggcggaactagattaagtgtcgtatactgtaatgaggcaacggattatccgctgcctctcttttatcattttaggggtaataattgaaaataacctgtgttgagcaatcctctttttctgcgctttatctgcatatctatatatttcattttatttctgttccatcgataaaaagcacatatttatccggattatgaataatatcataatcttttccatattcaatcggcctaagttctatctgcataatggattcgccattttcgatatcttctttccaagaatatacggtcatatcaagactggttgcatatccatgatctgtagaaaattttattgaatgaaatgaattctctttatacatttttaaaagcagtcttgcaaatgcttctttatcagaaatattttttttcttcattttatcaagttccttagagttatatataagtctttagaactactatatcatattttcacgttaaaccaaataaaaaagaatgtgccttggcacattctcgcggttttaaggaagcaggcgacgggaatcgaacccgcctcctcagcttgggaa

SEQ ID NO: 1661 - DNA, 9985 bp, Unknown
  16S sequences of unknown bacteria
taagaaggcagcaaaggaggaagtcatatggctggcaggagcaaggcaaaaacgttgtcaccggaaatgcctaaaaaacctttgggacagcgaatcaagaaagatctgaagaagaattatttgctctatctgctgcttctgccgggaattctgatcctgattttttttaagatcggaccggtaggggcaatggtaatcgcattccaaaattttagtgcgtttaaaggaatcgtaggaagtaaatgggttggatttcaaaattttattaaaatttttcaggatccgtatatgctgaagctgattgcaaatacggtgattctcgcaatattatcaattgttgtagtatttccatttccgattcttttttcattatttttaaatgaagtgcgacttaacaaagtaaggcatacggtacagtcattgagctttttgccttatttcatgtcatctgccgttatggtaagcattctgtatacgctggtatcgccgtcaagaggattaatcaataagattattcagttttttggtggagaatcaatcttttttatggcagaacccggatggtttcgacctttgtacattattcttcagatatggcagacatttggatattctaccgtgatttatattgcggcaatgatgtcgattgatttagagcaatatgaagcagcagatatagatggagcgacacggtggaagaagatgtggtatattacattgccatctatttcaagttctattatcgttatgttgattattagtataggaaatattttttccgtagatttggatcgtattcttttaatgtataattccagtgtctatagcacagcagatgtgattcagacctatgtgtatcgaatcgcatttgaatcgccaggatttccggattacagctatggtacagctgtaaatatgctgaaatcagtgattgcatttatacttgtacttgcggcaaataagctcgcaacaaaatattcagagacgagattattctaggaaagggggagagcatatgaaaaccaaaagaagaaaaaaattggattggtttgagatcataaacgatacaatattatgtctgatcgcgtttgtttgcatctatcctttcctctatgaattctttattgcgatcagtgatgggagatttcttgcagcagggcaggtaacatttttgccaaagggaataaacttagaagtatttaaatacatattatcaaatccaaagttggatattgtccttggcatgcggaattccttcctttatacagcaggtggtactctggccggagtggtgacaacgtttataacagcgtatgccctttccagaccgcagatcaaacaaagatacatcttgatgggcttatttacacttacatgggtatttgaggcgggtattatcccaacatatatagtatataatgtgtttggctttattgataatcctctggtcatggtagttccaggggcaatcaatacgcagtatcttattatttgtaaaacttatctggaagggttaccatatgagttggaggaagcagctacggtagatggagcaaatcaatttcatattttatttcggatttatcttccaatttcaaaaccgattgttgcgacaatcagtacattctatgcagtaaatatatggaatcagtatttgatgccgcagatttatttaaagtctgcgaatttgaaaacaatccagcagattttaaagagtgtggttctttcctcaaatagtgctggtgaaaccatgcagactattatgaaagaaggaattgccattaatcagtataatatgcaggcggcggccgtggtcattgcaatgattcctattttatgtgtatatccatttgttcagaagtattttaaatcaggaattttaatcggagcggtaaaaggctaaggtaaggagaatatgaatatgagagaatatataaggcttcaggatatagaagaaaatggaaaaatgtactataatagcaggcttgatatggttgaggcattgataccaaatccgtataatagctgtcatgcggcggatctgctggagttgccgaatggcgatttactttgttgctggtttgcaggttctgacgaagggaacgcggatattagcatagcagtgtcaagattaaaggcgggcgagagtacctggacacagccggtaattgtatcagacgatccggagcgttcggaacagaacccatctttattccttacaccatcaggtgaagtatggatcatgtatacagcgcaggtgtcaagaaatgcaagaccagattctaagtttaatttgcagtatacggctgagattcgaagaaaaatttctacagataatggtgaaacatggggaaagacagaaacgatgtttgcagaaccaggatctttttgcagacaaaaaattcagattttaaaaagcggaagatggatatttggcaactggatgtgctttaatgatgacacgcataatggcagtgatattactgtgatccaaatatctgatgatgggggacagacctggagatcagtagaagtgccggacagcagaggaaaagtacattgcaatataattgaaatgtcagagggaaagctcacagccttattccgaagtcgaagcgcagatcatatatatattgcattttcgaatgataatgggaatacatggtcttcgccagtacggacagaattgccgaataataattcgagtatttcggcaataaagcttcaatcgggagcgcttgcagttatttataatccagtgaaaatgaatgacgatgtaaatacaacggtatggccgagacttagatgccctgtagcgatcgcaatctcagatgataatggaagaacttggccgtatattcgtctggtggagcatggagaaggttgccttggaatatctaacaggaagagtaatcgcagatatgagtatccggtgatgatgcaaaaagcagatgggatcattgcctgtgcgtatagttttggtgatcgccgatgtgtgaagtatatcgaagtaacggaagcatgggtgcgtggatgcaaacgtgacaaggaagaactttggttcgtgtaatgtgatagagagctgctgcaaaatggatgagaaaaatcattcatgaagtggcagctccattttattcgctggcgcggaagtgtttgacattgagacgcttcactatattgtgaagccggttgtgaaaaagcagttttactatatgctggatacattttttgacggctatacgtccatgcggatgttgactgtgaacggaaggtaggacaaagtgtggtgtgtggtatggtgaaaattcctgcggtaagcattccgatcaggaacagagatcctaatttgcgtgatgtcatgattgagatactcctttgcaatgcatttatggttaagtttttgataaatgtcataacagaagaggatcaccatttctttttcagggaacgaagtgcgaccataggaaatgaattgtacggaagcagcaaaatacacaaaaaatctttctgtttataaaaaaatctgttctttctgcttttttatattggaatttccatatgagtgtgctatgatgatgtaataaaagtcgcatggacagatggatttatctggcgatttgttgcgtgggaatgggtatcattccagatacttctattatagagtcagtgagaggagaaatgcagaatgaaaaaagcaacgatgtttgtgcttgctgccgctttgacgatctctatgaccggatgtggatccagccagaaagaaacggaggcgccgaagacggaagcagctacagaggctaagacagaagccaagacggaagctgcaacggagaaggagacggaagccaagacagaagctgtgaccgagaaagcgactgagacagagacggagaaagtaaccgaggcagagagcgaagttgagacggagacggagaaggcaaccgaagcagagtctgagacagagacggagaaagtaaccgaggtagagtctgagacggagaaagcaactgaggcagagtccgagagcgagaccgaggtagagacagagactgagacggaaagcgaagtcgaaacggagacggagaaggcaaccgaagcagagtctgagacggagaccgaggtagagacagagaccgagacagagagcgaagtcgagacggagaaggagaaggcaaccgaagcagagtccgagagcgagaccgaggtagagacagagactgagacagagagcgaagtcgagacggagacggagaaggcaaccgaggcagagtctgagagcgaaaccgaggtagagacagagaccgagacagaaaaggtaacggaaaagggaatcgaaaaagcgactgaggcagaaacggaagctgctacagaagccaagacggagaaagcaactgaggcagaaaccgaaacagaaaaagtgacggaagctgctacagaggccggcaccgaggaggagacggaagaagcaacggaaaaggcaacagagccggtagaagtacagaccgagtccgaggctttcgaggctccggagggaacacactataaggcagcccttcttctgaatggaaaccttggagacaagtctttctatgattctgcgaatgaaggactggagcgtctgcgtgatgagctgggcgaggacgtatttgactttaaggtagagcagatgggcggaactgcagcggatgaggctaagtgggagccgaccttgctcgattactgtgacaccggcgcttatgatgttatcattatgggtacgtggcagatggcagatgcactggcacgtgctgcagaggagtatccggatcagaagtttatcttcttcgatgaagaatttgacttcgagggcaacggaaatccggagaatgtatacaatgtcatgtacaaacagaatgaggtatcttatctggtaggtgcggcagcagcgatgatgacgaccgatgattctatcgaaggaatcgatccggataatcatatcatcggattccttggcggaatggacaattctgttatcaatgatttcctggtaggctatattcagggtgcggcagacatcgatccggatatcgaagtggcagtcggatttgtaggagatttcgtggattctacaaagggtaaggatatcgcactttcacagtaccagagcggtgctgacgtcggatttaatgttgctggaaatgcaggacttggacagatcgaggcggcaaaggatgaaggaaagtatgcatttggcgtagattctgatcaggcagctctgcttccggactatgcagactatattccgacctctgctctgaagaacgtcggacagtccctgtatctggcaatccagaaggatatgctcggtgagctgaaatatggtaccgaagagacttatggtttcaaggaaggtggcgtggcactcgtaaaggatgcacattatgagaagatgcttccggagaatatccgcacgaagctggatgagctggaacagtctatcattgatggagacatcgtggtaaatacttctgcagacatggatcaggcagcaatcgaagcgcttaaagagtctgtaaaagtagggagatagaagaaatcggcagtaaggcggaagcaggtttgacatagatgcatgtttccgccgtcagggccgctgttgtatggagatacacagcggccctttttaaccgaatcaagcaagtcccctgcttcaattgcgtgaagcaataagtagtgggtagggcaagtagcgaagcggattgggaatatccgcgttcacacgaatcaggcaagagggaaagcaggtgaggcagggtggagaaacagacggttctggaaatgcagcacatcatgaaaatttattccaatggtgttgttgcaaatgaagatgtcagtctcgaattaaaaaagggagagatccatgcgctgctgggagagaacggcgcgggaaaaagtactctgatgaaagtactgtttgggattgagacaccggatcagggaaaaattttgctgaatgggaaagagacagtaatcaggtcgccacaggatgccatcgaaaaaggaatcggcatggtgcaccagcattttatgcttgtaccgtcattgacggtggcagaaaatatcattctgggggtggaaccgcgtaaacagaagctgtttattgacatgaagcaggcagagaaggctgcaaaggagatagcagagaaatacaattttgcgattgatgtgacagccagggttgaggaaatcccggtcggcatcaaacagaaggtcgaaattttaaaggcgctgtatcgaggcgcagatattctgattttggatgaaccgacggcagtgctcacgccgcaggagacagaagagctgttcattcagcttgagaagctgcgggacgatgggcggacggtcatctttatttctcataagctggatgagatcaagcgcatctgtgaccgggcgacaatcatgcgcaacggaaagagcatgggtacctatgaggtcggcgagatcagtacgaacgacatgtccagattgatggtcggccgtgaggtcgtgctgacatttgaaaaggatccgcccaggctgcagaagacaatgctggaggtgaaggatctggttgcctataatgcgcagggagtacagaaggtgcaaaacctttcctttgaggtgcgcggtggagagattctcgggatcgcaggtgtcgaaggaaatggacagacagagctggtcgatgtactgaccgggctttccggccgatatacgggtacgattctgctaaagggagaagatatccgtaaagagagtattcgcagtatccgggaaaagaagcttgcacatatcccggaggatcggatggcgtccggctgtgcggcacatttgaatattcaggaaaatatgtttgccaatcaatatacggatccgcgtttttccggaaaatttttgctgaaaacgaaggcgattcaggcgcgggcacaggagctgatcaaagagtatctggtcaaatgtaagtctcagaagcaggaggtcggcatgctctcgggcggaaatattcagaaggtcattgtggcgcgggagttttcaaccggaccggatgtcatcatagcgaatcagccgacgcgtggtattgatgtcggggcgacggagtttatccggaaaaaactgctggaattccgggataatggatgtgcgattatcttaatctctgcagatctgaacgagatattttccttaagcgaccggctggcagtcatgtataaaggaaatttctcagggctgtttcagcaggtggaccaggtgacggaggaagaactcggacagtatatgctcggtctgaaaaacgatttaaaaaagggggttgagtagcatgagcagcagcgtaaaacgatttgagctatttcgaatgctatttgcgattgcgattgcgcttctggtgtcgtttggcattatttttcttgtgagcagccagccgctgactgcgatttatacactgattacgggaccgtttaagagcaggagaaattttgcgaatgtgatcgaggcgatgatcccgctgatctttacgggaaccggtgtctgcatcatgttttctgccaaccagatcaatctggcaggtgagggtgcatttcacatcggaggcctggtatctgcggttgttgcactggagctgggactttccgcaggactcagccaggcagtggcgatcctgctctccgggctggcgggtgcggtattcacggcggttccggcggttctgaagatcaagacaaattcttctgtgcttgtatcctcgctgatgctcaattatctcgcacagtggtttgcaacatttattctcatgcattttatctgtgatccgagcattggttccggatcgtatctgataccggaggaactgaagcttccggcaatgatcgagaagacgcgaatccatgcaggactgatcattgcgctggcggcagctgtgctcggctactttttcctgtatcgttcccgtaccggatatgagcttcgtctgaccggacagaatgagctgtttgcgcgctattccggtgtgagcattgtaaaggtcgtgctcgtatcgcagctgcttggcggatttatcgccggtgtgggtggcggcgtggagctgctcagtccgatttattcacggttttcgtggacttcgctgcttggctatggctgggatgcaatcattatctgcacactggcaaagaataacccactctatacaccactggctgcactgtttctggcgtatttgcgtaccggtgcgtcaatcatgtcgcggtatacagatgtcacacttgagatcgtgcagatcacacagggaatcatcatcctgctcgtcgtagcggagcagtttctgagcggatacaggcatcggatgattgcaaaagaagcgattgccgccctgaaagaagaggaggggaaatagtatgttgaaaaatattctgtctccggattttctgaacgcaattctgcgggcttctacccctattttgtttgcaacgctcgcatccgggattgcagcaaagtccggcatcaccaacatggcgctggaaggaatgctgctgtttgcctctttgtttggcgtcattttcagctcactgacacatagctttttaggtggattgttgattacgatggtgatcggcggatgcatcggactcgtgctggctttcttcattctgcagctgaagacggatgagattcttgcggcgattgcgctgaatctgatcgcgacaggagggactgtgctgcttcttctggctgtttcgggggatcgcggtgcatctacgtcgatttcaagcgtatctgcaccggtgatacggattccgtttgtatcccagattccgtttctcgggaaaattttatccggtcagaatctgatgacctggctggcgctgcttgcggtcgtagtgtgccatatttttctctataagacaccgatggggctgaaaatccgtgcggtgggtgagaataagaatgcggcggaatctgttggtatcagctcaaaaaagattcagtacatagcacttatcttaagcggtgtgctttgcagcatgggcggatacttcctctcgggcggatacatgaatatgtttacaaaggacatgtcagccggtaagggctttattgcactggccgccagctcaatgggggcagatacgccggtgggaggatttctcgtgacgatgctttttggtatcgcgcaggcgctcggtaatctcatgcagctgacgacgataccgacggagctgattcagatggtgccatatttgacgacgctgatcgggcttgcagtgtacagctatgtgacaatgaagcggaaaaaccggcttcagtcgaagtcaacgctctgaaatgcctcctcgctcaagagggctccggaggtttctacgacctttgccgcaatgcggttggcaatgcggatcgattccggaagtgatttgccaagctgctcacaggcaatcactgcgccgatgtgggagtcccctgcgccgatcgtgtcgatctgtgtggcggcgatccccggtacatagccggaggaagaagcagtgcgatagtatgcaccctttgcaccgagggtgatgatgacatcgttttgggtacgggagaagacggcattggcggcagcgtcaatgccgtcttcttttgtgaaagaaagcgcttcattctcgttgagatgcatcaccggatgcagcgcatagatgcgtgacatcagcttcggatcaattttggaaatgcgcgggccgggaccaaagtagattcggaattccggatgcgcttcaaggtattcaacgatgtgtacaccggtcggttcttcgatctcaaggccacagatgtagacagcgtcaatgtccgtggcgtccgggatctgaaaccattcccgctcaaaccgatactccgcgccatgataagagagaaaggtgcgctcaccatccgcctcgataaaacagtagcagcaaccattttcctgtgcgggagcaggaatcggagtggcaacacc

SEQ ID NO: 1662 - DNA, 1581 bp, Unknown
  16S sequences of unknown bacteria
atttcggcaatcaaatcttatggcaatcatccctgatgccatattcggtatcatcgagccgatagaatatgtcgctgaattcggaacttatgcttccaagctcttctgtgtatgaagctatatcagaaagcgccttctgtatttccgacataatatccattgctgcgggcataccttctttaccggcttcataggcttttgccagctgcttataaatattttcactgttttggagcagggtgatgcgttcttcaagttctgcatcttcaccttcagtgagctttgcttcttttatttcatttaattcaaacactataaaatcacgctgacgtgcattctcagcagcgcttgacagcagagattcaagttttgattttgcgtctttgtagtcagaaaaaagcttcgcgttcatctgtttcacaggtgcgatatcgttttggtgatatatgtcaacgagatttatatgatattcaggattgagaagcgactgatggtcgtactgtccgtgaatatcggcaagttttctgcaataagcgttgagctgcgcgagcgttacaagctctccgtttaaacggcacaggtttttaccggaagatgagacttcgcgcgtaatcacagtttcttcaccgtctatatcgccggttagctgtactactgctttttcgcagcctgagcgtataaaagttgtatctgcacgagcaccgagcgcgagactcacggcttctatcactattgactttccggcgcctgtttctccggtgagtatattgagaccggagtgaaagtctatttcggtattttcaattatggcaaaatcgcgtatgctaatatggtttatcatatccgaaatacctcttgttactgaattttcattgatcttttatctcgatttgagcatctctttgaatgtttctacgagttttggcaaattttcaggctcatcaacgatgatgataaaggtgttatctcctgcaagtgtgcctacgatatgctcaaattttgtcgtgtcgatggcctctgccgcagcatttgcacaacccgaaagtgtctttactactatgagatttcccgagtacttgatatctgttaccgtttctctgaaaattcttgcaaatctgtcagaaataggagcgtcaagctcttttctctgtgcatatttataatttccggacggagtcagaatcttgatgagacgcaactcctttatatctcttgacacagttgcctgtgtaacgttaaatcctcgttcgttaagcattgaagcgagtttctcctgggtctcgatatcgttttcttctatgagttcgagaataacattgtgtcttgtatagcgcattaaatactccttccgtataaattagaattactaagtttttagaaaatacacataattaattatagtataccacatttccggaaaaaaaggtaatatatttaataaggctgtggacaaacatatgttcatatgttaaaatatataaaaagaaatgagaattctcctttaacagggaggaaaatttttattttaaaggcaggtaaagatgaaaatcttaggcatagatccgggttacgcgatactcg

SEQ ID NO: 1663 - DNA, 2438 bp, Unknown
  16S sequences of unknown bacteria
atttatttcttgtaaattcagcggcggtattgtataatattctgcggtgattataatgacattacagcagattcattatgtaacggtaatagcggaaaccggctcgatgaataaggcggcagaaaagctgtatatcacgcagccgtcgctcacggctaccgttaaagagctggaaagggaactcggaataataatatttcaccgaagcggaaggggagtatcccttacagccgacgggcaggagtttttgacctacgccgggcagctgtatcatcagtatgaggcgcttgccgagaaatacggcccgagcggcacgcttaaaaagaaattcggagtgtctacccagcactattcctttgcggttaaggcgtttgtcgaaacggtaaagaattttgataccgcaaagtatgaatttgcaatccgagagacgaaaaccaaggaagtaattgaggatgttaaaacgctccgcagcgaaataggaataatttacctgagtgatttcaaccgcaactttataaataaaatactgaagacgggcgagcttgaatttcaccgtctcatagactgcggcgttttcgtttacctttggaaaaatcacccgcttgcgaataagtcccgtataaccgcggcggagcttaacgattatccctgcctttcctttgagcagggagcggacagctctttatatcttgccgaggaaatttttgtgggaaacgaatttccgcagaccataaaggcaaacgaccgcgcgacaatgcttaatcttatggtggggcttaacggctttacgctttgctcgggaataatctgcgaggagcttaacggcgatgaataccgcgctgtgccgttttcaaataccgaggagaacaatcagtcgatggagataggctatataacaagaaagaatcagcttctgggtaaaataggaaatatatatatcaagaatataaggcaatacttaatgttataaatttcaagtgagttatagattaaatttataactcactatttttatagggtattggacaaaacgggacttccggtgtataataacatcaacgaaacaaaaaggagctgaaaaccgtgataaaaacaaaatgcggatatgggttaatatcgcgggcaaaaagcgccgcggcaacccgatgtacggatttccgaatgtgaaacttgcaattcatacgcaatacttcatataaaaagaatttgaaaggtagatttaaaatgaaaaaaatatttgcggtattattaacgacagcactattggttacagcctttgcgggctgcggaagcaagaacggcggctctgttaccattgcggtgccgaacgatgcgacaaacgaggctcgcgcacttctcttacttgaatcaaagggttatattaagcttaaggacggtgcaacaattaccgccacggtaaacgatattgccgaaaacccccacaatatcaagttccaggaaattgaggcagcacagcttcccaatgcgcttaaggatgttgattacgcggttatcaactccaactacgcaatcgaggctgaccttaaccccgtaaaggattcgctcgcaattgagggttcatcctccgcttacagcaatattttagcggttaaagagggcaaggaaaagaccgatgcgataaaggcactcaaagccgctcttgaaagcaaagaggttgccgatttcattgccgataagtacaacggctcggttgtaagcgttgttgaaaatcccggcgacggctacgattcatcggtggattacagtaagctttccggcactaaaattacggttgcggcttctcccacaccccatgctgaaatacttgcggtcgctaagaaaatccttgagaaaaagaatataacgcttgacgttaaggaatttaccgattatgttcagccgaacaatgttgttgacagcggcgagatcgacgcaaactatttccagcacctgccttaccttgaaaacttcaataaggaaaacggcacaaaggttgtatcggttgcggctatccacgttgagcctatgggtctttacggcggtaagcagtcaagcctcgacgccattgaaaaataactgataaaatttactgtaacgctgtccgcaaacgcggtcggcgttactgccatataaacggagaaaacaatgattgaaattaaacacctttccaaaaccttcggtgtatcgggcggtacggttgacgcactgaaggatataacgcttacaatacccgacggcgagatttacggcattataggaatgagcggtgcgggcaaaagcacgcttgtgcgctgcattaatatgcttgagcgcccgacctcgggcgaagttctgattgacggcaaaagtatgaccgaattatcgcaaagggagctcagggaaaagcgcagagatattacaatgatatttcagggctttaacctgcttatgcagcggaa

SEQ ID NO: 1664 - DNA, 19481 bp, Unknown
  16S sequences of unknown bacteria
acaaatacaaaatcaaagattttgattgttgacaagaacgttttagcgtctataggttaaaaattgcaaagcaatttttttaatgctataatatccattgacattggcttatcacaggtatatgataagaacaaacgttctttgtcgtggtaataggtatacaataaaaatttatgcatccattttgacgtgacagaatatatcatatttaaaaaataatgtatggagcactatatatgttttttcaaaaagaaaattgtaccaataaaaaattatcattattaaagaaatgtctttgttggtcagctattccgggtgttttatgtgtgatttttatctatatttgttttgcaaaagagaatccgtcaaattggaaggaagcaactttgtattcatactcttattatgtttacgatccaaaaggttctaaagcgaatgccttggttattaccaatagaaatggagaagtattccgctatgacaaacggtatcatgtttcacaacaggtgcttcattattacttgggaaataccagcgagttgtctattctatacagtacatatagaggtactaattttattgaatctatgatatgtgatggaactgttttgattgatatccaagagaatattgattattattacagtgaactaaaatcaactgctgctgtaggtgggatatttggatttcttgcaattattgctgctgtaattcctgtaatactatttataaaaaagaaaaaataggggcaatattaaacttaataacaaacaaaaatgtattcataatgcagaaagcctatttttataggcatatcccaaagtccaccttatgtttttattggtatcctgattactgtttcagtaattttgctgtagtttatgttctgttctgaatcctgagaatgcacatttttgtttatgtgtttctgttgttttgatggaacaaagaccgacaggtgtatctatggtctaatttagttccatggatatctaactaatggatataccgatatttagagcgcatcataacattttgtttgtatttcggggtaatgatactgataatatttcattttttttatgtgttttttcgtataaaggagcttttacatggatcagtttatattaaacagcaaatatacacctgcgggtgatcagccaaaggcaattgacaaattggtacaggggattcaggcaggggatagagagcaaactttgcttggtgttaccggttccggtaaaacatttaccatggcaaatatcatagcgagattaaaccgtccaactttggttttggcgcataataaaacattggcggctcaattatgttcggagtttcgcgaatttttccctaataatgcagtcgaatatttcgtctcctattatgattactatcaacccgaagcgtatattgcgcaaacagatacctatattgaaaaagattctgccattaatgatgaaatagacaagttacggcactctgccacactggccctatctgagagaagagatgttatcattgtagccagtgtatcttgcatctacagtttgggtaacccgattgattaccgtaccatggtgatttcattaagacccggtatgcagaaaaagcgtgacgatttgctccgtaaattagtggagctacagtatgagcgcaacgatgtgaattttattcgcaataagtttcgtgtacgcggtgatgtggtggaaatttttcctgcgcaatcatctgacgctgtcattcgtgtagaattttttggagatgaaattgaccgaatcagcgaaattaatccactgacgggagaattaaaggcagatttaaaacacgctgccatttatcctgcatctcattacattgtaccaagagaaaaactgaataaagccattcatgaactggaagacgaattggcggagcgtgtaaaatattttaaagaaaatgataaattagtagaagcccagcgcatagagcagcgtaccaattatgatatggaaatgctgcaggaaattggtttttgcaaaggcattgaaaactattcccgcgtattggcaggcagaaaagcgggcagcgctccgtatactttgttggattatttcccggacgattatttgatgtttgtggacgagtcccacgtgatgcttccgcaggtacgttccatgtacgccggtgacagggcaagaaagagcaatttaattgattatggattccgtttgccgtctgcctttgataatcgtcctttgaatttcgatgaattttatgagcgtatcaatcaagcggtatttgtcagtgcaacaccgggtgattttgaattggaacattctgcacaagtagtggaacaagttattcgcccgacaggtttggttgaccctgaaatatttgtccgcccgacagatggacaaattgatgatttgatttctgaaattaatatgcgcactgctacgggcaatcgcgtattggtcacaacgcttacaaagaaaatggcggaagatttaacaggttatcttgaaaatgtaggtatacgcgtacgttatatgcatcatgatattgatacagtggaacgtatggaaattatccgcgatttgcgtttgggcgaattcgatgttttaatcggaattaacttgctgagagaaggattggatattccggaggtatcgttggttgccatattggatgctgataaagaaggattccttcgttctgaacgctctttgattcaaaccattggacgtgcagcacgtaacgcggagggtaaagtaattatgtatgcagattgcgttactccgtctatggagaatgccattcgtgaaacagagcgtcgccgtgaacttcaaatcaaatataacgaagagcatgatattgttccaaagacagttacgaaaaaagtagcagagattttggaaatttctactcacaaggaagaaggaaaagaaaagaaaaagaaaaaacttactgcggcagaacgcaagctgatgatagaacaattgacaaaagaaatgaaggcagccgccaagttgcttgaatttgaacacgcagcattcctgcgcgataaaattaaacagttggaaggtcaaaaataaaggaggcaaagctgtgtctatgaaaagcattcaggttaaaggtgcaagagagcacaacctgaaaaatattgatattgaaattccgagagatgaactggttgtcattactggattgtcaggctcgggaaaatcttctttggcgtttgatactatttatgcggaaggacagagaagatatgtagaatctttgtcttcttatgcgcgccagtttttaggtcaaatggaaaagcctgatgtggattatattgatggactgtctcccgctatttccattgaccaaaaaaccacatctaaaaatccgcgttccactgtaggtacagtaacggaaatttatgactatttgcgtttgctgtatgccagaatcggcattccacactgtcctgtctgcggcagagaaatcaaacagcagaccattgaccagattgtggaccatgtgatgacactggaggaacgtaccaaaatacaaatactggctcctgttgtacgaggaagaaaaggcgagcatgtaaaagaatttgaagcggccagaaaagccggatatgtacgcgtgcgagttgacgggatgatttatgatttgtccgaagaaattaaattggagaagaacaaaaaacataccattgaaattgtggtagaccgtcttgtgattcaggaggatatgaagtctcgtcttgcggactctattgaaattgcatcgggacttacaggcggattgattatgataaatgttattgatggggaagatatgatgttttcgcaaaactatgcttgccctgaacatggaatcagcattgaagaattgacgccgcgcatgttttctttcaacaatccgtttggtgcctgcgaaaaatgtacaggccttggcgtgtttatgaaaatagaccctgatttgattttgcccgaccgcaaactttctatcaatcagggtggtttgaaagccagcggttgggctatggaaggcagtactattgcggctatgtacatgaaagctctggcaaagcagtatgattattctttggatacaccgattgctgaccttcccgacgaaattgtagatattttattatacggtaccaaaggagaaaaaattgaaatcgaacgtaccaatgaatacggtacagggaagtataaaacagaatttgaaggtatcattaacaatttggaacgccgtttcagagaaacgcaaagcaactggattaaagaagaaattgaatcctatatgagtgctattccatgcgacaaatgttatggcagacgtttgtctcccgaaagcttgtctgttaccgtcggcggtatcaatatcagcgaattttgcgataagtctatcacggaagcattggaatttgtaaatgatttgaagctaacagaccgtgagatgtttattgcagcctctatcttgaaagaaataaaagaacgtcttggatttttgaaaagcgttggtttagaatatttaacgctgtcacgttcttcgggaacactttccggcggcgaaagtcaacgtatccgtctggctacacaaattggttcctctcttatgggcgtgctgtacattttggacgaaccaagtattggattgcaccaaagagacaatgataaactactgggcacgttgtgtcatctgcgcgatttgggtaataccgttattgtggtagaacacgatgaagataccatgttggctgcggaccacatcatagatattggtcccggagcaggtgtacatggcggaaacgttgtgtttaacggaaaagtagcagatattttaaaatccgaagattctatcacaggtcagtatttgagtgggcgcaggaaagtggaagtgcctgaaaagcgtcgtaaaggcaatggaaaaaaactgaaaattattggtgcggctcaaaacaatttaaagaatatcaatgtggatattcctttgggagaactggtatgcgtcacaggtgtatcgggttcgggaaaatcgtctttaatcaatgaaattttatataaatatttggcttcccatttgaatggtgcaaaaacaaaacctggtaaatttaaggatatcaaaggcgtggaggaacttgataaagtcattcaaatcaatcagtctccaatcggaagaacaccgcgttccaatcctgcgacatatacaggactattcacggacattcgtgaattgtacgcctccacgcaagatgccaagattcgcggttttaatgcaggcagattttcgtttaatgtcaaaggcggacgatgcgaagcctgtcaaggcgatggtatcttaaagattgaaatgcactttttacctgacatttatgtgccttgcgatgtatgtaaaggtaaacggtacaatcgtgagacattggaaattagatataaagggaaaagcatctctgatgtattggacatgacagtagaagaaggcttggaattcttttctaatattccaaaaattcaacgaaaattgcaaaccttgcaggaagtaggtttgggatatattaaaatcggccagccttccacaacgctttccggcggtgaagcacagcgcgtgaaattagctacggaattgtccaaacgttccacgggtcgtaccatttatattttggacgagccaacgacaggattgcatattgctgatgttcatatgttaattaatgttcttcaaaaattagtggattcaggaaatactgttgttgttattgagcataacttagacttgattaaaacagcagaccatattattgacattggtcctgaaggcggtaataacggcggcaccattgtagcacagggaacacctgaaaaaataacaacagtggaagcgtcttacacaggacagtatttgaagaaatatttacaatagtaaaaaataaaaaggaaagtttgctgtaaactttcctttttattttacagtctatgttctgtttttgtcggtctgccatgtacgaaataaacatatatccacacggaattctttgtattgcagccattgtatattatctccatgttagatttttatttattttaatatcgtttagcaaacatcatagtttcatttgtactatatgcattctatatgaaaaaagcgattttatctatgaaaagcacgctttctgcaagaaaatttacatattgttaattaaatgggtcacaagaatatagtagaataaattgtatattataacataaggatggttttgtacttgtttggttatatcagaccgaaaataccggaattaaaagtacgtgaatatgaccagtataaaggcatttactgttcgttgtgcaagcgcatgggaaaagaatacggaattgcttctcgttttgctttgagttatgacagcacctttttggtgcttatgatgttaggattggaagacgagtgtacaccgtttcaacccgggaaatgtgtatttaatcctttgaaaaaatgcaattactgtaccagcggtcaagtaaattttgagtttgcatcagcgcttaccgtaatgatgacttaccaaaaaattcgtgatgatattgaagattcgggttttggtggcaaattaaaagcgtatttggtactgcctttggttgccggtgccaataagaaagcagccaaaaaatatcctgaactcaagaaaatactggatgagaccatagcaacgcagtcacaggtggaaaaagaggaaaatccttgtctggatgcctgtgccgagcctacggcacaaatgctggcgcgaacgtttgctatgattcgtccgacggatgaaagattaacacgcgtattacaaaactttggttattttctgggaaaatgggtatataccgttgatgcagcagacgatattgaaaaggatatcaaagaaaatgcatttaatccttttattataaagtttggtttatcaaaagaaagtacacaggaagagataaaacaagtaaaaacctattgcaatgaatcgttaaatgcggtattatcacaagtggtcggttcgtatcatttaatggagattcatcatttcgaaccgattattcataatattatttttgaaggtttacctcaaatgcaaaaggaattattgttcaaaaaggagaaccatgatgtcggatccatataaagtgttaggcatctctcgtgatgcaaccgatgagcaggtaaaagaagcttatcgtgaaatggcaaaaaaatatcacccggataattatcagggcagcccaattgcagatttggccaacgaaaaaatgaaagaggtcaatgaagcatacgatcaaattatgaatgagcgtaaaaaccgcaaaaacggtggaagttcttcacagggttacagcggcggatataatccaaattacagtaacccaaactccaattttgctgatgttcgtaatttaattatggcaggccgtattgcagatgccgaacaaattttaaatggtgtacctacagacagcagaaatgcagaatggtactttttaaaaggaacggttctttataaacgtggttggatggaagaagcatataatcactttgcaaaagcatgcgatatggatccgtccaatcctgaatattcggcagcttataaccaaattaaaaatcaacgtacaggtgcttacggaggatataatccgggcgcaccgcgtcaaggcggatgcagcggttgtgacgtttgcagcggtttgctgtgtgctgactgttgttgcgaatgttttggcggcgacttcatccgttgctgctgatgaaagcataggaggatgcaagagtgaatcatacaatacgggttgcattttgcggtgtattggcaggtttggggcttgcgcttatgtttttaaccgcattgcttcctatggcaacgtttgcactgccggctttggcgggtttgctgatgattatgattgtcattgaaatgggagcaagatgggcttggcccacatttgctgtggttgctattttgtccgtattttttgttccggacaaacaagcggctctgctttatgtgatattcttcggttattatcccattttgaaagcgttaattgaacgtttaaaaaataaaattgtacaatgggtactgaaatatgccgtgtttaatgcggcgattgtatccgcatattttattgcaatttatttattaagcattcctgcagatagtttaagcttattcggagtatcattgccgtgggtattttggattgcaggaaatgttatattttttatttatgatattgcaattaccggtgtggttgcattttatattaagcaattacataaggtatttcgtaagtggtttcaaaataaaaattaatgtaacagccgtctgaacttcagacggctgtttttatggtaacgattctgctgatttttgcaagaagattggaaacagactgcaaaaatcagaaattttgtgataatttcccttgatttttgcaggataacccattaaactgaatatatagcttataacctgtacgatgatgtctcctgcctctggggtagatgccattcatggttttagtgagagattacaactcccgctgaaactatgaggagttaacgctcccatcagaattgcaatcgttcccaaactccatttcaggcagtttgatgggagcgttgctccaatttaaattttttgatttgattttagttgttatgatttacaaatatggtaatctataataactgttgttattttagggagaagaaatgaattatcagcttacagccagaattcagcgtaaaatgcctgagttctcaaaaggacaacgtttaattgcaaactacatagaagagcattatgatgaagttgcttttatgacggctgccaaattaggtgcaaccgtaggcgtcagtgaatctacggtggtgcgttttgcaacggaaatcggttatgcgggatatccggaactgcagcgtgccatgcaggaaatgattcgcagccgcatgacttctgtacagcgtttggaaatgacggagaaatcctgtcccagcgaccaaattttaagcgctgtgttaaacagagatattgatattatccgcagaaccattgaagaaacttctcacgaaatgttttatgaggcggtagacgcaattgtctctgccaaaaagatttatattattggagtaagaagttcgcatgcgcttgcttcctttatgtcttattatttcaatctggtatttgaaaatgtgcagatggtcaatgccaccagcgaagcggaaatatttgagcaaatgattcatgtggatgaacatgacgctgttattggaatcagttttccccgttattccaaaagagcggtcaaggcgctgaaatttgcttccagccgcggtgcaaaggtagtggcgattacggacagtgtattgtcgccattggcagaccctgcggaatttctgttattggctcgcagtgaaatggcatcgtttgtagattctttggtggcaccgctcagtttaattaatgcattaattgtagcaagcgctatcaagaagaaagatgaagtaaaagacgtatttcattctttggaaaccatttgggatgaatacggtgtttatgaaaaggtggatgaaaaaccaggtgaatcagtttgatgtcattatcgtgggaggcggtgctgcaggaatgatggcggcaggtactgccgcacaaaacgggctgcatacgctgttattggaaaagaacagccgtcttggaagaaaactgcgtataacgggtaagggaagatgcaacattgtcaacaattgtgatgttccaacagccattgcatccattccttctaacggacgctttttatacagcgctgtttctcagtttacacctcaggacgctattgttttttttgaaaacttaggtgttcccataaaaacggagcgaggcaatcgtgtgtttcctcagtctgaccttgcctctgatgtagtagatgccttaaaaagctattgcacacaaaatggagtgcagattcggcaggcagtggtaactgatttgcgcatacaagagcaaacggttacaggagtgcggtgtgaggacggaacagagtatttcagcaagcatgttgtcattgcctgcggcggaatgtcatatccggctaccggctcaacaggggatgggtatcgtcttgcacagcaggcagggcataccataacagaactgcgtccgtcgttggtatctcttgttgcaaacggaaaagattgccctgcattgcaggggttatctttgaagaatgtcgcgattcacgtaatagatacaaaacagaaaaaagaaatttatgacgatttcggcgagatgatgtttacccattacggagtgacaggccctatgattttaagcgcaagcagtcatatgcgaaatatggagccaaatcggtatcaaatctctattgatttaaagcccgcactctctttggagcaattggatacaagattgcaaaaagattttgcagaaaatcaaaacaaagattttatcaattctttgggggcattattgcctcggaaattaattccgattatggttgcaaaatcggggattgcgccaaatcaaaaatgcaatcaaatcacaaaagagcagagacgccgctttgcacaggaattaaaaggattcaacgtgatgataaaaggctttcgccccattgatgaagcaatcattacttcaggcggtgtatctgtcaaagagatttctcctaagactatggaatctaaattggtaaagggactttactttgcaggagaagtcattgatgcagatgcctatacaggcggatttaatttacaaattgcattttctaccgggtatttggctgcaacagccattgctcaggcacaatgggaaatatagaaaggtgtgttaaaaccatgatagcagttgccattgacggtcctgccggagcaggaaaaagcagtattgcacggaaagtggccgaagaaatcggttttatttatgttgatacgggtgcgttatatcgttctattggactgcatatgctcaagaaaaatatttttcccggtgatgagcaggcagttccaagagagttagaacatgttgacattgcactggagtttaaagacggagaacagagagtgattttatgcggagaagacgttagcgatttaattcgaacgtctgaagtgtccaaggcgtcttctcaggtatctgctatacctgctgtccgtgaatttttattggaacttcagaagaacatggccaaaacccataatgtgattatggacggtcgtgacatcggaacggttgtacttcccgatgcacaggtaaaggtatttttaacggcgtctgcggaagaacgagcaaaacggcgtcataaagagatgctggaaaagggaaatgaagcggatttgtctgctatcttagaagaaatcaaggagagagacgagcgcgatgccaaccgtgaaattgctcctttggttcctgccaaagatgcggtgtttgtcgatacaaccggaatgaccatgcaggaagtcatagacaaattaaaagaactcattgcggctggggcggtgcaatagcaggattttctgttcgaatcggcataaatatcgcaaatgttccatataaaaggaacaaaaatgaaagtttttgattatttaccggcaatgcgttgcaaactactgataggcgttgttggagaacggtggtacacatatgaaaaacagtccattttataatttcagtaaaattgtgggaggccctcctttttcctttttttatcctcacacctcaaatcatcgtgaacggattcccaaagaaggaaaagtgattatttgcagcaaccatatctcactgaaggaccctccgatgctagcgttggataccaaacgtcaaattttttatatggcaaaatcagaattgtttgaaaataaatttgtgggctcacttatcacagcattgggtgcattttctgttgaccgcggtgttggagactccaacgcactggacagatgcggtgaaattttggaacaagacggtgcggttggtatctttattgaaggtacgcgttctttagacggcaaattgggaaagccgaaatcaggagctgttatgcttgcgcatcagcatcaagcgcctattttgcctgtttgcatgacaaccaaaacaggcgtggcagcaaagccgtttcacaaaaccataatttcttatggtgaattaattcagccggacgaacttggcattgtggaaggtaccggctccgaatacagaaaagcaagccgtatggtaatgcagcgcattgcagaaatgcgggagcgtgatgagaaggccttttaaacagaaaggtgatacgttatgacgctttattccatgcttcacacaatggtttctcccattacaaaagggatgtatcgtatgcgcgtgattggtgcggaacatattcctgctgcaggaaaaatgattttgtgcagtaatcacaggtctgttatggatcctattttgttgggggtcagtgtgaaaaaacgacccatacgatatatggcgaaagaagaattgtttgtaaagcatggaaaagcggtgaaccgttttttgcgtactctgggcgcgtttcccgtgaaaagaggaagcggcgatacaaaagcgattgagcaggcaattgaaattttggaacaaggcggtttgctcgggatttttcctcagggaggcattgttgctcacggcattccgtttcagccaaaatcgggaattgctatgattgcatatcacgccaaagcgcctgttttacctgtcggcattgatacaaacggcgatatcaaagcatggaaacctgtaaccatccgttttggaaaaccgattgcatacgaggaattcggttttacggacggaagccgtaaagaaatgaaatatgccgctcacataattgcggagcgagtaaatcagttattggaggcgaaagaatgagtattgaagtagcaaaatccgcaggattttgttttggcgtagacagggctgttcaaatggtttatcaactactggacgaaggaaaaaaagtatatactctaggtcctattattcacaatccgcaaatgattgcagaattggaagcacgtggtgtagagattattgaaactgtagagcatgccccaaaagacggaaccatagtgattcgtgctcatggtgtgcctcagggaacaatggacagcattgcgcgtcagcatgcggtttgttccgatgcaacgtgtccgtttgtaacaaaaattcacaaaatagtggaaaaagaatctgccaaaggacaaaccattattatcataggagatgccaagcatcctgaaattataggaatacatggacattgcagcagcaaatgttatattgtaaacagtgcgcaggagctgcaaaatttgtcagaatccgagccaaatttggtcaatcagccgattagtgtggtagttcaaaccacttttcatgtaatagaatggaaaaattgtttgaaaatcctcaaaagggtatatacaaatgccacaatttttgatacaatatgtaatgcgactgcaaaacgtcagtcagaagctgttgaattggcgaaaaaatctgacttgatgattattatagggggaaagcacagttccaatactgccaaactctatgatgtatgcaaacctcattgtgttacatatttaattgaaacggcacaggagcttccggtagcacaagtgaaggctgcaaaaaatgtaggaattactgcaggtgcctcaacacctgcaagtatcataaaggaggtacttgttaccatgacagatattaaagctggcgagggccattttgaggagaacaccgaacttagctttgcagagatgttagaggaatctctaaaaagtttaaatacagacgaaaaggtacgcggcgtagttgtcggtatagctccaaacgaaattcaggttgatgtaggcagaaagcaagcaggttttgtacctgcaagtgaattgtcttccgacccaaatgcaaaaccggaggacattgtaaaaatcggcgatgaaattgaattgctgattatgcgtacaaatgaccaggaaggtaccattatgctttccaaaaaacgtttggatgcaattaaaggctgggacgttgttgcaaaagcagaggaagacggcactgttttaacaggtgtggttacagaagtaatcaaaggcggtgtaattgcagttaccaacggtgtaagagtatttattcctgcttcccaggcaactgctacacgtggtgaaccactggagaacttgttgaaaaaagaggttaacttccgcattattgaagtaaaccgttctcgtcgccgtgctgttggttctatccgtgcagtactgaaagacgaaagaaaagagttggcagataaattctgggaaactgccgaagaaggcaaagagtataaaggtgttgtaaaatctttgactgcttacggtgcatttgttgacttgggcggtattgatggtatgattcatatttccgaactatcttggaacagaatcaaacatccgtctgaagttgtaaacgtaggtgatgaagtcactgtttacatcaaaagcttagaccgtgaaaaaggcaaagtatctttgggctacaaacgcgcggaagacaatccatgggaaattctgaaaaatgattatcctgttggtactgttgtagatactaccattgttggcatgacagcattcggtgcttttgcaagaattcttcctggtattgacggtttgattcatatttctcaaattgcaaacgaaagaattgagaaacctcaagatgtattgaaggttgaccaagttgtaaaagcaaaaattacagaaattgattttgataaaaaacgtgtaagtttgtctatcaaagcattgttagagccggttgctcaggaaaacaatgaagaaatagaacaagctgaataagatttaattttttatcatagaaagcacaggaaagaaatgccccgtgctgataaggcagtaaaaagtagagaagatggtgtaacccgcaaaaaaatcgggttacaccgttttctttttatgcggtgagctgttttggaagctgtgatgtgctgcgtatctgttccatcatttcccggatctcctgctcgtcaggaaggctcaccaatcctaccgccgtgaaatagatgtctaccttcaccgattttcgggcgtgtttcttttccggattgtgcacctcaatgcgccggatcagcttgtttacgatcgtcggcatcagttctttcatgtcggtaaattctcgcagcccctgtaaaagcaggcgcatatccaccgatttctgctccatttcagatagctgcttttcttcctctttgaccttttccagcagctctttctgctcggattcatactccgccgccattctcgcatagcgttcatccgacagcttcccgatcacattgtcctcataaatccggttgaacagcttgtccagatcggcgatccgctttctgctgctttccatggaaagcttcaattcatgctgccgtttttttctgaaactctccgcatttctgcttctgcatatagaggaataccgactcatagcagcgcacaaaatctgccaaacccgcaaccgcttccttcacgaccatttccaagactacatcccggataaaatgaatcgtgcagtttcctctgccgtccttgtagttggcacagcggaaaaattcctgattgcgcttgagcgatttggcggcacagaagtgcagctttgatttgcagtccgcacagaataccagccctgaaaacaggcttttccgatttgtttttgtaggtctgcgcttgttctttctgagttcctgcaccctcagccatacattctcgtcaatgattgcctcctgcgtgttgggaacaatctggtattcctctttcggattctcgatcaccttatgcaccttgtagctgaccgtcgtggatttcccgtttaccgtgcagcccgtatactgccggttgtccagaatatactctactgtgctttcacgccagccgtagatatttgccggaacgggattgctcgtctttcttcctacagaatgaaagtaggcggtagggacaaggattttctcccgttccagctgctttgcaatctgcgtcgggccttttccggcaaggcagagagcgaatatccttcggacaacttgcgccgcaggctcgtcaatataccactgttctttatcgccttcaatctttttgtagccgtaggcgacagcagaagcaacccgcctgccctgagaggctttcagctcattgaccgcacggattttcttggaagtctgcgccgcataccactcgttaaagatgctgtaaaagggcagcatttccattccctcaccggtcgtggaattgatgttttcctgtatggcaataaaggtaatgccgagagacggatagactacctgcgtcagcctgcccatctcgacctgctcacggccaaagcgggaaacatcctttacgatgatcgtcccgacctctccgttctccgccattctctgcatccgctgaaaatccggcctttgaaaggttgtcccggaaatgccgtcgtctacaaagaaaaccgggtgcagatacccatactttttagcgtagtccagtaaaatctgtttttgattggtaatggagttcgactccatgtctttcttgtcatcgtccaccgataaacggcagtaaagggcggtgatcttttctttttcctgcccgtttgatttgttttgcgttgtcattaattctttgatctcctttctgacaaccgggcattgcagggtaatgccagtataccgtgcagtgcccgcattgtcgaatgtgcagggttaaatgttttgcagctccagaagcaagtcccggaactgctttaggacggtttctttgccctctgtatcaaaatgggtggtcacctcatagaccgtaccgccgatctgcatggaaaaggaatcgttgtccggcgaatagaagtagggaacgaaacttcccaaaggaattattttatcgtccatttaccgttcctcccttgcgtttcgttctctctgccgctgccatttttccaacagtttcagaatggtattctgcatatccttgcccgtatatgacgaaaggcatttccgaatattcccaaaagggcaccttaacataatctaagagagacgataaaaaagactcagtatagagcataaataggctctgtaccgggtcttttttgatttatataaggtgtaaaaatggcgtgttttcggcgattttaaggaatgcacttggctcgtaagggactcagaagaagctacggggaacggtttccacggccattaaaggtgtggcggggatgttacgggagtttgcccttttggggatattgggggttgcccggtgacagtatagcttttgggaaaatacttctgtatctcctctttgggaaagcggatctgctccttctggttggctttttcctcgctcatcacggcaaagatgacatcagaattaagtctgccctgacgggaaaagtcacgaagcctctgtgcctgtgaaagggacggcgtagcgtccgcatattcgatttcgttcagaagcaaatgctgttcctgttccgtcaaatacgacaattccaccgcaggcgtgagggcgatcctgccatcgtccaccatctcaagcagttcggaaattaagtaagttaaacggatatatcggtgcaaggtgtctttaccaatgccgaaactttgagcgatgacatcatcgtttctcatccttgtcgcaggttgcgacaaagtcttttctgatttttttgccgcttcccatttcattttgtaggcgaatgcacgctcacttggcaatatattttcccggtgtaggttgacatctaccatcgtggaaactgcctgctcatcggtcagatttcggacgataacaggtatcttttccataccgagttctttgcaaatctccaaacgcctgtgtcctgatacgacctcgtattcactttccgaaagaggacggacgatcagcggctcgatggcgccctgcgttttgatactctgtagaagctgttccttttcttctccgtcccgcagcttgaacgggtgattttgaaaaggaacaagggtttttaaatctaagtattcaatcgtttcttcttctttcatatgttatgaaacctccattgtttttcttctttttcaagtagatgatgctcggcttgccctgtccctgccgcttgcggataatcaggtctgcctgctctaattccgagaacaatctgcatatcttttcgtgcccgaagcgcagtttttcctgcgcctctttgacagtaaagaactggtagacacgcccacacttgtccgtccagccgtttttggcggaaaggtgcatccggtcgagcagcaggccgtagagcatttttgcgtcggtggaaaccggcttgtatttttcttctgtgaataaagccttggggactttgtaaaacacatagctttccgcttcggatagtttaaaatatggattcagatcatcaccttctttctgtcacggttttaaaccgtgattttgtatgttcgggtattacggtattccttatggcattttcacttggaaaaagccttgatttctgcggctttgtggattccaaaagcgtgacaccgataccgtttttctgcttgtcacaagtagcacaaaacttttcaatcaaagccttgccctatcggagcgagcagactgtttgtactcctaccgtcgcaaaacagtatcactcgtcagggctgcaccctgaaacccgcttaaaactgcactgcccgtttcctgcgctggcgctcggtagctttcttccgcttctgaatggcggcacagtccggacagtagcgctggttctttgcctttggtacgaagtacgacttacagatttggcactgttttttgcttgtcggctgcatgatctcggcaaacagttccctatctgcgggaaggactgcgtttttaaaatagttgcagtagatttcgtaccgactgatgcactgcacgcagctatgttcctcgccgtcgtccagcagaagacaattgccgtctacatagttgcagcaaagctttttgatgagggcgttgatccgctttgattgctttggcgtgatttttatgaccatgattttcacctcctcacgatttgatgatccattgatttacagagcctgctgttttctgtgaatgctgttcctgccccggaatctcaccgcagcgttgctttgctcgctcctgtgaggtcgtggcaaagtcatatctcattcggatcgttattcaattttcaaggtacaacgaaaaggtctttcacttattcccaccggggaagggcaagtggcaagtctaaatgggaaaatatttgagaatttgaaaatccctctcacttatttgcacaaggggtatccaaatgcacacccgtttccgggctttctccgaaaaattttttgaaaaatttatctcttcacctattcccactggcagaggtcaaatgcaacccctaa

SEQ ID NO: 1665 - DNA, 13938 bp, Unknown
  16S sequences of unknown bacteria
caaaaatgcccgtcctttcacgcatcttggaatcatcgatcgtttcgccctcccgtaatcgccttcaaaaaacaagcgcggcgatgtccgtttttcagtccccgaacagcccgcaggagagatatctgtcgcccgtatcgggcaggagcgcgacgatcgttttgccctcgctttcgggtcgggaagcgacgcgcacagccgcgcagagcgccgcgcccgacgaaattcccgccaaaagcccttcctttttcgccagcagacgggaaaaggcataagcgtcctcgtccgttaccgtcgccgcctcgtcgtaaattttcgtatccagtatttcgggcacgaagcccgcgccgattccctgtattttgtgcgcgcccgctcttccttcgctcaatacgggcgaggaagcgggttccactgccacaatgcgcaccgccgatttcttttctttgaggaatctgccgacgcccgttatggtgccgcccgtaccgacgcccgccacgaacacgtccacctccccgtccgtatcctcccagatctcaggacccgtgttcttgtagtgcgcggcgggattggcgggattgacgaactgcccgcagatcagactgtttgcgatttctttgtgcagttcctccgctttggcgatagcgcccttcatgccggcactcccttccgtcaaaacgagccgcgccccgaacgcggcgatcgtctgcctgcgttccaaactcatggtttcgggcataacgatgatcattttataccctttcgccgcggcaagcgccgccagccctatccccgtgttgccgctcgtcggctcgatgagcgtcgtatccgcgttcaattttccgctttcctccgccgcgcgcagaatctccgccgccactctgtccttcaccgatcccacgggattcatagactccacctttacaaagagcttcgcccgcagtccgtattcccgctcgacgtttttcaggcgcaccaggggcgtacgccccaccgcctccgcaattgattcaaaacgcattccctattctcccgaccaatttttaggcgatttctatccgcgcctatttctattatagtttcgccgcgcgtttttgtcaactatttcctattaaataaataggatttattttattcaaggatattggacgtaataaagtccacgcccataccgatgagtttttccgcgtcttcgggagtatctatcgtccaacaatttactttcagtcccgcttcgtgcaggcgggaaacgtattctttgctgacgcaaagcccgcagaggtcggcgtcgaaacgatattttttcatgaatcggaaattttcttccgtagcctcgcccgtgaggaactgaatggaggcgtcgggataaaggcctcgcaaagcgacgaggttttccccgcaaaaagagatgaatttcgtcttattcagccaccccatgtctttgatgatcgccgcgattgccgcgatgtgcctttcttccatcccgtttttaagttcgaggaccgccaccttatcatatttgcggcagatagcgatataatcttcgagcgcgggcaaaaacaggtcgctacggtaggtaacgccgtccgtgtcgggcaggcgcaccgcgcgaaggtccgcaaaattgctcttttccacgttcacgtccatgcccgcgatgcgctttaaatcgtcgtcgtgacaaatgatgtatttgccgtcggcggtgacgtgtacgtccgtttcgatgccgtaatagctcttgacggcagccgctaaaaacgcgggacaggtgttttccttttccaagcccgaaacgcctcggtgcgcgatcatcagacagttttttttgtcgattttgatagtattcatagcaatatctccccttgctttttccttcttctgcaatattttatcactctttgccgcgaatgtcaatcgccgcggaaaaattcctttcccgaaaaaatttccttgcgctttttggtcttctgcaaagccttcgctcgataaaatccgctttcgcgctctcgcaaaaaaggggttttaactttttcgttatgccctgtcggtttcctcctttgaagcgcacccgtccccgttctcttttttctgcccgtcgctttccgtccccgtgatttgccgccagtcaaaaagtcaccttctttttcttctccgccccgttcccgaatccccgcccctcttttactcgcctcaaactctttgagataaaaaaacgccccgcaaaaaacgcggggcgtccgattttaaatggtaaattgtgcttttcctttacgcgcggaataggcgaagcttccagaactttataaaagtcgtccttcgtcgaacagcgttctcccgcgcactcaaagccccgaaaaagtttttcgcaaaaaaggcttttttccctttttgcgccgcggcggatacctacgtatttcgactgccgcaaggcagggaaaaacaaacgcggcgatttgtctcggaaacaaagcgggggggggggaaaaaacgaagcgcgaaaccgaatagccgctcacttcccgatcagtccgttgacgcccgaaaacacgaggacgctgacctctttggaaaattccgcaatcggctgttcccgccccgaattaaaccagctttggtaggcggacaacattcccgacgtaataaagtcggcgatgagttcgatttttttcttatcggcggggagttgttgcgccagcgtctgttttacgcggattttcaacgcggaaacgatttttctgacgagatgggaattggcgtctatcttcatgagctgactgtaaaattccatatctccgttgatgacgtccgtcagcgtttcgaaaattttgttgggattctccaaattgcggggaaaatcgatctcctgtatcaccttttcgaaagaagataccagctcgttctcgatctcgtcgaggatctcatgaatccctccgtaatagttatacaccgtcttgcggttgatgtccgccacgtccgaaatgtccttgatcgtgatgtcgttgagatccttttccgctatcagcgccgcgaaagcgttgcgtatcgcccgcttggtcttgatcactctgcggtcgggcttttttacatccgatgaaacttccgtatgttccataattcctccttggttccccctcgctccgtatccggatttcttaacagagcttattataatatacgcccgcggcataagtcaacaaaaacggtgcgaacgccgcgggattttttatttcccctcaaaggggcagatcctttctcgcgaattttctgctgccgacgatatagcagacgatccccaccgccgcgagtatcccgagcttccacaaaaacgccgtcgtgccttcgagaatggaaaccacgtcgaacagggagatgatggacacgtaattgaaattgttgagcgccttcatccgcacgatggagggcagcacgggcgagccgaacagccccagcatagtggcgacgaggaagaacatagttaacccgccgcccagcgccatcgaatttttgctgcggttaaaccagcaggacgcaaggaagcagatgccgctcatggcgaacatgacgaggaaagcgcctaaattgacgagcaggagcttggcgtaggtgaggtcggtcgtcacgtccacgagcgcgaagcacactatacttgtgatcgacgtgcaacagaacattaaaaacagcgagccgatcaggaaaatcgcctgcgtaaaggtgacggtctttctcttgacggaggaagagaggacatacgccatcgagccgctgtccacctgtccggcgatgagggaattagaggtcatgatgagataaatgatgggcagcagaagccccgccatcttgaaaaagatagagccgacgagaacgccgtacatatccgaggccccgatctcctccaatgcgtccgacacctcggagggaaggctggcaagaaatccctgagaaatatccttggtaagctcctgtgcgatgcttgcgggcgtttcgccctctttgatgttggcaaggcggtattcgtacttggcgcggaattccacgagcgaggaaacggcgatctcctttaccttggaatagtcggcaaacccgaacgcggtatactgttccttcgtcacgccgtaggcttgcagcgcgtcgagagcggattggatattttcttcccgaatcatattccccgcgagaaaaatcaggctgtttcgcgccgcgtactcgtccctgtattcgctccgttccgcctccgagtcggtcatcagggaagcgaggtcgtatctcggcggggtttctcccgcctccgcatagaaggaatcgaactcgtatcctccctcggcggtcatgggattgagcacataaaagataagccccttgatttccaaagcctcggcggaatccgccgccagtcctttgtcggaggcgaccttggcggcatagacctgcaaatcggcggccgcggcggcatacgcctgcgcggaagcggattgggcggcggcggaggcggcttcttcgtccgtcttgcccgctattttcgccagcgcgtacgcctttgcggacggcttgccgaccgccgcgtcggcaacggcgattgcctcctcgtccgtctttccttccgttttcgctttcgtatacgcggcgatataggaggcgatctcttcctccttgggcgcggcggcggcagcctcctctttgaacgcgccgtcaaagtgagcgagcgccgcgtccgaaataagatagtaatgaatggagcgattctgcgtgctggcggtaagctccccttctatgatggaatccatgatgacggttttcgtgcccgaaagattgccgccgcccgcgatcagcatgacgcaggcgagcatgaagcaggtggcaaaggtaatgatcgcccacatggcgccgttcgccttgcaggattgtttgaataacgatttactgaacattttttctcttctccttttctttttgacgctgagtttctttttccagcacttccctgaaatgcttttcgagcgtgtatttgacttccgagatgaatttgacgttgaagctcgtgaggtcgaagaacagccgattgatctgcccgcccgttatcgcgacggtcacttggttgtacataggctgatcgcgcacgatcgtatagcggtatctcttgaatgcgagataatccgcgcggtcggaaaattctatcttaaattccttggtcggacggttttcgatctcccgcattcccacgacgtccaccaaacgcccgttgcggatcatcgccacgcggtcgcaggtcgtttccagctcctcgaacatatgcccgctcataaacaccgtctttccctttttgtgctccgcttcgataatttcgaggaacgcgtcccgcatcagaggatcgagtcccgtcgtcggctcgtcgagaatgatgacggcgggatccgccatcaaagcggcgacgatcgccgtcttctgcttcatgcccttgctcatgcgctttaagggggcgcgcgggtcgagctgtaacttctcgatgagaaaattcgcgtagtccctatttctgacgccgagaaattcaccctggctcttcaaaaacgccgtgcccgtgggcagatcgggaaaagcgatctcgccgggcacatagccgatatttttgacgatttcgctggaatgcgtccacgcttccagaccgttgacgtacaccccgcccgaagtgggcttcaaaaatcccatgacgttgcggatggtagtcgtcttgccgctgccgttcgtgcccacgaatccgaccatttccccttcgtttacggtgagatcgatgtcgaagacgccccgcccttcgccgtaatccttagtcaaacgtttgatttctataatcggtttcatcacagcgctcctttaaagtctttgtcctctttgtagtagctcatgaaatagtcctccaacgtttctttcatatggctgaaattgcgcattccgaagcccgacaggatgcggatgacctcgtttatgtatttgtcctccgtcgaaatgagcacggacgcgctgcgccgatcttccgcgatgacgcgaagcaggcggctgtttttataattggcgagaaaggtgagataagttgcggcgtccgcaaaatacacctcgtaaatcttttgggaagagtgcctcaaatcgtcggcgttgaaatcggacaccagccgcccgtctttgatgatggcgatgcggtcgcacgtggcgtccacttccgaaaaaatatgactggataagaggatagtcttgccacgctccttttctttcttgatgaaatcgacgaagacgtcctgcatgacgggatccaatccgctcgtcggctcgtcgaggataagcacgtccggatcgctcataaacgccgccaccaccgccagttttcgcttgacgccgaggctcatgcgcttggtttccccggaagggtcgagctcgaaaatttttaacagatacgcgaggcgttcctcgttgcggcacttttgcagcgcctgcatcatgcgcagaaactcccagcccgtcagtcccgccggcagcgcgatctcgccgggaatatatcccactcttcccagaatctcgaaatatttttcgaacgtttcccgcccgaaaatttttgtcgaaccgctgtccggcttagaaaaccccatcaggtgccgtatggtagtcgactttcccgccccgttaggaccgagaaatccgaacacctcgcccttgtctacgcgaaaagatacgtcgaagacaccccgccccgagccgtaatctttcgtaagatgttccacgtcaatgacgctcataactgccgtttacctccaagcatgatttttaactcctttttcgataaaataacgtccaaattttcccgacgattgcacccgcccgattgtgaagtaaaggaaataattttgtaaagggtgtgcaataattctcgtttcagagttattctacatttgtgtattataattcgtccgtggcataaagtcaagaatgtcatacggacaaaaaaacgcaaaagtgagtagaaacagactgtctatcgggaatgtagggagttatgccgcagaaatttgcttttttgtggcacaactttttttgttctgcactattctttttaaactctttcaaaaacgcgccgaaagaagatagcgggaaggcttggggaattagaggcgttctcggctttttaaagcggaagttgcgcacgaatttttttgcgactatgccccaaaacgcttttgaatacggaaatctctctgatataatatatttaaccgaaaaagtgtggtattaggaatagcacttttcaagttccgttaccttaataaaaatgttttatcccgccttttcccacaaaaaaatcgacggatctcttttcataagtccgccgattttttaaacgctttttttcattcctatctctgtcctcccgctttccgttattttttatcgtttatcctgcctttttccgtccttttccgtcctccttcccccgccttttcctcaaaccggcttttttcttgtcgtcgattcaaaaacaggtcgccgtcgctttttcttattttccaaagcgactcttgtgaaatccccttctttcaaaaaagcggtactgccctccgcttctccttcaaaagtacaaccgccgcccgccaaattcctttttacgccgcggaaattgcccgcaatccctctttgcaagccactgacttcctcacgcaaaagccgcggcaaggttcgcccgctccgccttcccgaacggcggattctccttgcgccgtctgtttaacgataaatttttccgcgcaccaagcctgcctgaaaacaatttgaaaaaatatttttactatattttgaaaatatgctaaaaaatgcttgcaatttgaaaaaatatatgttattatagaatccgtcatcagtattatttcttagggagttcccgtttgattttgaaatttgaggctgcagtacctcaaatggttgaaatcgaacggggactttccttttatttcactttcggatctcttgggcaaaccgtttttcgaccaaaaacaatcggcgggaacgcaatcgagcccgctcggacgccgtccccttcttttttcagacgtttccgctcgccaaaacgactcccccaaaaggcgcctcgtttattttattgaaaggccgtctttttcccatgcctcaccgtttacaacacacaaaaaaagcgtcggagccttttcccgacgctttgcgcttttattgtgccttgcgacacccgttattcttcggaagccgaatccgtactgtccgaagccgaagaggaggaatcaggaacgctgtccgacgcgctttcgttgtccggaccggaagacggggattgcccctcctccgcttctcccgaattttcggaaacagaagcggactccgaggcggcgccgtcctgcgaatcgtcgtccccgccgccttcgacgtcggcgctgtccttcgcggattccggacaactcgattcgttcgcgccgtcggaaggagcttcgtgccgtgatttaaagagtcctactcccccgaaacgaatcccgacaaaaagaatgaggaaacaggcggcgatctgcgcgattctttttgcgaccctgcgcgaacgtttatgaaaatgctgcgcgggcggctgactttttatctttgcttttctcgccgcgcgctcgtctttacgcctcttcttctcgaccttgggagaggcggaataggcgtccgcttcctcgacgtatttttcatcgagcttgttaaagacggaaaaatttttcttatcgctcatacgcctatcccctccttaaccaatttttctttgagttttttgcgcaggcgaaacagaagggacttcaccttgctttcggaaaatcccatccgctctgcaatgtctttgacggtgtcggaaaaccaatatctccgcacgaaaacaatccgctcctctttttcgaggcgggagagaaattcgttgatgacttccgcggctttatcctccccgtaatcggagccgaagccttccgcgggcagaaactcctccacttccgaaaggagcgtttccacttttccgccgccgcgtttttgcgcgtgcgcgcgcttgtatctgtcaaaggaaatattgcggcacagcgcgcccgcatacgcctttaaggagcgcggtttttcgggcgggatcgtattccagcaggcgagataggcgtccgtcacgcattcttccgcgtccgcgcggctatgtatcacgttcatggaaatcgcatacaaaaagccgccgtatttctcagcggtgacgttcaatgcggtcggattgcgggaaagatacatttccacaatctcttcgtccgtcatccgtacctccttcgtacgcaaacgcaagacttttcgccccgttcacctacatagtagattttttcgactctcgggttacgccttgataaaactttcccaaaaatcgtattcgggcgttcaaggaccgcggacttaaacgcgtcccgcttccccctgaacgcttatttttaagtacgcgccataaaagcggaggagggaaaacttcgcttgaattccctttgtccccccgcttgaaaacggcgcaacacgcctgaaaaaatccttctttgcaggacgtgacagacggcggcagccgcgcgcaccgccctcacaaaagcgttttttacgcggaatcccgttgtgcaagcgttgctcctgaaaaccccctcaatgcggcgaaagggagcgcacgcgatattttttcgccgcggcggaacgccgcaaaaggaaaacgccctttctgcttgcgttaccgcgttcacaccttgcccctttcgggcaactgcggactatctttccccactcggtttagaacgttcccacgcgcccctgcggacaaccgcaagaacggttttctctgctttccttccgaccttccctcgttctccccgcctttgaacacccgccgatttcttcaatcgccttggaatattctttatcgtcctagcctttaaatacccgcgggaacaatttttttcttcgcctcgacgcgattacgccgcgcaaaagtctgttgcctgtttttggcaacgacaaaagtcggaccacgacgaaagcggcttttttcccgccttagcatttttcagatcgcgcaaaaattctttctttgggcaaattttgtgcgatagagcggctcacgtcgattaaacgcgccccctatccgctttgccgcgccttgtcctggaacgaatgcctacccgctgttttgcgtttaggcgaatcatccctaatttcttttccgatttccgaagagcgccagcacccaaagcgcgaaacggaggaagtagagcatggaagtgagcagtcccgccacgtaggtcagcgcggcggcggataacaccttgctcgcgcccggtttttcctcctcggtgaggactccctccgcgagcagcatttttttcgcgcggcgggaagcgtccagctccacgggcagcgtcacgagatgaaagagggtggacagaccgtataaaataatgcccgcgatcgccgcgtaaaacccgacggaagagaaattcagcaaaaggtcgagcagcaatcccaccagcacgagaggcaccgccatacgcgcgccgatgtttaccacggggacgagcgcggagcggatcttatagggaacataccccttttctttctgcatgacgtgcccgatttcgtgcgccgcgacggcgaccgccgccaccgagtcgttgccgtaggtggaatcggacaaattgacgatctgacgtttggggtcgaaatgatcggtgagagtgcccttcaccttgcccacggatatgtcgtaaacgccgtttgcgcgcaagagccgcaccgcggtgtcatatcccgtcatatgcgaagcgtttttctgcgcgctgaacgcattataggaggaatggacgcgcatacttgcccatcccgagaaaatagagcagagcagaagaagtcccaaaaatacaaaataagacatataaggcatgacagcatctcctttttttctttatatagccgaaagttcctttcaaacgtcctcaatccctttgcccgtaaagcatcgagggcaatttttgtcttttgcgctctttcgcggttttctgcgtttttgtgtttttttctttttttatttttgctttcaaccttgcctcatcccttttcacaccaaagagggagagccgttctttcgccgcgttcactccctacggttttcgtcttctttttcggtttttaaaccgtctttcttgcgttctttttccgccgattttttggttttccgtttttcccgacaggaggaacagcccgggcatcccgcgcaatttcccgaacagccgccgcaagaatttttatgttttatcatatagactacggcggcgataaaacatacgccgacgagaacgagcgcgataatgcttggcggattcataacttttctcccttccgacgaaaagtcggcgcaaacggtcgcatggaacgggaacgcagaaaacaacgctgcccgcgagatttaacgggcggggaaacagcggcgttttaaataaagatccctccgacgagggcgacgagaagacagacgagatacgccagcaggcactgtcccacgacaagccccgcggcccagccccggccgagctcccgcttcaccgccgcgatcgccgccacgcagggcgtatacagcaggataaagagcaaaaacacgaatgcggaaaggggagaaaacagcgtcgaaacggacgcgccgccgaggagtacggtgagcgtactcttgacgctctccttcgccgtaaagcccgtgatgagcgccgtcgccgcgcgccaatccccaaaccccaagggtttgaagatcacagacacccaatttcccaccgtcgccaaaaggctcgcggaggagtcggcgacgaaattcaggcgggcgtcgaagctctgtaaaaaccaaatgaccaccgacgccacgaagatgatcgtaaaggcgcgggtgatgaaatcccgcgatttttcccagatgagctgaaatacgcttttgagcgaaggcaaacgataattgggaagttccatgacgaacggcacaggctcccccttgaacgccgtctttttcatcacaaacgccgccaaaagcgccatcgcgatgccgatgacgtaaagtccgatcatcacgaaggccgccgcttttggaaaaaacgccgtgcaaagcattccgtagacggggatcttcgccgaacagctcatgaacggagtgagcatgacggtcatttttctgtccctgtccgagggcagcgtccgcgtcgccataatggcgggcacgctgcatccgaaccccaccagcatgggcacgaaactcctgcccgaaagcccgatcttccgcaagggcttatccatgacgaacgctacccgcgccatgtatcccgtgtcctccaaaatggataaaaagaaaaacaacaccacgatggtgggcagaaaactcaacacgctccccacccccgcgaacacgccgtcgatgattagggaatgcaccacgggattgatgccgtaacgggtaagtcccgcgctcgccttatcggtaagccaaccgattccaagttccatccagtcggagagatattttccgaacagtccgaaggtgagataaaacaccagccccatgatcagcacgaaagcgggcagggcggtatatttccccgtcaggaatttatccaatctttcgctgcgctttctctccctgctctcgcgcggcttcaccaccgtgtccgcgcaaagccctgctatgtaacgaaagcgcatatccgcaagcgccgccatcgcgtccgtgccgctctccgactccatctgcctgatgatgtgccccgacatttccttttcgttttccgaaagccccagggcgtttaaaacgagttcgtccccttccacgagtttcgtcgccgcgaagcggagcggaatacccgccgctttggcgtgatcctcgatgagatgagaaatgccgtgaatacagcggtgcaccgcgccgccgtccgcgccgttcgcagaacaaaagtccacgtcgaagggcatttcccgatacctggcgacatggagagcgtgttcgatcagttcgtctattccctcgtttttcgccgccgaaacgggaacgacgggaatgcccagttccgcttccagcgcgttgacgtctatcgtccctccgccgccgcgcacttcgtccatcatattgagggcgatgaccatggggatatccagcgtgatgagttgaagggtcaaatagagattccgttcgatattcgtcgcgtcgagaatattgatgatggcgtcgggcttttccttcaagagaaactcccgcgtcacgatctcctcccccgtgtacggggaaagagaatagatgccgggcaggtctgtgacgacggcctccttatgcttgcgaatcgttccgtccttcctgtccaccgtcacgcccggaaagttgcccacgtgctgattggcgcccgtcagctgattaaagagggtggtcttgcccgaattctgattgcccgcgagcgcgaatttgaggggcgccccctccgcgatcaccccgcccgccgtccgcttcttcgtttcctcgcccaccccgggatgaggagttcggaaacgggatttcttttccggcgccgttccgtccgcgacggccaagggctcctttacttcctccaccccgatcttcgcggcgtccgcctttcgcagcgtaagttcgtacccgcgcacgctgagttcgacggggtcgcccatgggcgccgtctttacgagtgtcacctccgtacccggcgtcagccccatatccaggatgtgttttctgagggaaatttcgccgccgtccaccgacgtgatgcaggcgctcttccctatcggcaatttatccaatgtcataattttctctattttcgagcgttaaaatttctatccgatacgtccgcacgactcgcc

SEQ ID NO: 1666 - DNA, 9698 bp, Unknown
  16S sequences of unknown bacteria
agatgtgtataagagacagggtacacactctgaaacaccatcgagatgttcttcatcaggctgtccagtttgaaatcccgtacatccgtaccgcctatggtaatcttccctgcgttcacatcccaaaagcgggcaatcaagttgcacatcgttgtcttaccagccccggaagggcctacaatggccgtagtcgttttttcagggatagaaaaactaacatggtctaaaatctttcgagttgaataggaaaaatccacattatcaaagacgatatttgtattccttggcgtaatatctgtacccttttcgtccatgactggcgtattatccacagaatttgcggtatcaatcgaagatgccagcatctgcaacatcgtaatctgactaccagcactttcgagattgttgaacacagtgaaggacagaacaacaaaaaggatgccatacacaaaagaaaatgcgttgatcgtataaagataaatggacagtatcagtaaaatcgtgctgaaaatccgcactaaaagctgttgcagtgcaatgtaaggagctactgcataaaccagcttcaaatttcctttattgctatcccgaatagcagcagcaatcgattgggaactgtccttttcaaaaccaaaggattttaccacacccatgccttggatgtattccaaaacagcttctactaatccccgctgtgcgctctgccttttttctgctgtggaagtcgattttcgagtagctgcttctgtcaccagcaggtagcagacaaccccaaccagagcgacaagtccaagctgccaattaaaaagaagcaggaacagaataagaacaacggagttgaaaaatccgccgatcatgttgaccaatgctacgggtgctgaactttctacatcccctaatgtcgtggttacaatgccggttatcgtgccgatattattcttgttgaagtagcccatcgggatatagcggaggcgatcaccaatcgaaatacgcttatcagctaccatgccatatcctactaccgtctgctcattcatggaaaagaaggaggagaaaatccgtccggcgatggaaagcatcatcatccccagcgacagccatacagaagtaagactgtggttatccgaagccaaagcgtctacaatgaagtagagcgcgccaaactgaaatgacgcaaaaataccgttaagaaaggaaaagaacaatgattttttcaaaagccctttccgattgcctgcaaatgcaaatattttctttaatgtgccaagcatgaaaccacctccttacgcttcatctcttgcaccaatgtgcgcctgccacatatccttgtaaagcggacaatgagccagtaattgttcatgggtgccttgtgcttcaatatttcctgcattgactaccacaatgttatctgcgcctgtgattgtagaaagcctatgggcaattacaatcagtgtctttccggcagttaatgcagaaattgctttctggacgattgcttcattctctggatcaatgaaagctgttgcctcgtctaaaatcacgatgggagcgtctttcagcatagcgcgggcaatggcaattcgctggcgttcaccgccggaaagctgggaaccgctgctgccgacaatcgtttcataacctttatccagcccacgaatgaagctgtcacagccgcttcggattgctgctttttctacttcttgatcagatgcgccaggttttcccatacggatattttcacggatactgcggttaaacaggtagttgtcctgggatacataggaaatttgttccgaaagctgtgacaacggaacctctgtcagctcatgaccacccaaagtaatgctgccgctggtaacatcccaatatccggcaattagttttgcaatcgtagacttgccggaaccggaaggccccacaaaggcggttatcgttccggggcggatggaaagatttataccatgcaaaacttcctgctgtttatcataagaaaatgatacattcttgagttcaatttccaaatcgtcaaacgcaacaggcccattggcatgatgaagttcttcggcatttaagatgctgtcgatttcctctgtattttttcccagcatagccaaagagccggtgaaagaaaaagcctccatgattggccccacaagtccaagggaaaagataaccgctgccataaaggtcatggtttccaaactgccggaaagccaaagagccataccgcccggaaggacgcttagaagtacggacgggatcactgcattataagaacacatggttttctggctgttagccatccattttatgtagtaatctgcattgccccggacagcatccgcatatttctcataggaacctgcagactggctgaatgctttgactacctcaataccgccgatatactctacaacagcatcggccattttcttgctggcggccattgcacctgcgccttctgtggcatagttccgcataccgatggacataatgaccaacccgataaacagggttgccaaggaaagaagtgccatccgccaatccaaaacgaacaggtatacaatgataaacagcggcaccaacatatttgaagtcatttccggcaggagatgagcaaatggtatttccatcccttctatccggtcaacaatgatgcttttatagtggccggatggggtgtctaaaatcgttcccatcggcacctttgcgagtttttccacaacacgctcccgcagatcccgcagcgtactatatgccgcattatgggaaattactgttgacaggtttgaaaaaagcaccttcccgcaatatccggtcaaagccacaagacatacaggcagatatgcagagaaggcagtttctccagcgaacattttagaaatgacattaactacacaaaaatacggtatcatctggcaggccacaccgagaattgccaggataatactgaaaacaaatttaccgtgatgagccttcccccagctccaaagagtgccgaggggagaaccctttttctgttctttcacaacttatcaacctccttcttcagaaatatcagccgacttcctgcgcccgtccctcagtgattcggataattctatcacagcataaagcaatcagctccgggtcatgggtcgatacaaatatagtctttccttcagccgccagtcttttcaaaagttccgcaacctcacgcatgtggcggtaatccagtccagatgtcggctcatcgaaaagtaatatctgcgcctgtgctgcaatagcagatgcaatcgctacccgctgcttttgtcctcctgacaaagccatcggatgtttttccttgtattcatccaagtcaaggctttctaaaattttttcggctgccttctcatcggggtgttccattgacagaagcacttcggagagaacactatttgtaaatagctgatggtttacatcctgcataaccatatagcaaatctttgtcaactgccgcccatgatatgttctgcctgagacttcgacagtccctatacaggtcttttctaacccgcataagcagcgaagaaaggttgattttccagagccgttatccccaatcactccgacaattttccctttttcaatttgaagatgtggtatccgtaaatcgcagatttcttcatcttctggtgtcagctttttctttacgaaaagatattttcgcggtgtgtaagtgaaatagaaatccgtaaggcacaacagttcatctctgtcaatgcctgttttcagatttctctggtctgcgggattttcatcgcctgactttgaaacattagaaaattgccggatatagcgttcctccaatgtaacaggccgaagttcataagatttcaattccttttcagtaagctgagaaaattcttgccttgtccattcgttgacaatacggcctttttccatataaactgcccggtcaataatatctttcagataccataggcggtgttctgaaatgatgatcgtcttgccttgagacttccacagctgcatagcatcacgcagatcgcggattgccgcccaatccagatttgaggatggttcatccaaaatgatgatgtccggtaagagagccgccaccgatgcacaggcaatcttttgtttttcaccgccagataagtcgaaaaggctgcgtcccaaaagttcatttagatttaactcctggactacctgctttttcctggataaaatttccggctttggcaagccgatattttcaggcccaaagaccacttcgccgtctgtgtctacggaaaagaattggctgcggggattttggaaaacagacccgacaattccggccagattataaagttcctgctgcttgatgtctaatccattcacacaaacatccccggtaagctcgcccttgaaaaaatgggggataagaccattgataagcctcgtcacagttgttttaccacagcctgatgcaccgcacaaaagaatacattctccgtctgtaacagacagattaaaatcacaaagccccgcttggtctaatcctgaataatgaaaggttacattttttatctcaatcatatcatcctacttccactcacactgaaaggtaaatatataaaattgacaacactaaagttactgcaattaccacataatctttgctatgaaacccaatctcacaaacattcgtcctttttaccggtgctccaagacctctggtgactgccgccgctgataactcgtccccgatactgatacaggaaaacagcagaggaactaaacgatattcaatcattttcgttaccttgccgccgccaaaagcaattcctctcatacgcatagcatcacggattgaccggtattcctctgacaatgtaggaaaaaagcgcatcattacggcaatagaaattgcaagtccttgtggcaggcgcatacggttcatagcagccataaattcactgatttttgttgttgaaatgcagtaccagaccataatcatcgttggtgcaaactgcgtaatcatgtagcatagaaacaggatcaacatgcccgctatgcccccgatgttttcctgtgtaatctccataagccatgtagccaaaatgaaaagaacagtaaaccttgcgcctacatggggtttcccttccaggcagaccagaaccacaggaatgtaggtcatgatggcccggacaatataagccgggccatccgttacatcaatcattacaacaacggaaaacaaaatcagcaaaagcagttttgttctcggatcaagatggaagcggatattgaggctttttctatatccattttccatttacacaattcccgccttttcaaagttcttccgtacaacggccttaccaataaacgcaccgattactccgcacacaaagcagagcagaataatgactggatatgtagcgggagttacgagcgtaaacagagtatcggcaaaagaagcatcaaatccgctttcaatcagactttgcttgtaagagtctgctgtgagaatgaggggaagataacttgcactaacccaaagattgaatacgccgcaactgataacggtttttttccaacttttatatttcccggacttggcaatcagatctgcaatcactcctgccgcaatacaaataggtgcgccaagaaagcccatgccaaagataaacaacaggattgcaacaataaccgatgttattgtaagcatcccaaacttttcgatccgcgcatagtagagcatcatcggaatacctgtgacaatcgggatgagaacggcataaccggcgacaacaaacggggatagaaatccgagatacatgataaccatctgcacaacccacaggattgcggtaaagataccaatggtgatgaagtctcttgcctttagtttcttttcattcatgagaatgttctcctaacttttcattgtggttagactttgctaaccacaatgaagtatagcacaccgttcatctgtacttctatccctatatcagcattttagccccatatagcaacgagttttaacttgacaaggaatcaaaataagacgataatagttgtgacgattccatatcgcaagaaatagtagctaaaaaaggggcggtgtaatgggtgaaatattaaatcaaatgcttgaaaactatttggtttcatcaaatgtgcagttgcaaaaagggccggatagcctgtcattcacaatcaattcggcagagggcatcagtaaaacaacccttttcaatattctgccatatatgcacctgattttctttgacattcacgctcgttctttgccgggagaaatcgcagaaaatgctgtgtatcaccctatgcagtttaattattgtgtaggtggccggattgagatgcttttggatgataattcttatatttatctcaaagaaaaagatttttgcatcagcaggcagacctcgcaaagcgaatcttatttccctacgaagtattatcacggtattaccatgtattttgaccctgatttttttacagaagccaactccaatgtggataatctttttaatttgaacttgtcgcaactgtcagaaatctactttgaaaaaaaggatacatacatcgcagaagccagcagtgaaatgggaaaaatccttgagagtttatggcagctctatgaaacaccgtccccttttcacatgaaactttgtgtcttggagttgctacatctactgttagatgcaggaaatgttgtcaaggaaaaaactctaaccttctataccagcgtacaagtggaaattgcgaaaaaggcagagcagatattaaccgctgatttgaaacagcatattcccatgaaacagattgcacaacaattcggcgttagtgaaacaagtttgaaaaattactttcgaggagtatatggaaaaaatgtttccgactatctgcgtgatttacgtatgagcatggcagaaaagttattaactgaaaccacgctatccatatctgaaatcgcttcacaaattggatatacaaaacaagggaagtttgccgaagtattccgtcaacaatttcagatgaaccctctggaatataggcgaactaaaaaaattcaaaagctgtgagattacagattggcaagcaatgcaaacatgtacatgtttgcgattttggcaggttttctacccgccaaaacgcttgttgagggataacccccaagcccccaagatcgtccccttcggtgacggctgcgcgtcctgcggacgctgaaaaattttaagaagcaaaagaaaacctctatacaaatggttcgtccattcacatagaggtttcttatttcccgttcacttggcataggttagtattttcgcaatacttctttatgctcctctgccattagcttttggggctttcttcattcattgttttctaggatatcccagtaagggaaaagacaaacggagcgcatatgcccggttgctatcaacatatcatttcgtttgtccgtaataggcattggcgccgtgctttcggagatagtgcttatccaatagctcctgttgcatggggggcagagagggagataagctgagggaatgccatgccataaatgcgacctcctccaaaaccactgcgttatgcacagcatccatcgggtctttgccccaggcaaaggggccatggctgtataccaagcaagcggggacggccgaagcatccagattagcaaaggtttcaatgatgacattgcctgtctcatgctcgtatgcgccatggatttcctccggcgtcattttgcgagtgcagggaatctcaccgtaaaaataatcagcatgggtggtgcccagggcaggaatgcctcgccccatttgcgcaaaggtagtggcccatcggctgtgggtatgcactacgccgcctaggctgggaaacgcacggtatagagccacatgcgtcggcgtatcgctggaggggttaagcgagccctctatgacattcccatccagatccaccacgaccatatcgcttgcttgcatttcttcatacgaaacgccggaaggcttgatgacaaccaatcccttttcccggtctatccctgaaacattgccccaggtaaaggtgacaaggtcgtactttggcagcaatagattggcttgaagtacctgatccttcaacgattccagcatcgtttttatcctcttttctttgtcacttttggcttaaagcgcctctatggccgctttttcaatggataatcccttggcgtaacggttcatgaacgcatcaaagccttttatatcggtttcatcgggctgcatagtcgtgctttggcatatctggaaaacacgattgctaagataatcctccaatgattcgccagcagtacgctgcatcatataacatgccagcagcgccatcccccagggaccaccttcaccggcagtttccatacaggtaaccggcgtatgcattgcagcggcaacgatgcgctgccccacgccttcggttttgaagagcccgccatggcccgtaatgttttccagcgatacattttcctcgttcatcagaatgtccatgcctgttttcaaggcgccaagagaggtatagagatgtacgcgcataaagtttgccagcgtaaaacggctatcaggacggcgcacaaacagcgggcgcccttctttaaacccagtgacatgctcaccggaaaaataattataagcaagcagcccgccacagtccgggtccccttccagggccttgcgatatagcgtaccgtaaaggtcgttgctgtctggcgtcacgccaaatgcttgcagtgcttggccaaacagagaaacccaggcgtttaagtctgaggtacagttgttacagtgtaccatcgcaaccggcgcaccggagggcgtagtgaccatatcgatttccggatgcacctgccggagcggatgatccaaaacagccatggcgaaaatactggtgccggcactgacattgccggttcggatacggacgcagttggtcgcagccatcccggtgcccgcgtcgccttccggcgggcagaagggaatgccggcttgaagggttccggcaggatcgagtagccgtgccccttcctctgtcaaggtaccggcaggctcgcctgcagagagcacagaaggcagaatatctgccaatttccaggaatagcggcgatcttgtatcgtttcatcaaattttctgagcatttcggcgtggtactcgcccgtttgcgaatcgatggggaacataccgctggcttccccaacaccaacgactttttgcccggtgagcttccaatgcacacatcctgccagcgtagttaagtaagcaatgcggggcagatgcgcttcttcgttcaaaatggcctgatacaagtgcgcaatgctccagcgctgcgggatgttgaaagcaaatagatcggtcaaagctgcggcggcctggcctgtgatggtattgcgccatgtacggaaaggaacgagcagctccccattttcatcaaacggcatatagccatgcatcatcgccgaaacgcccattgcgccgattttagttaagggaacgccgtacaaacgttctacgtcttttgtaagatcggcatagcaggcttggagcccatcccagatttcctgatagtgataggtccaaatgccatcctccagacggttttcccagtcaaagctgccggaagcaagcggcgtgtgctgcttctgtctcttatacacatc

SEQ ID NO: 1667 - DNA, 3593 bp, Unknown
  16S sequences of unknown bacteria
agcagcccctcaccgcagtgagatataattaatctgaaagggcgaagctctttctactctcttctcacttaggatttaagtgaaacttcatccggggaagtctcttagaaggcgcaagtcgtctaaggtaaagaaattagcttcgctctttcttcagcttctcgcggagatactgccccgtgtatgacgcagctatctccgctacctcctcaggcgtgcctgtagcaataaccgtgccgccgccgtctcctccctcgggacccatgtcaataatgtagtccgcgcatttgatgaggtcgagattgtgctcgattaccaccaccgtgttcccgccgtccgtgagagcctgcaatatcgctatcagcttctctacgtcggcagagtggagcccggtcgtcggctcgtccaaaatgtataacgtccgtcccgtggcacgtctcgatagctccgtcgcaagcttcaccctctgcgcttcaccgccggagagagtagtcgacgactgccctatcttgatgtacccaagacctacgtcgcataggcatctcagcttcgccgctatcttcggaatgtcgcggaaaaactctgctccctcttccgccgtcatctcgagtacgtccgatatgctcttctccttgtactttacgtccaaagtctcgcggttgtacctctttcccttgcatacgtcgcaggtcacatatacgtccggcagaaagtgcatctctatcttcttcacaccgtcgccttcgcaggcctcgcaccgtccgccctttacgttgaacgagaagcgtccgcttgtgtagcctctcgcctttgccgtgggagttttcgcaaacagcgcgcgtatgtcggagaacagtcccgtgtacgtcgcagggttcgagcggggagttctgccgatgggagactggtcgattgcgataatcttgtcaaggttttccgcgccctctatcctgtcgtactttccggggtaggttatagcacgcatcagctgtttcgcgagagcacggtagagaatcgcgttcacaagggacgactttcccgagccggacacgcccgttacgcaggtgaagcatccgagcgggaactgcaccgtcacgtttttcagattgttttctcgcgctccgactaccgtgaggaagtttccgttgcccgcgcggcgcatcttcggcacttctatccttctcctgcccgagaggaaatcccccgtgacggagcttttgtttgccgcaacctcgtcgggcgtaccgcaggcaacaacctgtcctccgtgaactcccgccgcagggcctatgtcaatgatataatcggcggactgcattgtttcctcgtcgtgctcgactactatgacggagtttccgaggtcgcgcaggcttttcagcgtccgaatcagcttgccgttgtccctctggtgcagacctatagacggctcgtcgaggatgtacaatactccggcaagggatgagccaatctgcgtggcaagcctgattctctgcgcttcaccgccggagagagttgcggattttctcgcgagggtgagatagttaagccccacggcattgaggaagccgagacgggattttaactccttgagtatttctcgagcaaccgtcatttcgctctccgagaaggaaagggcgtttgtgaattcgagcgcgtcggtcacggacatggagcagaactcgtagatattcttgccgccgacagttactccgagcgcgtcatggttcagcttagctccgtggcactccggacagtctcggtcggtgaggaactgctcgtagtactcgtgatcccatgcgttcggctgagcacggttctctatcatgcgcaaaattccctcgaaaacgacagtctgctgctgtgccttgccgccgaaatgtcttactacgttgaattcgtcgggagaaccgtgcaggaaaacgtcgtaagcggctttcgggtagtctttcagcggcatatcgaggttcgcgccgtatttttcgatggcggcaaggattagcgggccgttccagctgtcgtccgtgagcgttttgaagccgtttaccgcgacagcgccctcggaaagagcaagcgacttgtcggggattatcttgtcggggtcaaccgagcggagaactccgagacccgtgcaggtggggcaggctccgaacgggttgttgaacgagaacatacgcggttcaagctcgccgaagctgacgccgtgttccgggcaggcgtagtttgtggagaactcgtactccttagcctcgccctctcgcggaacggtgacaactgtaacggaaccgtcggactcacggacagcgcactcgacggagtctgacagtctgacgcgtatgtcatgcttcataacaaggcggtcgatgacgatttctattgtatggcgcaggtttttgtcaagggggatatcgtctccgaggtcgtagaggataccgtcggcgcggactctggcgtagccgtttttcttggcgttcgcgaggattttttcatgtctgcctttttttccgcggacgatcggagcgagaatcatgaacctctccccctcggggaactccattattttgtcaatgatggtgtcctgcgaggtctggcgaatctccttaccgcagacggggcaatgaggaactccgaggcgtgcatagagcaggcggagatagtcatagatttcggtgacagtgccgacagtcgagcgagggttttttgacgtggttttctggtcgatggagatagcgggggaaagtccctcgatggagtcgacgtcgggcttatccatttgtccgatgaacattcttgcgtaggacgaaagcgactcgacgaatctcctatgaccctcggcatagacggtatcgaaggcaagggaagacttaccggagccggaaagacctgtaatgacgacgagcttatcgcgcgggatatcgacgtcgatatttttgaggttattgacccgcgccccgtgaacggaaatataatttggcaaaggtgtactcctttatgattcgcaaatattttattctgtagtaatactgattttttcttttttctatcaaatttggtttttcctcacttcaagtgagagagataggaagaaaagacttacgtcttttcgatttaattattccactccgcgtggggcgcccttttcagggggaacgcagagaggttcaaacgccacccctctgcgagttccggcttccggtagagtttggcttatatgatttactgccgtctccgcacatttttaccgattagtcgcgcggcaaagcgtaatccgtagtagtggagcttaaaatgtgcgcgcggtgagttttggggcgcgatttagcataagccttagtagtggcattagaatgaccgcgtctgtttatttggtttagatttgtaaaacgtttgttggttctcctacggaagctaaactaaatcggacgttgtctaaatttcaacgcacaaattaacgccaatccgcggttagcctaatccatttcactttgattaggtattctcgactatgcgcgacaaagaaagcaatgatttagactcaatttaccgcgtctcactctcccgcgcgaacattctaatgccactattaaggcttatgc

SEQ ID NO: 1668 - DNA, 11094 bp, Unknown
  16S sequences of unknown bacteria
cctgtgcggactggaacgggcagaatctatacttttgccatcgtttcgtatcaccgatttgctttcttttgattgtgcggtgttgtctataattatttattgtaccacttctcgcagaactccccaatagaaagccccatcttatatgtgatgacccatcgcccgttacgcgcgttcactctccgaaaagtgaattaatcttttcaagatcgctcagcatctttgattcatactgggcatacagcgttgaaggaaagccgcggcataccgtcattgtccttcgaaacataccagcagttcgcgccgtgcagcagcttctcgggtgaaaacgacattttcagctccaacccgtttttcaccgcgtaatggtggaacgcgttcacggtcttcttcgcccactcgaagatcaggtattccgggtggaccagcagttacagtttgttctgtatattcattatgtttctctcatttcgaacatttgccaatatatcttatgctcatatcataccacgaatagctcttattgtcaaggggattataaatcaaaaaaaatatatgatgaagaatgcatagcccggacagtaaaaaccgccaagaagaaaggcataacgcggtgaaggggcggtcgcaaaagcgacagcccctataatttgtaggatctcaatgatcgttccaataatatctaatatcacttttcagcgaacgcggaaacggtcttatccagcgcatcctgtaattttggcatttttgactcaagtgccgacgcgatgttggtattagctttgttgaataacggtcggatagcgtcaagaatacccggatcaagcgcgtcgtcaaaaattatgtttccgagaatcagatcaagcatgcgttcggattcttcatcacgcattgcctttgcgtaaactgtcttttcaaaataagcgggacgtaccagcatatgggactgatagagcatatcctcaacaatgcgtccggttctgtcgatatcggaatttgtgacgggaatggttacggtagaagagttcgtattgtggaaaaatgaataataagtcttctgcgtctcgtccgatttcggcataggcagaactccgaaatccgtttccatattacggagcatgctcgccattgtcagcatctcgttataaaacagcacacgattttcacggaacgcggtctgtctgattttgaccccttcaataatgttgccctttgctattgtatcgccgttcagtatgctgttattttcagcacaggtctgaatgtgtttctgaaggaaggacagtaatcgctcacttatatttatatagggcaaatcctgattatctttttcaatgaccctgaaacctccaccgtatgtaaatgtgaatacggagaagctgttcagcgcgagaccgtaactgtcattttcatcatagacgctattgccatccagatctgaaccgacgtctgaacaatattcgagcattttgtcatatgtccattcgcctctgtccacgacctcatagaggtccgtgatattattcgcttccgtcatctgcttgttgaaaaagatgaccggagttgactcatacgaggcaaggttgatatcgccgacagcgaaatagctgcggttcataatggaggactcggtgaccgagttctcaagccaccacggctttgaaaaatcaaggtacggaatatcattgatctccttgagatagcctgacgttgccgatgtgaccgcggtctttatattcagaagaaccacgtcataaatgtcatcgttggccagaacggatttcgtgaagtttgaaaagtcgaacagtcccgtatactcaccgataatcttgacattgtacttctcgttgatcgcgacgttgcgtttatatacggcgtcgttgacgacttctccattttcgccttcactgaatacctcatgatatgccatctcattttcggcaatatcgcttgtaaggatacggaattcgtaacctccgtagtcaaccgcgggaatctgcggatcaagattctccgatgttgtatccgaactgatcgacgttgtatttgcggactgttccgtatctgtgccgttagacactgtttccttcccgcaggatacgcaaagaatcatcgctgtgagaagcagagttgacaaaattcgtttcataatgttccccttcctcaaaatagtatattgtcacgcgccatggcagacgacttgtttcagaaatgaattccgggaaacaagttttcccgaaagaatgtcatcttccgttacgcttgacatgagtatctcgcgcgctgagtaacgttcacggtcataaacaatcgttagccgcccattttcatcttccgacatatcgggatacgacacatcgttgcgctcatcgaggagcaaaccgtcagaccacgtttttccgtcatcgtcagataacattgccgtcagattgttgcgtccgctcccgacaacgacatcgcccgtatcctgtccgttataattcttatgattgatgagtaatagccgaccgctttttagccgacgaatgtgaaaccgtgagcacggattggcgattccgctgaaccctgtgtcgtgccacgtgtgaccaccatcatcggagaaactctgaccaataccatgcttgccgcgaatcagcatccaaagagtcccatccttgagctcaacgatcataggttcatctgtgcttctgtccggataatctgtatgcccgatgagtgagaaagtctgaccattatccgtcgaagcgtaaacgtttgagaatcgctcctccggtaggtcattgagagatgatatctcgtcgcaccagatagcacaacaaagaagccattcaccgtttgacaaacaggtgggtttattcaccatcacaccgttcgcaatccgccttggcgcggaaaacatcggcttttccgcgtccgggtcatcacagaccgacgcccatacgccgagccgtccgtcaatatatgtgtagctctgcgcgtagaagagccacaaatttccggacggagcaatccaaagacatgggtcaaaggtacggcatttcggcgtcggcgcttctatgaccagatacggttcaccgaatccttcccgcggattattcccgacaaacagagcaacgaaattaccactttcctcccctgtcattcccccgtaaaaagctgtaaaataccgacctgattttgttttttcaaccgtgggaacgccctggaagaatctgttcttgtttgcgaagcggcattcgggatctgcttttaccggttcatatcggaataatgccggtaaaagcgcgtcatccttgtttttgttcataagtgtgttcctttcgtaatgcgttattcaaatgaataactgttgtgatcaaaaactgaattgaaatgctttgccttaacctttctcacataacgcagataatcaccacccccagaataagccccgcaatctgtttcaccttcagtctctcatggaatacaaccacagacaccatggcggtcatcagtatcagtccgccgtttacgaccgggaagaagacgatgctcggaagcactcccgagagatagaggttgaggctgtgaatcattccgagtgccgcgccggagaatatcgcgagcggcagggcgggggaacacgatagtttcgcttccgcccggtcggcgcgcggctttttcccgcgcggcagggtcatgcccgagatcagcgccataaggatgaacgaaatcagcaggaacaggctcatttcccctccgtgcccagattcctgatggactttctgcataaccccgataagccccgtgaagagcatcgagccgaacgcgaagatcatccacctgaaattgacgccaccgcgcctaagatccatcgtcagcgcaagcgccagcacaaggatcggaagcaatatgatctgcatcacccggaccttttcagaatagcaaatgacactgaacaccgtcgatataagaaatccgcagcaggagatgagcgtcgtgcaggtcatggacccataagatatcgcctttatgtagcaaaactgagcaagcatattgacaagggcgaatccgaccgcggtgacaagcgtgaacagcgaacaggaatgattttttccaaaaatgaagaacagaagcagcaccggaacagcgctgatataggttatcgtgttgaacagcccaagatcaaccgcgccggatgattcccttttgctgaaggattcaaacgcggcgttctttccggtctcgagactgactgagatgaagagaagaatgtagtttatcacttgattttacttttccgttctttcacgccttatctatatccgttctgatgaatccgaagctctctcggatctccagcctgataccaaatctgtcgatctccgctccgcttactgtctgaccgcctatactgtaatttttcgcggtatcgaccgccggatataccacgatggcgtgctgcatcggatttcttacgaacgtaagtatctttatgactgacatatcccggttgcagtactcaaacgaagtgatatcattcgcgccggtaataattctgcaatcggcgccgataaagaactctcggtcacgcttatactccgagatatgcttcgcaaggcggtccagtacctcgtcagtcagttttgtcaggtcgcagcttatcccgagaggtcccgcgctcaggaaaccgtcaatccacgaataagcgaggctcgcgacattttcccacacaccgtcgcacgtcgtgaggagtttgtccttcttgtccccgccataaaccgggctgaaacctggcagagacctgattgtcgcccatttctcgatccactgcggcggcattcgcagcatagtatccttgaatatccgtatcccgtcgaacgccgactgattgtcggagagccagaagctgtcgaacaggaatccgttagccatctgcattctcattccgcccgaggcacagttctcaaggtatatgtccggatgcgcgctcctcagatctttaatgaacttctcatacccgcgatagtagctgatgaacgcgtcgccatacgggtcatcaaagatatccgcgttgaaatcgaacttgatgaaatctatccggtaacgctttatgcggtcgtccagaagaccgaggatatactcgcgcgcctcgggcttcgtgaagtccacgaaatactgcccgccatatctgatataaagattcccgtggagcttcggagattccgccttctccgtagcgcgctcgatctcgaaccacaacccgaatttcatcccaagcgaatgtatcatatccgagaattcacgcatacgcccggaaaagctgccgttaaggttctctttccagtccccgacactgtcgccccagttcatcgcgtccgcgaaccacccggcgtcgaccacgaaatactccgcgccgatcctcgaagcgatggcggcctgctcgtgaagggaatcatacgtgaacgaatcgaaattcgacagccatgtgttgtatatgaccggcatcgtccgtctcggatacatatcatttatatacctgtgcagcttccagcagtcaaggtccgtcttgttccggaaaccgaaatagattatccccgaaatttcagctttttctcccggcgcgaggttcaggctgaaattgtcggtgtcgggtccgatgacaacctccacctgaccttttccgccgcccatgtcgcggcgtctcacgctcatctcccatgagaagaccgccggaaggtgaaagactatgccgcgtccgttctgattgttccatatagcgataaccggagcagcatccagtgtcgtcctgacgctgccgactttagaatacacgccggtcacgagcggttgccacccgcctgtgctctcatgcatccagttgttgaactgggtgtagacctcatagtcgccgtctggaaggacaaattttgattttgccctcgtgatggtcacgggttcttccgaaatattgccgacggtatccgtgcgtgaatacacgtcatcgtcgttcacccgcgtttcggacacgagctccagtttctccgacctgaacaagaagcgggattcgtcccctgtctcctcaaagccgccgtttcccgggcacctgatctcaaagaagtcagtataattccgtgtctcgagttcgttcataagcttttttgttatcatgatgttgtctcctttagttggttttgtgctttatgatgaaaattgtaattcgcatatgtagaaatgttcatcaattatatgtataattgattataagatatataatttactgaatagtcagaccagcaaagcgcgcggggcattgaatcgaagggagagatgtatatgtcactgacaatcgacagcgaaaagctcacaaagctcataatgtcactctataacctcatccatgtcagaatcgttgttttcgacgagaatttccatgaggtattcgcaataccgcgtcggtacagcgcgttctgcgagtcgataaacagtatcccggagatgcgcggcgcgtgcgaccattgcgccgagatgatgtgccgcaaatgtgccgccaaaggcagtctgatagtcgacacatgtcatatgggtctcacggaagctgtcgcgccgatacatgagaacggggcgatcatcggttatctgatgtacgggcagttcacaaacaagcgtgaccgggatgctcttctgaaaacggtgacggaaaacggcagaaaagcgggcgtaccgaccgacgattttgcacgctgcctgaaatccgttcagcataagggcgacgatgagataaccagcatttccgagataataaatgtgtttgccaaatatgtttacctcgaaaatattgtctccgccaagaaggatggaatggcgttcagaatacttgagtatatagacgacaatcttgacaaagacctctcgagcagcgctttgtgcgacgtcttttcggtatcgcgctcgcatctgtataaaatactgtcaccgtatatttcgggcgggattgcggatcatgtgatgaacaagcgcatcgagcgcgcgaagtatctgctacggcacaccgagtatcctgtcgatgaggtcgcctccatgatcggatattacgacgtcagttacttcaggagagtcttcaagacaaaagtcgggatgccggcgtacacatatcgtatggagcaccttacagaaatagaaaacaaagcgtcagacaggtcagatccatgtaaaattggtaagaatatttcataaattccaattccactatatcaattatagcatatacaaccaaacaattcaagcgtaaaattgtccgtgtaacggtaatatcgtccgcggtcggatatgatctgtttccatcctcttcagttcacgacagaaaagcacctcggggaggtgcttttctgaagtatgtggtgtggtatgtatacagtttatattgtgggagaaatgaattttaatatgcaggagatacaccttcctcgtttgcggcctccatcttgaactgctcgagggcagcctttgcttcggggacaacgatcttgttggtagacatgttgttttctccttttacaaattacaaaatatctatattatcgacaggatcgcttcccgatggtattccgccgggcggatccggtctgtttatcagagcctcgacgtttccgcccggctctgatattattatcacctgtgtgcgacgtattatgactggaattttatagcttaaaaattacttccggagcgtctctaccgactatataaacagatagtgcatatcaaagtgtgatatgttgcgcatttcgcaaaaatgcaaaaccaaacgcacaaatctaacgcaaaatgttgacaatgttatatttatgtgatataataaaaccgttaaccaacagaagggacaaacgaatgaacacacggcagaatgatatcctcgacctgctcgccgcgcagggtgagatgactattaaggcgctcgcggagcggctcggcgtgaccgagatgacgatacaccgcgacctcgactctctcgggaaggacggctacctctacaaaaagcgcggggcggcggtcttcatcgagaagcccgacagaggcggcggtatgtaccaaaacgagaagcgcgagatcggcagactcgccgcggagcacataaagcccggtcagacaatactcttcgacaacagcaccacagctatcgaaaccgcgaaatttctctccggcataccgggactgacgttctacacgaccaacatcgagatcgcggctatagtctcggcgtatcccggcacggtgatgtactgctcgggcgggtactattttccggactcgaaggggtttgtcggacggcaggcggaggaattcgtctcgcgcgtgaaggcggatatctgcgtcatcagcgcgagcgggatatcggtcgacatgggactgaccaatccttacccgatgcacacggttctgcaaagaaagattatcgaggcgtcggatttcaggctcgtcgtcgccgaccactcaaagttcggcaagcgcgctatggaaaaggcggcagacctctccgagatcgacctcatcctgaccgacggcggcattcgtcccgatgtgttagaagagtacagaaagtacacgaagatcgaaacgacttgacatgggggatttataatgaaagaaaagagcgaaaacacggcggagtaccgcttccatatgctccgcgacccgtacagacccggataccacttcgcgataccgtccggtgacggaagaccgggcgacccgaacggcgccttcttcgccgacggaagataccatctgatgtatctctacaggaatcacacaagggaggatttctgctggggacacatatcttcgaccgacctgctccactggcgggcgcatcctgacgctctgaccggtgtgaacggagacgagggcgctttcagcggaggagctttcctcgacgacgacggcacggcttacctgaccttctggaagttcgccgcgaaggacgtagcgacaacggcggaatagccatagcccgctcaaagccgccgtatgacaactgggagcgcatagagccgatagcgataaacggctgtcagggcccgtggggaaccgtcgatatcgagatcgacggcgaaaccgaacacatagccgccgctgacccaagcaacatctggaaaatgaacggtcactctatatgcagaccggaaacctcatcatcctcaactcctacggcagggctccggacagcgaggagaagtacaagggcgaccacaccgacctgttccgctctgacgacatgatacactggaccttcgtgcgccgcttctacgacaacccgcgcacgaacccggagtggccggacgcgagcgaggacgacatgtgcccgagtttccttccgctcccggacagaaagtgcggcggacgcctgaccgacacatggttccagcttttcatagcgcacaaccgcggcgcgcagtactacacgggaaagctcgacggcgaaaagtttattccggaaaagcacggcagattctcatgggtcgacagcacgtgcttcgctccggaggctctgattgacgataaaaaccggcagatcgcgtggtactggctaagggacaatccgtgcgacgatttcgaaaagtacggctggacgggtgtctacagtttcccgagagttttctggctcgaagacggcgaactgcgcatggctccggcagaggagcttgacaggctcggatacaacgctcagactgtcgccccgatgaaggtcacaggcaagacggaaattccggtgaagaacggcgaatcgttcagactgaagtgccgcatatcgatgagcggcgcggacagggccggattttcggtcagatgctccggagagaccggcgagcacaccgacatttattatgacagaacaaccggaaagctcgtgttcaacgcgacggagagcggctgcgacggttggaaggcaaaggaagaggcgccgttctctctcgcggacggcgagacgctcgaccttgatatcttcgtcgacaagtcggtcgtcgaggtttacgcgaacgagcggcaggcgattgtacggcgcgtttacccgtcaaagccggaaaccgcggtgaaagtgtacgcgatatccgacggcgcggtattcggcgagacgacagtttccgagatggctctgacaaatctgtattgacaaataaataataaagagaggtattccggcatgaaaaaagcaagactcatatcacttctcctcgcgatgctgattgcggggaatctcatggcttcctgtgggaacgacagcgggaaaacaaacgacacgacagacgcgcagaccggtaccgaatccgagagcgtcgagggatcgaccggtccgtcctttccggagatcgacatggaagggaaaaaattcacaatcttcgccgagggctgggcgagcttcgatcctctctcgatcaacgatataatggcggagtagctgaccggtgattctctgaacgacgccatatacaaccggaatgtaaaggttgagaagcagtataactgcaaagtctccttcctcgaggttggcgatacagtcgccgctcataatcagctgaagcagtcggtcatggcggctgaccagtcgtatgacatcgcgatcatccgtacctacaactatttgtctgcgataacaaacggacttgtcatggatatctcagacataccgaataccgaccacacacagccgtggtgggatcagaattctctcgactcgctgtccgtcggcggaaaggcttacgctatatgcagcgacatcacgatgaacgacgagaagagcatctggtgcgtgttcttcaacaaaaagatgatagacgactacaacctcgacgacccgaacaagctcgtcgcggacagtacgtggacctatgacaagctcttcacgatggctgagaccgtgtcggctgacctcgacgggaacgacaagcgcgacgagaaagacagatacggcatcggatatataggcgacagctcaaccccgatctgcatgagcgtcggcataaagatcgccgagaagaacaacgaggacctgccggagttctcgttcgacaatggcgaaaacatttcgagatatcttgaaatattcacgaagct

SEQ ID NO: 1669 - DNA, 4618 bp, Unknown
  16S sequences of unknown bacteria
aaggcagccacagatggaacagggtctgcatgatccttccgccatccagcggcaccaccggcagcaagttgaacagcagcatggcccggttgatctccatcagatagccggcgaaggatacggagatgagcgaacaggacgccatggcctgcagcagaaacggaaacagcagatgcatgcatgggccggcagccaggatgaacagcgcgctgcccacgctgacatagctgatctcatcgatctgcgcgcacagcccgaaggggtagatccgcacccggcgcaccgggcaatgcaccagcatggccgccagacagtgcgccgcttcatgcaggctcatcatgaggaagatcgccagcagcactttccagcatccgctgaaccaggcgaacagcatcatcgccgcccacagcagcaggccgatcacccttcgctcatgtcctccagcgcgatctcctctccatccctgaagcagcggatctccacatattcctgatacgtgcccagggccgcgccgctgcggatgcgctcatcctcctgtacggcggcttcctgcaggttggcgaagttgatcatcaccccatcatcgctcttcatggtgacacagtatgtctcgttctgcgcctcgatgtgcacgatgatgccctcacacactgccgtagcttcattggtgccattgtgatagcgatgctcccccaccgcctcatactgtcccatgctggcgacgctctgcacctcatcctgacgaaaccaggtgtcaaagggcagatagtcgctccagttcaggctggtgaaatagtccatggcctgctgtgcctgagggatctgcagacgcagggcgatcatgaagctgagcccgcccacgcaaagccccatcactgcgatcacgcccttggtgaaccagcggctcagccgatgcgggcttctctgcctgctctttcggctgatgcgtcttctgatccttctgatgtcgtccatgtgctcacctctctcattcatatgtatgcggcagcctcgtcgatatgtcaggtggcaaagatcctggacaaaaaccggcgttcattgagcttgggcagcgcgaccttctctttgagaaagcggcgggcaagcacatcgaagcagtgatagagctgtgaatcgcgagcgacggcgatcggcaggccgcggttgttgcaggactgcatgcgcacgtcctccacgatatagcccagcaatgggatggccagccagctggtggcgtcctcgatcttcacgcacatgcctttatcgatggccctggggctcaccttgttgagcacgagctcgagcatggccaccccttccttgagcagcaggccgatcacccggtccgcatcctgaagcgcgctcacatcgaggttgctgacgatgatggcgcggctggccacggtgctggcgaagcgaaagccgctttccacccctgccggcgtatcgatgaacagataatcgaactgattctgcagcacgcgcatcacacggacaaagtcctcctgatggatgccggaaaagttgacgcccttgcacaccggcagcagataaaggttcttctcgcgtttatcctgcagcaaggcgcgttcgagcagacagcgctcttcgaccacatcctgcatatcgaagatcacccggttgtctagccccatcatgagatcgagattcttcaatcccagatccgcatcgacaagacagatcttgtatccttttgacgccagcatcatgcccagatggatgcagacgctgcttttccccacaccgccctttccggacgtcacggcaatgatttctcccatgaattccctcctcacgtcatatcttaatcacagcgcggcgcggaggctgtcgaatcttgtatgcggcggcaaatgagccgctgtccctctgcgctcaccttgcagggcgcaggacagctgatgcgcgcgaatgcagaatcaccgatgcggatgcgcgcgtccttcagcgcgccggcatagagcacgtcgtcggcgtgaaacaggtcgaccaccccttccacgcttcccatcacgcacagcgtgcctgtgcatgccaatgtcccgccggggcggacactgccaaacagcatcgtctcttcctgcaggctgagccgttcgccgctgtgcacatgctgttccatgatgcgcatgcgcgagggatcatgcgtgcccgggttgatcccgaggatgccgatctgatgcgcctgacacagccgcagaaagcgcagcgcctgctgatcgctgagcgccggaacatgaaaaaaagccgccgcgcgcgcatcaggctgcagtggcggcaggctttgctgaaactgctggagcatctcctccacatccgcagactgaaggaagatatgcatcctgctctttatttccttgatcttaacgtgtaccatctgaccttctcctcctggcggatccgcagggccttcattcgctgatagtcgttcttgatccgcaccagcatcacgaccgcgaatacgaggacgccgttgccgatgatggagaggaactcatagttcacgatccatgcggcaaactgcatctcgcttgcgccactgaccctcatgtataagaataccagcaggtccttgacgaatatcgtcgcaatgcagaggatgatggattccagcatggaatcgcccatgtgccgtgaccacagctgcagcagcagcgcgatgagcaggtagaccgacgcatgcagcagaaacgtgtctgtcacgaacagatcgaccagaagcccatagagaaacgcggtcaggcagcggtcaaacagcatctcttcccggatgacgagcacgagggaacaaaaccccaccgaaggcaggaagacgaggtcgttcatcaggaagttgccgggaaacagcacgctgatggccagatcgaccagggtgcacaatccgaaaaacagccagttggtcatctcagttcacctcgatgacagtgacatagtcaaaatactggaaattggagaccggctcgacatagatgacctgtcccagctgattatccagcgtctccaccttcttgacggtgccgacgaacagtccgctggggtatatgccgcccttgccgctggtcacgacctgcatgccttcctcgactgcctgatcatccagcagggagaccacatacgcctgttcattggtgtcataggactccaggatgccttccacgctggacgcctgctcttcgctgtcctgcgcctgctcttgatcctgatcctcaccatcgctttcaccgtccccgttttcccccgcatcatttcccaggttgatgcggacggcgaccttgttgttcttgtcctcacaggtcagcagcttcactacgctggtgctgtcctgcaccttccagatctttccgatgacgccctgtgagttcatgacgaccatatcttcctcgatgccgtcattggcgccgacgttcagcgtcacctgatcgttccagtatgtgctgtcccggccgatcaccttggccgaaatgcggttgaagccggtcagtgactcattcatattcagcagttcgcgcagctcctcattctcgcgctgggcattttcatacagcgcctgatagttcgtggtcatgctgagctcttcgcgaagcgtgtcattttcatcctttaccttccacagattggcaaaatcgctgctgaaattcttgatggaggtcagcggataatcgatcaggccgtatttcagatagctgacggcactgtagccgatatcgctgatactggcctgtttcatcccctgaaacagcagtccgagggccagaaaaaagccgatcagacacatcagaattttctgcgctttcgtaaattttgacatttcctcacctttttccgttctgttcagttacttattataaagggtatcggacaatgtttcaatctataaaaccgctttgtctgaaactgaaccaggcgttggggctcacgatgatatgatccatcagcgggatgccgacgatctttccgctctccacgatctgccgggtcacatgatggtctgccgatgaaggctccgcgcttccgcctggatgattatgcgcgcagatgatgctggaggcgctctgccgcatggcctccttgaacacctcgcgcgggtggaccatcgacgcgttcagcgtgccgatgaacagcacccgatgatgcaggatctcgttttgctggttgagatacaccgcgatgaagtgctcctgctgcgcatagccatagctgagccgcagccatcgcaccagatcatcgggcgagcagatcgcaaccttttccaggctgctgcgatcgatgcgccggcagagctcgatgccggcaaacagctggatggcccgcacctccttgatgccgttgatctccatgagatcattgggatccatatacatgagctctcccagcgatccgcacagagagagcacctcatctgccagctccagcacgcttttcgacttcgttccgctctgcagcagcaaagcgatcagctcccggttgctcagggcggacaggccctcgcgcttcgctttttcgcgcgggcgctcatcaggactcatctctcgcactttcatcttttcctccatttccccgcgcctaaagtcgcgcggacacaaatatttcatcaata

SEQ ID NO: 1670 - DNA, 10667 bp, Unknown
  16S sequences of unknown bacteria
tcaaaaaactgtcgtcctcgacaattaaaatctgcttcatatcctcacttcctttgctttttgcagatagtataacaggcaaatgtccgagaattgttacaaggacaaatatatttttcattttacagcttttttctgtgtactgcaattttataaaagaaaggacagcagtgtcaaattgctgtccttacggcttattatagctggtagtgtataagcgtgggttcatcatatttggtgtggtatctttaactatgggaaactccgtgaatgccaccgtgcgcaactgctataacaacgcggtcgtcaaaggctttaccgaagtcggtggtttgatcggcgatatgcgttcgacacagatcctgaatgcatatcagagtggtgatgtgcgtggctccatctccatcggcggtctggccggcaatgtcagcgccgcattggatggagagccttcgctcatccgcaactgctacaacggcggtcatgtattctggggcacgcattccggaaagatcgtcggcagcgtggaagccgagagcgcgatcgcttatgaacatgtatattatgacaaggacgctgtcccagatgtctcagtcggtaattttgtttccgcggaaggcatcacggcgctgagcgccgcgcagatcgtcagccaggaactggccgatctgctgaatgaggcagatgaggaagcattcagcgactggatgctgggcgctgacggcgaagtccgtctgtcgcttttcgatgaggtctctgcgctggagctgttcatggcttccatcgaagatgatccgcaggtcacggacggccatgtcgtgcttccggaaaatgaccggtatcgcgccgtgctcgccggctccaacaaccagcaggtcgtcgacctggatggaacggtgtatacgccgctgagagatcagaccgtatatctgctggtcgatattcaggataaggagagcggcgagacccttgcgcgccttgaccgcaatgtgctcattcatgtggaaggtgaatatgcgcaggaagacatcaacccgatcccgaatgtggttccgggcctgcgcgaatgggtcggcctggagggcagcttcatcgtggatgcagacacgcgcatcgcggctgaaagcgaagatgcttatcaggctgctctgcagctgcggtcttatctcagcgagatgagtgatatttccgtggaaatcgtacgggaaggcgcgcgtgaaggcgacatcgtcctgaatcaggatgctacgctgagcgatgagctggatgaagaaggctacctcatccacatcggcgatcagatcgtcatcgatgcgcctgcgtacaccggtctgctgtatggcggagtgagcatctcacagatcctgtatcaggatgagatgcatgcgcgtgtgcctaagggcatcattcgcgactatccggaatacagcgtacgcggcggcatgcatgatgtggcccgcaagtatttctcactggactatatcgaggaaatgggccgctatatggcatggttcaagctgaatacgctgcatctgcatatcaatgaagacagcggactgggcggagagtattcctcctcgttcgtggtggaaagcaagaaatatccgcagctgaatacgtataatggcgaatatgtctggtctcaggatgattatcgccagatgcagaaggatctgaagaaggtcggcatcgatgtggtcaccgagatcgacacaccaggacacgcgaccatcttccagctcatcgacccggagatcgtcaatgggtcgaacttcgatctcagcaatcattatgacgaatgtctggcgctgatcgaggatgtatttgatgaattcctggatggcgaagatccggtattccagaacgccgtggtgcatatcggtacggacgaatcagccaacaccaatgaaaacatgcggcgctacatcaacgatctggcacagtactgtctggccaaggacaatatcgacgaagtgtatttctggggcaacctttcactttattacggattcaatgagatcgatccagatcacgtggctgcgcaggtatgggattctgccgatcagcgcgtggatgaagcgctggccagcggatttgatgtgatcaacagcacgtccaattccctttacctcatcccgggcaatgccaacggcctgcataatggctatgtcgacatgtccacattctatgagacatgggatggtgtcaccgattttgacactaaccggcagagcaacccgagctatatctccaaccgcaattattattgcgcatatgatctgttattgggcgatccgcagatcctgggcgcgatctactgcaactggaacgaccgttcctgggccaatgactttgacgtcctggatctgatgatctcttatatcggcgtcgtctcagaaaagacctggtatggtgacagcgaccgctttgattccggcgcagactttgtccaggcattcgaagcagtcggagaccgtgcgccagatgtcaatccgcgccgcatcgtggatacagattcggacatcatcgccagatatcagtttgatgagatgaacgaaggcacgatcgaagatcaggagaacgactacgatctgcagacagacggtacgctcgttcagcgcgatgagaccaacggcaatgcgctgcgtctggatggggcaagcctgcatgcgccgtttgaggccgtcggttatccatatacggtatcctttgatctgtatctggatggagagcagccggaagacgcgatcttgttccaggatgaatactgcacgttctatctgaacgatcagggccgcggcgtcggcttccagaccggcaaatacggcatgagcttcaatgcgtcgatcccggaaaatgaatgggtcaacgtaaagatcaccagcatgtatcagcacggcggttccgctgtcacgacgctgatcatcaacgatgagatgtatccggccgttctggtcgataagccgcagagcgtcacttctcattccacgacttctttcctcggcaccgcagagatgttcatccatatgaacggcatggtcgataatctgatcttcggtaatcagtatctgcagatgttcggcccggatggtgagtttaccttcgagggagaaggaacggcgcaggatccttaccgcatcgaagacgcgcaggatatgcggatgttcggtctgctggtcagcaccggaaagtatcaggatgcacatttccgtctggaagatgacatcgatatgggcgatactcgctatatgccggctggcgaattcaatggcgtattcgatggcggcggacacagcatcagcaacctgaacatcagctcggaaagcgagaacaccggcctgattggtttcctgaacggcggcacggtcaaggatctgggcatcgagagcggaaccatttcaggcggagccagggtcggcgccatcgccggaaggacgatgcacgccacgatccgcaactgttataacaaggctgaggtgagcggcagcaacgatatcggcggcatcgcgggcatgttcaacaattccgtgatggaaaactgcttcaactggggcgatgtccatgcggaagtagagtcggtcggcggactcatcggcggagcgaatcgaagcatcgatccgtccactccgacgatcatcaccaactgctacagcatcggcaatgcgactgccggcgtgcagtatgccggcacgctgatcggatatgatgaatccacggcaggcgagacgtatcaggtcacgctgaaggatctttattatccgcaggatttgactgccatcggaaacaatacgcgtgaggaatgcacggcgatgagcaagacgcagatgacagatggcacgctgacccagaggctgaatgatggtctgccggaaggcggcaccgcatggatcacttcgtcatctggttatccggaattcgccgatgcgccgcagccggcaagcgacgccgcgatccaggcattgcgcaatatggtcgaaaaggccatcacattaggctctgaggatgcggcgctgaacgaagcgatcaccaatgcacagacgatcctggccaaggaagcgccgaccacgaccgaggtcgtcaccgcgctgctcgacctgagcgaagcgatgcaggccctgaacaccgatgaaggtgaggacgcactgcgtaaagatgtgcaggcgacgatcgacttcatcaaggagaatatcctgaccaacgcagacaacgttcgtccgggcaaggtgcaggcgctgaaagacgcagtcgccgcagcgaaagaactgctcgctgacccggacgcgagcgcagatgcgctggaagcagcgaacaaagcgatgaccaaggcagctcaagagctgtgggagattgtctccaaggcagagctgaacgcgctgatcacggccgcaaacggctatctcaacggtgactacacggcagaaagcatcgaggcactgaaggcagcgatcgaatctgcacgggccgtggcagacaatgatgatgccacgacatcagaagtcacacaagccatcacgaacctgagcgaagcgatcgccagcctggagaagatcacgctggatacgagcgcgctcgatcacgagatcgagcttgttaccgagatgatcgcaaacctcgataactatgtgccttctacggtagaaggactgcaggagaagctggatgccgcgaaggcagcgctggagaacgcagtgagccaggcagcgatcgacgaagcgacaaagagcttgcgagaagcacgcctgaacgcgcgcactaaggcggatgtgagcgctctggaagagctgatcgcgtatgtgaacagccttgatctgcgtggttacacatcttccagcttctgcgcgctgaatcagaagatcgccaaagcgaagctgaggatgagtgatcctgaactgacacaggaggaagcagacgcactggcagacgagctgaaagatgccattgccgcgctgcagccgaaacaggatgaagagggcggacagactgcggcagatgcacagacagccgcacgaggagcatgcggcatgggcatggtcgtcatcactgctgctgcagcgaccttgctgcaaagaagaaagcgcaggatcagataaacaatgagagcgggaaatgtgaaagcattgcccgcttttctatttttttaaaagatgggaaatcatgggattgcttgacaataagtgaatgttcatttactatagagaacgtagaggtgccgtgaaatgagaagaaaagatgatgaaaaagaacagagaatcagaagatcggtcattacgctgatgctgaaggaaggcttcaatgggacttctattgccaagatcgccaagatggctggcgtgtctcctgccactgtttacatctattatgaaaacaaggaagatatgcttcaggacatttacctgcagtattcagatgaggtctttgattatcttcttgccggcatccgctgtgacatggacggcgcacagctgatcgagacactgatccggcggtattacagctacatgaaagatcatccggaggcattctgttttgtggagcagtttgccaattgtccttcgatggccagcaaatgcagctgctcacggggcatgcagtcgatctttcagtggatcgaacaaaagaacagtcgtccgattcatcgccgatacagcgacaagagcgtcagtgccatcttgttttatccggtgaaggcactggctgctgaccatagcagcagtgaggaagagaaagcacagctgctggaagaactgatcgagatgatacagagagctatcctggcataggatggagagggggaaatgcgtaacgcgttttcctgtttatggtcagaaaattaaatgaatgttcatttaaaggagggatcaccatggaaactgtaccttatatggagaaaggaatcgtcattccggtacacaatgtcgtgctgctgcctggcgtgtcaacgatgatttattattcgcaggcttcggtgcagctgcaggaagcgctgagacaggaagacgcgaagttcgtcgtcctgccgctgaaacgcgatctggcgatcggcgacatcaccgcggaagatttccaccgttacggcgtgatgttcacgtctggaagacttgcttccaatgaaaaagggacatatctctctgcccggctcatgaaccgtgtgcgtgtcgagaacacctatcaggaagacggacagtgggtcgcggagtatacgagcgatccagaacagatggatctggatgagcagggcatggaacagatcatcagctatatccggcagaccgtgagcgagatcgcagagcatttcaagaatgggcagatgtatatgaagctgcttgatgaaattcatgatctgaatacgatcatcgcttatctgagtcagtttttatcgctttcggcgcaggaaaaatatgagctgctggaaacagactcgatgaagaaacgcggcttggccttcatggacgcgctcttaaagcagaaagaccgctttgagctgaacctggaactgaatgagaagatcgccagccgcaattctcaggcataccgcaaccatatgctgagggaacagatgaaggccattcaggaggagctggatgatgcagcggatgatggggaaagcgaggcagacgaagaggaagatcttcgcactcggatcgaaaacgcgcatctgcccgatgaggtgaaaaaggctgccttgaaagaggcagaccggatcgatacgatggggcagggcaacgcggaagaaaacatcatccgcaattatctggatttcctgctttccctgccatgggaaagagcggcacaggaggatatcgatctgaagaaagcagaggagatcctcaatgctcgccattacgggctggataaagtcaaggaacgcatcttgcagcatctggctgtcatgaagcttcgtccggacaagaagggctcgatcctgctgcttgtcggtcctccgggaaccggcaagacaagcttaggcaagagcatcgctgaggcgctggggcgcaaatatgtgcggctgagcctgggcggcatccacgatgaagcagagatccgcggacaccgccgcacctatatcggtgcgatgccgggcaatatccttaaaagcatgcagaaggctggctcgagcaacccggtcatggtcctggatgaggtcgataagctgcagcaaggcggctataacggcgatccggccagcgcgctgctggaagtgctggatccggaacagaataacacctttacggatcattatctcgacttgccttatgacttgtctgatgtgttcttcatcgcgaccgcgaattccgcggataccatccctgaaccgctgttagaccgtatggaggtcatctctatctcgggatataccgaagaggaaaaattccagatcgcttcacgacatctggtcagccaggtgctggaagatcatggcatcggtacacaggatgtgcacttcagcgatcagacgatcctggacatcatccgcagctataccagggaagctggtgtgcgcggtcttcagaaacggctttccagcgtgacccgcgccctggcacagaagatcgtcatgggcgagctgagcatgccgcataccgtgcttccatctgatctggaagcaatgctcggacagccccttgcccgtcatgatcaggcccaggatgataatccggccggtgtcgtgaccggactggcatggacgccggtcggcggtgagatcttgttcatcgaagcggccgccatgcctggcagcggaaagctgaccttgaccggcaagctgggcgatgtaatgaaagaatctgccatgatctccctgagcctgctcaaggcaaggatgccgctgaccgcagactttttcaaagaacaagatatccatatccatgtgcccagcggagccgtacctaaagatggcccttcagccggcgtgaccttgtttacggcccttgcctcattgatcacaggcatcaaggctgatccaaagctggcgatgacgggtgagatcacgctgcgcggcactgtattgccaatcggcggcctgaaggaaaagctgctggcagcccgtgccgccggcatccgcaaagtgctgatcccgcaggataataccggtgatctgaaagatctgccgcaggaactgaagcaagacttgcagatcacgccggtcaagaccgtggatgaggtcatccatcatgccttaggcatcacgatgacccagctgcagtgtacccataaggatggcaagccgcagacgaaacacgtgcctttgcttgaccgcggccacgatgcaaagcaaatgccgatcatgtaactgaacaggaggagacctgtcattggatctcctctttttttcatcatggttttcaaacacgcatgaaaaaggtacaatagaagctatgggggaagttcggtgaagagatacagatcacaatgatctgtgcgctgtatcaaaagtgtgaggacgcaaagctgttaggcagcgaatatttgaaacaagagctttgcgagcgttagaatgtatgaggaagcagccaatgcttccagagctgatcagcagctgcttcattgtctgtgtccacagttcagaaagagatggagcttaggcgcattcatgcgtgtgatctatcatgctttgcgaagaaggcagatgagacatttgtcccgcataaggggacagctctgtgcttgaaggaagatcatcgcgcagctgcatcatgtctttctttgcggctttcagtggtatgagatcaaagaacagtgagcggctctcctaatgatcaaatgcgtcagtttagatgaaaaaaatgcaaaagaataaggtgggtactatggaaaaaatgaaaaaggatgagtttgatcagatcttcgatctgatgaaattgagctttccgataattgaatatcgtgactacgacgctcaaaaggcactgctcagcgatccgaattatcagatcctgacattgccggatacggtcagcggctttatcaaggcattcatggccatatgggaatttgatgaattgatctatatcgagcatttcgcggtcagtccgcgtttccgcaaccatgggctgggcgcggtgatgctgcaggagcttttgtcctccacgcccaagcaggtatgcctggaagtagaattgccgcagacagagatcgccgcgcggcggatcgctttctatgaacgcaatcattttgtgttcaatccttatccatacatgcagccctcgcttggcgcaggaagagcgccgcagccgctgcgcatcatgacttcagatcacgcgatcaccagatctgagtttgaagcgatccgggctttattgtatcgatatgtatatcatgctgaaacagaagaaagcaaatgaaaaaggcagacatctgtccgcctgaaagatcaggaagcgcgatgtgcttccttttttgtcatggcttgtctgagcttgtgcacgaacagcgtgatgagcatgacgatcaccatgtctggcagagtattgccaagcacaaaatcggtgcgcatcagcagccgatacaagataaagcctgccagccagatgagcaggttgtccagacagaaagcggcgtcgctgcggtcatgacgcagaagcaggacatccgcgatctggatggcgatcatcggcgcgaatacggaaccgatcagataaaggaagtcggtgatgtcatccatcggaaaaaggatggctgccaggatgctgatgagggtgaccacgatgccaactcgcttctctttccatgaagggaagatcgagacagccgataccccggcagaatacgcgtcaaggaacgtggtcgtcaccgtagagaagatgacgatgagcaggcctgcggcgcccagtccggcctggaccatgatggatgcgatatcgctttcctgcgtcagcagagcagcgcctaagccgatgatgtacatccagcagctggcgatcccatagatgatgacgctgacagccgatgcggcgatcggcctttcagcttctcgcgtataatccgcgatgaccggcagccatgacagcggcatggcgacagaaagctcgacggccgcgccaaagctcatgaagccggctgcctgtgacagtcccgcgtgatcgatgaagatgaccttgctcaggatgagcgtcaggatcagcagcagcgtcatggccagcacattgatcttgcccaggttgctcacgcccagtgcgatccaggcgatgatcaatatgccgatgatgatgcaccagatccacatcccgctttgaaagcatgattccgcggccaaggcgccgtcatagatcatgatggcggtccagcctgccagctgcagcacattcaggatcgagaaaaacatggctccttttcggccaaagctcatcttagcggcttccatcgagctgcggcgctgtctggcgccgatgatgccggccaggaacatgagcgtacagccgatgagatgaccgatgaggatggcggcgaggccggagccaaagcccaggggcgccagataagttccggtgaggatctcagcgatggaaatgccggccccaaaccagatcatgccattttcaaataacgacgtgcgcttcatgcttcctccatgaagcggctgtgaatgtcaaaggcgtgatccatcggtccgctccccttgcccaggtcaagcatcgcgctgagcgcgccgctgatatactccttggctc

SEQ ID NO: 1671 - DNA, 18028 bp, Unknown
  16S sequences of unknown bacteria
cttttctatatatttataaaggtatctaagagagcccatatcgttgaaattggttgaattgaagattttagtaagctgttttcccgacaaaacatatacgtcgccgtccatatccgcgtataccgttctgtaatcaggatcattatcatctctttcaaagtcaaagagctcatatgcttcatcttcctgcggctcgcgtgctatttgatcgagcatcgcggcagcttcaccgagaagttcacgtacaccttcgtttataggagcggatattgggaaaaccttgatgcctttggcttcgatatattctttaaattcaatatatgatggatcattcacatcgatcatatctattttatttgccgctactatctgcggttttttcgccagtctcggatcgtaaagagcaagctcgctgtttatcttttcaaaatcctcgataggatttctgccctcgcttcccgatacatctattacatgtatcagcagtttcgtgcgttctatatgcttgaggaaaaaatgtccgagacctgcaccttcgtgcgcgccttctatgatgcctgctatatccgccatcacaaaaccgttgtcaaatatatctacgacgccgaggttaggtgtaatagttgtgaaatggtagttcgctattttcgggtttgctttggtggatacggaaagaagcgtagattttcctacattaggaaatcctacaagacccacatccgcgataagcttcatttcaaggatgacattcctttctttggcaaagccgcctgcctccgcaaaattaggtgcctgtcttacggaatttttgaaatttacattacccttgccgcccttgccgcccttggctgctacaaaacgctctccatgctttacaaggtccttcataagcagccctgtttcctcatctatgatcatcgtgcctgcgggcacttttattatgaggtcactgccgtttttaccgaatttcttctttttcattccgtcctgaccgttttcagcttcatatttttttttgtaacgaaagtccataagcgtacgcataccctcgtcagctacaaatataatatcgccgcctttaccgccgtcgccgccgtcaggaccgccttctggtacaaatggctctctcctaaaagaaacacagccattgccacctttgccgctctttatatatatttttgctctgtctacaaacatagaatgcctccttttcggattataactgcacatttattgtttgcgcagaatatcagatttataaataaataataaaaccctccggtattttatcaccggagggctatgatgcaatcttaagcttccttaggatatacgcttacctgttttcttttcttgtcatatctctcgaactttacagttccttcgattgtagcgaaaagagtatcgtctccacccttcataacattatttcccggatggaatttagttcctctctgccttacaagaatgcttccggcacttacaaactgaccgtcgcctgtcttaacgccgagacgtttactttcggaatcgcggccgttctttgaacttcctacacctttctttgatgccatatcggtgcacctccttttttatatcaaacaattagctgcggttactatttaagtgctgcttcaatcgcttcgataattacaggctttgtcgccttctcatcaatcgcaatgttgtgttccttagcaaaagcaatgagctcatcttttttcatcgacttaatcgaaggagactttgtttctttagcctcttcagccggagctgctgtgctgacagcttctgccttaggatcagcggacttatttgcaggttcatccttgcctacacctgtaattttaaccattgtatatggctgtctgtgaccctgcttttttctgtaatctttcttggacttgtacttgaaaatgataactttctgtcctttaccgttttcaactacactaccgaaaactttagctccgtcaatataaggagctcctacattgatatctgcgccttcgccaagtacgagcactttgtcgaattcaatcttgctgtctgcttctacaggaagcttttcgattgtgataacatcgccttcctgtactctgtactgcttgccgcctgtttcaattactgcgtacattttttattttcctcctctaaccagtctcgccatttggggtggcttaaaagcacttcaaaaaacccgttatgagcggctcaacattcatataatactataaaaaatattaaaagtcaaatatttttttattcgatgattacgccgtcttcgtcagcaatgagctcaggctcactgtctggcgcttcctgtggctttttaagcgtttcgaggagaagcgaatgaatttcttccataatatcgggattgctgcgcagaaaatccttaacattctctcttccctgtcctattctctcaccgcggaagctgtaccatgagcctgctttgtcgataattttagcgtcagtcgcggcatcgagtatgtcaccttcttttgaaattccctgtccgtacattatgtcaaattcagcctgtttaaatggaggtgaaactttatttttcacaattttagcctttgttctgttgccgagtatcgtatcccccgattttatagattctactcgccttacatctatacgcatactcgcatagaacttgagcgcccgcccgcctgtcgtaacttcagggttgccgtaaataactccgactttttcacgaagctgatttataaagattacagctgcatttgatttgttgatcgcacctgtaagctttcttaaagcctgtgacataagccttgcgtgaaggcctacatggctatcacccatttcgccctgtatttctgcttttggcacaagcgcagcgacggaatctacaacaaccacatcaagagcgccggagcgcacgagcatttcacatatttcgagcgcctgctctcccgtatcgggctgagatacgagaagctcgtctatgtttacgccgaggtttcttgcgtattccgggtcaagggcatgctctgcatctataaatgccgctttgccgccatttttctgcgcttccgcgattatgtgaagtgtcaatgttgtcttaccggatgactccggtccgaatatttctatgattcttcctttgggaactcctccgatacctgttgcgatatcgagacttatggagcctgtagatatagcttctatgttcattttggcaccgctatcgccgagcttcattacagctccttttccgaattgcttttctatttgcagcagagcttcttcgagagctttctctctgtcgccgatagcatttttattatcatttttatttacagccactttatgtacctccgattcaaatgtgaacatttgttctctaataaataatacccgataaataacttatagtcaagagaaaattagatttacttggggataaatttataataccatatttttccacttaatgcaaatagaaaaaagtattttataaaaagaaaataccgaatccgatatatcggattcggctgcaatcgagcagaataataattatctttactgcaatttactttatctcaattttaccgtcaagtattttattagcgagctccatcattcttaatacggaaaatcttctgttccagtctctgttagccgtatttcttttatattctatgacggtttcgtttctgccgctgccgctctttcctgctgccttatcgctgtaatttgcagccacatatataagccctacaggtttttcagaagtaccgccgtccggacctgctatgccggtaacggaaagacagatatcgcttcccgttttttcagcaaggccttttgccatttccagagcagtttccgcgcttacagctccgtatttttcgagcgtctcttgctttacgccaagctcgtcgatttttgcctggttgctgtatgttgctatgcctctttcaaatactttcgatattcccggaacattggcaagagttgctgaaaacagccctgccgtgcagctctctgccgacgatatcgtaacgcctttctcaaggagtttttttgctattacctgctctatatcctcatcatcagtgctgtaaacgtaatcgcctatgcggtccagcactttttccaccatctcgtctactgcggcctcagcttcttctatcgtttttcgctttgaagctatgcgtactgtacagcccgtttctttggcatatgtcgcaagagtcgggtcagtctgagtgtctatgaggtcaagaagctctgtttccattctcgattcttctgaaccgatagttctcactgttttataaaatataacgctgtcctgcatcttttcgagaaaaggtctgacatagccttcaaacatttttgtcatctctttaggaggtccgggcatacatatcaccatttttccattatcttcaagagcaaagcccggtgctgttcctgtatcatttctgaacataacggcacgcgaaggaagataagcctgcttgaggttgttttctgtcattacggaatgctgaaaatgtgctttgagattgtccatagcagcagcgttttccacaagtttatcgtttaaagcctcgcatacagtttcctttgtgagatcgtcctgagtcggtccgagaccacctgtagttattatgagatcacagtcgtggaagatatattctatcatttctttcaatctggttgtgttgtcgccgaccgtgtagtgatacataacatcaaatccaagcatattgagctgctgcgacagatatacggtattcgtatttacaatctgtccgaacagaatttccgtgcctactgataaaatggctgttttcatatataattacctccttttacatcgagaaaactttgcggttctgccagatatattctatcccggaatatacggtcataatcaaagaagcccaaagaaatacattggcagcatacggaacatactcatgcggaaagtcgccgagaataagaagaggtacggctatcatttgcagaacagtctttatctttccgctcattcccgcagctataacgatgccgtctgatgcggcaaccgttctcataccggcaattgtaaattcccttgcaagtattacaatgagcatccagccctgcacagtgccgtcagctaccatcaggcaaaatgcggaataaacgaggattttatccgcaagcggatccataattttgccaaagtttgtgacaaggttgtatttcctcgcgattttgccatcgagcatatctgtgaatgacgccgctatgaaaagaacaaatgccgcgatattatagccaagcatgtataatgccacgaaaaaaggcacagcgatcactcttataattgtaagtttgttaggtaaattcataaaacatatctcctgtcaatattgatattataaatatcttttttgaagttatactgatttacagagcctcacctacaagatcgtagtcaaaagcatcggtaatctttacatttataaaatcgccctcgtgcagctctttttctgaagtaaagagcacagcgttgtcgatttccggcgcatcgtaactgcttctgccgtaatagctgccatcgtcgtcttttccgtcaacgataacttcaatagttttgccgattttctcgcggtttttagaaagagaaatttccgtctgcatcagcattatactgtctctgcgtttttcttttatatcctgccttatgtgtcctttcattttgtcagcaggggtgccttcttcacgggaataggcaaaaattccgagccgttcaaacttcatttcgctgacaaagttgtaaagctcgtcaaaatcttcttctgtttctcccggaaaaccggtaatgagcgtagttctgatatttatatcaggcatttttgctctgagcttagatatagttgacataatacttgtttttgtagactttctattcatagctttaagtattctgtcggacgaatgctgaataggtatatctatgtaatggcatattttttcttcgcgggccatcgtatctatgagttcattcgtgattttatcctcgtagcagtacataagtcttatccagcgtatgccatcaattttgcaaagctcttttaaaagctccggaagagcaagtcttccgtatatatccataccatagtatgtcgtgtcctgtgctattattatgagctcttttgtaccagaagaggcgaggcgctttgcctcttctgtaatctcctctatctttctgcttctgtattttccgcggatatgcggaattatgcagtaagtgcagatattattgcagccctctgctatttttatcgtagctgtataaggattttcaggaattttacgcagactcggctcattaaaatcgcagtactccgatctgaaactgagcttttgaccttctttatcttttgcagctgcttctataagtgccggaagcctgtcgtaatcgtttacgccgataaagatatcaacttcgggcatttctttgtaaagttcgtccttgtaccgttctgaaaggcagcctgaaattgcaagaattttgttttctccggctatttctgccatttcaaatattttagcgattgattcttttttggcatcatttatgaaaccgcaggtatttacgagtataaggtctgcatcttcagcgctctctgcttctttatgtcctgcacgttcgagtatgccgagcgcaaattccgaatcgttgaagttcttcgggcagccgagtgtttcaataaaaattttcattatatttcttcctctgtataattatcgctatcttgattttgctcatctttatctccgttttgcattgcgtacagctctacttctgtaagcagtacctgacgcggctttgagccttcaggcggtcctactatgccgcgcgcttccatcatatctataatacgggctgctctgttatagccaatgcgaaagcgccgctgcagcatagatacggaagcctgtccgctgtgaacgacaagcgctacagcgtcagaaagcagttcgtcgctgtcctcatcctgcgctcccgaagctgctgatgcacccgcattttctatcgtatctatgacatcacccgcatacgctgctccttctgactgggcctttataaattctattacatcatgcacctcatcgtcagatacgaagcttccctgcactcttatcggttttccgagcccaagcggattataaagcatatcacctttgccgacaagtttttctgctcctcccatatcgagtattgtccgcgaatctacctgagatgatacagcaaacgctattcttgacggtatgttcgccttgataaggccagtcacgacatcaacagatggcctttgcgtagctactatgaggtgcattcctgctgctcttgccatctgtgcgagacgacagattgattcctcgacctgtgacggcgccgccatcataaggtcggcaagctcatctataatgatgacaacttgcggcataacctgatcaggctcgcctttttttcgcatagtgttgttatacgattcaagatcgcgcgcgccttcttctgcgaattttttgtatctttcggtcatttcggcaactgcccagttgagtgctgcggctgcctttgaaggctccgttacgactggtataagaaggtgcggtatgccgttgtaattgccaagctctacgaccttaggatctataaggacgagttttacttcctcaggcttagctttgtaaagtatgctgaggataatgctgtttatgcatacagactttcccgaacccgttgacccggcaatgagaagatgcggcattcctttaagatcgccgactattgcggagccggaaatatctttgccgacagcgaatgatatctttgatttggcctctttaaattcgcgcgaacctattatttcgcgcagcgttaccatatttatattgtcgttttcgacttctataccgacggcagctttgcccggaataggcgcttctattctgatgctcttggcttcgagatttagtgctatatcatccgagaggcgtgtaatgctcgaaaccttaacgccaatagccggctgtatttcatatctcgtaacagcaggccctttggtcacctgtattacacgtgcgtctacatgaaaatttttgagcgtattctcgagcttctgtgctttggcggcaagatctgtacctgaatttacgtttttgtctgctttactctgatgcagaagttcaagcggtggaaattcataagcttttttcggcaaatctgcgttcagactgagttcttccgccgtaagcattgcggtttcagcttccttttttgtcaactttttctccgtaccgtaggccggagtttgagcgttgttttgacctgcagctaaacttgctgctgcatttgcgcttggcactgtatcaatagctgcatcagccgcaattggcgctgttggcgtatgtttttctttctctgtgctgctgccgaggatttcagattcatagtcagcaaaaaaagaaccatccgcagctcctgaaagattgttttctgcgcctgaaagttcatatacctgattagcatttccgctgtcgataattttgacatctggcttcggctcctcttcgaccagtccgtagctgacgccgttttcacccgcggaagtcccgaaaagcgtatcgtctttcatataattcattatgttcacttggccttcgctcatcctgcctggaacataagaggtttcatactccgctgcaaattttttaggcatttccttgctctcgcgctgctctcgattttttgtatctgaaagtgagacgcctttgagagttttatcggttttcactggaaattcaggcctacccgtatttgactgctttataggtgttttttcataatcgctatctttagaaatttgagcttttgcagcaccgagtctcagactttcttcttctgcaagtctctgcgcttcttcatatgccgcaattcttgatgcctgcttctctgcacgctttatcttaagcttttcaaagaattgtgaaactggcgtgttgagcacaagaagcagaagcacgataatcaccactactgaaaatattataagccctggctttcctattgccttggcgataagcgtaccgatgaacataccaaaaagaccgccgttttcagctttgacgccgccgtcaaagagagcggttatatatttaaacgtcattgcaaatgtttcagtgtctataaaccttactgaattgagaagcgtaagcatcaggaatattatcagcataaatacagccgatttgcctgaaatatgcgccgccctgtcgagaaacagaagcgcgccgtatacgataagataataaggaagcacatatgcaaaaacaccgaagcttccgagaaaaaatttgtgaagtatctctccgaaagcgcccgccgcacttgtctgaactgcaattataagaaataccccgagtgcaattataattattgcccagatttcgtctcttaccctgctgcccacttttataggtttttcaggctttaccgggttcttacctgtcttggctcccgtttttttactgctcttacctgaagcgctgctgcttttttcggagcttgagcttgtcttattttttgaccccggaggtcttccgggctttcttttttcttctgccataaaacacctttttaaaaataataaaccgatttataatctaatttaaaatttattctgcgttaagctccaaatatcgaataaagtactaccgcagcaccgactgtccaggtataaattgaaaaataccagagtctttttccggttaccagctttatcatagctttgatggctataagaccggaaacagcgcttacgatgacccccgttaaaatcggaagcacaaacgacatatccgccccctgctcaaaagcggccggcgcttcgagtattaccgaaccgagtattgaaggtatagaaatgagaaaagcaaattttacgccgaattctctgttgagccccgaaaagagactgccaacaagcgtagagcctgaacgcgatactccgggacaaatagcaatgccctgcataactcctacgaaaaacgcatgtccgaatttcatttcactgaccgtctttgtacctgcattgattctttcggcaagccagagaatagtacctgtaaatatgagtcctattcctatggaaaggagcgatgagtacatagaggcgaacaaatcgttgaataatatgccaataagccctgtcggtatcgtcgcaacaattatcataaacccgagtcttcttgtcggattggcattaatcctaagaccttttcccgtaaatatatctttaaataccataaagagctcgactatgagtgcccagatatcctttctgtaaacgataaaaacagatatgagcgtgccgagatgaagaagcactgcaaatgcaagtacgctttctccctctataccaaaaaaatattgaagaagagccagatgtcccgaacttgaaatcggaagaaattccgataatccctgtgtcagtcccagtatgattgcttcaaaaaatgtcattgcctatccccctattttgtaacataaaaatacatattacagtataccacaattctttaaattttggaaataaaatataaaaatatgcctcctataatctataatatagaaggcataatttatataatgcttttaattttaccttaattataaaaaagctttgagatttactttgaactttagctactttgcggcaatgtagccaagcgctgtaagagcttccgcacagagaacagctccgcccgcagcgcctcttacagtgttgtgcgaaaggccgacaaatttgaaatcgtagaggccgagttcgtcttcccttattctgcctgctgttacacccataccacgctctatatcaacatcgagcttaacctgaggtctgttatcatcttcaatataggttatgaactgtttaggtgcgctcggaagttctttttcctgcggaagacctttgtatgaattgagcttttctataagctgctcttttgtcggttttttcttaaattttacaaatgccgctgccgtatgaccgttaagtactggtactcggatacactggcaggtaattttcgggttttctgccggtacaattacgccgttttcgatatgaccccatatgcggagaggttctttttcactcttttcttcctcgccgccgatgtacggaatgatgttttcaaccatttccggccaatctttaaaagtcttgcccgcacctgatatggcctgataagtagttacgaccacctcgtaaggttcaaattccttccatgcattgagcataggcacatagctctgaatggagcagtttggttttactgcgatgaagccgcgctctgtaccgagtctcttcttctgcgattctattacagcgaagtgctcggcattgatttccggaattaccataggcacatcaggagtccatctatgcgcgctgttgtttgaaacaaccggcgtttccgtctttgcatacgcttcttctatagcttttatttcatctttagacatatcaacagcgctgaatacgaagtccacggttgccgctactttttccacttcgttaacattcatcacctttatattcttaacagcctccggcataggggtttcgagcttccagcgtccgtttaccgcttcttcgtatgtttttccagcgcttctttcgctcgccgcaatcgtcaccacctcataccacgggtgattttcaaggagagaaataaatctctgtcctaccattcccgtaccgcctaaaattcctactctcagtttcttgtccatatcgtttttcagagtcagcccgctttcctgctataagctttctctaccgcacctcctgtttgtgtgattaaacaataaattttgtactaaatatgtatattatcacaaaaaaatgatttcgacaatagttttcgctgataacatatcaaaattttgtacatttgcgacatataatatcgcttatgattattatatcataaaatgcagtgcagtgtgaatgcacgaaatcatctttttaaaatggtatactcccgctgtaacaagattcattgcctatgaatatactacatataagacttaggtttcgtataggaggttttatatgatattattcaaaggcgctgccaccgctcttgtcactccgttcagcgagggccaggtggactacgactcattggaaaatctgatagagtggcaaataaacgagggtatcgacgcacttgtaagctgcggcaccaccggagaggcctccactctgtcggatgaagagcaaaaatctgtggtaaaatttacagtagaaaaagtaggaggccgtgttcctgtaatagcgggtgcgggaagcaatgatacagcgcatgcatccgaactttcaaaggcacttgctgatgaaggtgcagacggacttctcatagtgacgccgtactacaacaaatgcagtgacagcggactcataaagcactttgagacgattgccgatgccgttgatattccgcttattgcctactccgtaccgggacgcacgggagtaaatatttcaccagctgttgtcagcgaaatttcaaagcatcctaatatctgcggcatcaaggaagcgagcggcaacatagctcaggttgttgaaatatcgcgctatatatcggatgattttgcaatgtattcgggaaatgatgaaagtaccgttcctcttatgtctatgggaggactcggtgttatcacgactacgggaaatataattcccaaggatatgcagcgtatgacaaacgcatacttaaacggcgatgtcgaggaagcgcgccgtatgcagatagaaatgaagcatttaatagatgcgatgttctgcgaggtaaatcctattcctataaaagcagcgctcaacataatgggaaaaataaagcgcgaatacaggcttcctctctgcgacccggataacaaatccctttataaaattatgtgcgctctgcgcgaatacggtgtaattgatgaaagtatataaatactgaattcaaattctaaagggtttaaaaagcggaactctttcgagaaaactccttgaaaaacaaaacagccggattagatttatgaatatcttctcggctgttttgcttttatcagaatgattggctgaaatttgtatagttaagaagcttttataaagctgcgggtgttcttagttttcaattgcgcggataagatttaccatttctatcgctcctaacgcacagtcataccccttgtttcctgcctttgtgccggctctttcaatagcctgctctatgttttcggttgtaagtacaccgaacataacggggataccgcttgcaagtgaaacctgagcgataccttttgatacttcgctgcatacatagtcgtagtgcgtggtcgcaccgcgtataacagcaccgagacagatgactgcatcgtagttgccgcttgatgccattttagaggcgatgagcggaatttcaaaagcacccggcacccacgccacatgtatattttcttcttttacatcgtggcggattagtccgtccacagcgcctgaaagaagcttggaagtgatgaattcgttaaagcgcgccgcgacaatgccgatttttatttctttcaatactaatttcccctcaaatgttttcataatatttctcctttcattttgtcaatatttttctccaataaatatatttagtattttaatatatgccccattcgctcctgcttggtctttaaataaaacaagtcgtggtcgtttgcgtccatctgaataggtacgcgttttgtaatttcaagaccaaattcggaaagctgatatactttatcgggattattcgtgagcaggcgcatacttttcactccgagctcgcgcagtatttgggcgccgatataatattcgcgttcatcccctgcaaaaccgagagcaatatttgcctcaagcgtatccattccctgctcctgaagctcatatgcacgcagcttgtttatgaggccgatgccgcgcccttcttgacgcatatagagaagtatgccgcgcccttctttttctatctgcgtcattgcagaggcaaactgctgcccgcagtcacagcgcagcgaaccgaaggtatctccggtgagacactccgaatgcacgcggcaaagcacgtcttttccgtctccaatatcgccctttacaagcgctacatgatgctctccgttgagcttatttacaaagccgcaggctttaaaatctccatatttggtcggcatatttacaacagctacttgctctacaagtttttcgtgacatttacgataattttgcagatcttttatggtaataaacttcatatcccactttgcagccaatgctgcaagttcaggagtgcgcatcatcgtaccgtcttctttcattatttcacagcacagaccgcattccttaaggcctgcaaggcggcagagatctactgtcgcttctgtgtgtccgtttctttcgagcacgccgtttttcttagcgagaagcggaaacatatgtcccggccgtctgaaatcatccggtttggcatcgtcagcaacacacgcaagtgcagtaacagagcgctccgccgcggaaatgcctgtggaagttgaaacgtggtctatagatacggtaaacgctgtttcgtggttgtcggtgttcgtgcttaccatttgcggaatcttaagcttctctacatattccgctgacatcggcatacagataagtcctttgccgtgagtagccataaagttgatgttttccgtagtggcaaattgcgctgcgcatataaagtcgccttcgttttcacggtccggatcatccgttacaagaatgatttttccctgccttaaatcgtcgagagcttcctcgattgcattaaactgtcccatactatttcctcctaaaacccatattttgttaaaaagtcctttgttattaaactttgcgttttcgtgtgtgtacctttatctgtattttcccctctgctgaacatcagtttttcaacatactttccgataatatccgtttcgagatttacgatatcgcctttgcggcgttttttcagcaccgtttccgctaccgtgtgcggaattgctgaaacagcgaaatcgctttccgatacgcgggctaccgtgagactgatgccatctatcgtaatcgagcccttctcgacaatatagcgcattatttcaggtgcagcttttactgtataccatactgccgtatcgtcacgcctcacgtcagttatgaggcctgttccatctgcgtgcccagaaactatatgtccgccgaagcggccgtctgccgccatagcgcgctcgagattcacaagacttccgcgtgaaagtttcgcaagtgaagagcggttaagcgtctcatgcattacatctgccgaaaaacagccgctgccgacagatatgaccgtcagacaaatgccgtttacagctatactgtcaccaattttggtatcttccaaaaccttgtcagcctttatcataattacggcagaactgcgtccgctttttatttcttcaacagtgcctatttcttcaactatgcctgtgaacatcggatatcacctcgctttcgataagaagatcgcatccaagcttaattattctgctgtttttaagaagaaatgcgtttcccggagagggaataccagtgccttctaccggcgtcttagcgttcttgccgccaaagattttaggcgcaatatatgcctgaaccttattgacaataccggtttcgagagccgaccagttgagtgtgcctccgccctcgagcagaatactgtctatttcctcttttccgagcttttctgtgagttcgtaaagatctatatgcccgtttcttgcaccgactgttaaaatacggcagcccatatcttcatatagtttttgtttctcagtatcgcggcagcaggtagctataaccgtcggcacatcgcgcgcgctcatcactatacttgatgccagcggcgttctgagctgagtatcgcatataatgcgcagtggattttttccgccggaaagacgacaagtaagtagcggatcatccgcaattaccgtacctactccggccataatcgcactgtacctgtgtcttcctttctgcacgtgatttaatgcagcatcgcccgtaatccatttggattctcctgtaaagcaggcaattttaccatccattgtcatcgcatatttcattatgacaaacggttttttcgtttttatataatacataaatacttcatttagtctatcgcactcatctcttaaaacattttccgtgacttctataccgtgctcacgcaatatctttataccattccccgctacaagcggattagggtcataggagcctatgactacgcggctgataccagcttttataatggcatctgtgcatggcggctgcttgccataatgacagcaaggctcaagcgttacatacattgcggcgccttccggcggttctatgcaagaagccagcgcgtttcgctcagcgtgcagttctccgtatttatggtgccagccctctcctattatccgtccattctttacaattacagctccgaccatcggattgggtgaaactaaaccgcagccgttttcggcaagcgtgagcgcttttttcatatattctcggtcattcattaaaataaccacctccaaaaacaaaaaaccccggctgttaagctcggggttttaaggttatatgctgacgcatgacgcgtcaatacagaacttctttatcattatattttgcaaacaaaaactccggagtgtaaaacaatccggagcaatcgccgttttgcgcaaatcatcggtagcttatcaatataataatataccgttgaaatgcgttctgcaatcttctttcatccggactgtaccgtcggcttcggaatctcaccgaatcaaccaaatggctcgtgggctttaaccaccggtagggaatttcaccctgccccgaagatctttattttattttaaatggatttatgcttctgcgcttacgatttccttaccatcgtagtaattgcaattcgggcaaactctatgcggaagcttaggctcatgacactgtgggcaaattgatactcccggtgctgtcatcttcatattcggggatcttctcttgtcccttctggcctttgatgttttcctctttggaactgccatttctacacctccttacattgctctttatatgatataattaaaataatttactaacgcaacctctaaattatatataaaaactgcctgtttgtcaacaaattattttaatttttttacaatattgtaagtgtctcttgcaatcatgagctcttcgtttgtaggaatcaggagtacctttaccttggagtcgtctctcgaaatgatagtttccttacctcttactctgttctttacgaggtcaagcttgataccgaggttgccgagatcgttgcagatgatatctctcattgcgatgccgttttcaccgagacctgccgtaaatacgatagcatctacaccgttcatctctgctatgtaagctccgatgtagaatcttaccttatgtgcgaataccttgagcgcaagctgtgctctttcatttccttcagcagccgcctcttctatgtctctgaaatcgcttgatactccggaaataccgagtacgcccgacttcttatttaagatttcgttggcttcaccctgctttaagtgctccttttccctgataaatgttacgatggcagggtcgatatcgccgcagcgagtacccattacaagaccttcgagaggtgtgaagcccattgatgtatcaatgcacttgccgcgcttgatagcggatacggaagctccgtttccgaggtggcaggtgatgagcttcaaatcttcgatatctacgttgagaatttccgccgctctttccgcaacatacttatggctcgttccgtggaaaccgtatcttctgatacc

SEQ ID NO: 1672 - DNA, 2400 bp, Unknown
  16S sequences of unknown bacteria
ctaccggctcgtgaagagtggcgaagccgaaaacggtcttcgcgcggtcgggatgtattatgatttcgccggaaaggtgctcgcctcgctttgccccgataagaacgagccgatgccgaaggagcttgccgaggtcgttgggttcatcgagcgggatatcctgtcggacatgagcgttccggagattgcggatgagtttggtattagcgagtcgacgctgtatcatctgttccggcggtatctcggcaccacgccggtgaattatcgcaacgagctgcgcatagagcggtcgcttgagcttcttgagagcgggatgtcggtcgagaggacggcggaggaggtcggtttcaactcgagcgtgtatttcaggtcggttttcatgaacagcaccggcatgacgccgagcgagtacaggaagagccactccgacagaaaaagtgtaaacagtttataaacaaagcgcgatacctcttgactttgtggtctaacggtgttagactataatcacaaggtctaataccattagactgggaaggagacatatcatgaatgaaataggtgagatggaattaaaattcgcggagcttatctggccgcgcgcgccgattggctccggcgagctcgtcgcgctctgcgaaaacgagttcggatggaagaaatcgacgacctacacgatgctgaaacgcctcgagaagcgcgggcttttcgagaacaccgacagcgtcgtcagggtgaagatgacgcgggaggagttcgacgccggacggagcgagaggtttgtgaaggagaacttcggcggatcgctgcccggtttcctcgcggcattcacgaagaaagtgaagctctcggacaaggacatcgccgagctcgaggagctgatacggtcgaaccggaggaaatgacatgacgccagagaaaatcttctgcaaggtgctgagcctcgacctcgcggcgattgtcgcggtcggacttgttctcatcgcgaggctctgcttcagaaaagcgccgaggcgctgttcgtacctgctctggtcggtggttttgctgagacttgtcatcccgttctcggtgagactgccgggaaagagtctgctgccggtcagcgcggacacgttcagcactgagcttgccgagggggcggttccggttatcgacagcgggaaccggctcgtcgactcggctgtgaacggcattctcccggcggcggaggtcggagcgagcgccaatccggcacagatatggctgtgcgtcggcgcggcggtctgggttatcgggatgatggcgctcacggtgctcagtctgatcaagtatttcaggctgacgttgatcatggacggcgcggagagggacgggaacatcgccgtctcggagagcttcggaacggctttcgttctcggactgttcagaccggtgatctgccttcccgcggggctttccgagggcgaccggcgggtgattgtcgcgcatgagacggcacatatacggcgcggggatcatatcgtcaagatggtgtcgtacattctgttgatcatccattggtatgacccggtgatgtggctcgcgttcgggcttatgactcgggatatggagatgtcctgcgacgaggcggttgtgaacggcggctgtgaccggtcggagtacgccggggcgctgctgaggctttcggtcgggaatgagattttacccgccataccgccgactttcggcgagggggctgttaaggaaaggattgtgaatgttatgaggtttaatgtttcgaatgttttcgtgaatatcggcgttgtgatcgcggcttcgctgattgtcaccgcgtgcgcgattaccggcgggaggtcggatacgacaactatcgattttgcggcgactgagactgagccggggttcggcgtcagtatgactttgccggatggatgggaggtcggcggggagaatgagacttattacccggggcttaccggggatacggttgcgattgttgacgcggacgggaataaggtcgggtatatcgggtcgattttttacccggattatacgaaggaggaggatccggaacagtacccggcgccgttttctgagaattattggcagcttgtgtatccggagctgaggcttccgaatcatttgagctgggacattgacccggcgacatcgatccgcacggaggtcggcgagacgatgctggcggatgtttacgcgcagataccggaggacggtaagcccgcggcggcgtgggaggtgtcggagacgcgcggcgtggtttcgtataacgatacgcttcacgtgtatgttttcatagacctgtacgacgcggacgacgcgacgctcgatttaatagcggagagcctgacgttcacgaaataaaaaatttgcccggagcttttggtttccgggcaatttctt

SEQ ID NO: 1673 - DNA, 9157 bp, Unknown
  16S sequences of unknown bacteria
catctggaaggcggcgttacgcgcaaaattctcaaatacggcggcaagctgatgctggtggaagttaccatgcccaagggcggcacaggcagcgcgcacaagcatccgcacgagcaaatcagctatattgcccggggttcgtttgaatttacggtgggagaggaaaaacgggtggtgaaggctggcgatagcctctacgtggcgtccaatgtggagcacggcacgcgatcgctggaggatggctccatcgtggtggacattttcacgcccatccgcgaagattttctggcaaaatgacctcggggaggaaagaagatggacattcgctattcgtgcaaccagagggattttaagcgctacacgacagaagaaattcgccaggaatttttgatggaaaatctgtatgtgccagatgaagtggtgagcgtatacagccatgtggatcgcatgatcacgttgggctgtatgcccgtgcgggaagtcgtgccgctggaaaaaggcctggacgtatatgcggcgctgggcgttgattttttcctggagcgccgggaactggggctttttaacctgggcggcagcggcgttgtttcggtggacggcgtgcgctatccgctggaaagccgcgattgcttatacatcgcaaagggcgccaaggaagtgcttttccacagtgacgacgcccagaacccggccaagttctacatggtgtccgccccggcgcactgctcctatgaaacgcgccgcctcacgtatgccgacgcagtgaagcgccccatgggcagcgcggaaacttccaacaagcgcaccatttgccagttcatccatccgtccgtgttgaaaacctgccaactctctatgggcatgactatgctggagcccggtagcgtgtggaacaccatgccggcgcacacgcacgagcggcgcatggaaatctacacgtatttcgacattccggaaggcaacgtcgtgttccactttatgggcgaaagcaaccaaacgcgccatgtggtgatgcacaatgggcaggctgtgatcaatccgtcttggagcattcacagcggcgcgggaaccgccaactattcctttatttgggcaatgggtggcgaaaaccaggccttcgacgatatggacaacctatccaccatggatttgcgctgacggcagcgcgatcacgtacaaagggggacgcaaaatggtgccattggacgcgctgctgagccattacacagagaaagccgtttcgctccaggtgggtgatttttacatcgcgcccgacggtagcgacgataacgacggcgccttggagcggccttttgccaactttgaacgagctatgcgcgcagctcgcgagcggaatgcgcagggtttgcgtacgacggtctgcgtgaaggcaggtgaataccacgtgcgcgggctggtttttcgggcggaggatagcggcacgacttaccgcgcttatggggatggcgaagtgacgctcaatggtggcagggcgctgcgccccgcgcaatttcggcccgtgagcggcagtgtgcgcgagcggctgcacggtacggccaaggacgcggttgtggagctaaacttgcgcgaattgggattgcgccccgcggactgggggccggtatatgccgttggcgcatatgccaccgcccacaaatacgacggggataccgtgggcctgaattgtgagctgtttttcaacgatagccgcatgtcgctcgcgcgctatcccaacggcaaggaatttttgcgcgtgagcgcggtgcacgatgtgggcgacgcctttgagttcccggagcagaattattatccggattggaacgagcggcgcaaccattggggcggcgtgtatatcatggataaacaaaccaccgagcgggtgaagacgtggcaatcccacaaggacgtgtgggcggcaggctattttttccacgattgggccgattcttccacgcctatagagcggtttgattgcgcgcaccgccggatggtacccaggttcgtttcgcgctatggctgccgggcgggcgcgctgtactacctttacaacattttggaggagctggacgaacctggcgagtggtatctggatcgggattcgggcatgctttatctctatccgaccgggccgctggaagaagcacgcattgagctgacgctttccacccagccgctgctttccggcgtgggcgtgcatgacctcgccttcgaagggttcaccttcaagggcacgcgtgcggacgggatttccctggcgggcgatgggatccgcatttgccgctgcgtggtaaaaaacgtgctgggcaacgccatttgcctgcgcggcgcgggcaacctcgtttccgaatgcgacatctcgcacactggcaggggcggcatcgtgctggaaggcggcgatgaagaaacgcttgcgccggcgcattcgcgggcggacaacaatttcatccatgattgggcggaggtgtatcctacctatatgcctgccgtggcgctgcgcggcgtgggcaacatttgctcccacaacgaaatctgccgcgcgccgcacgccgccattttgtatagcggcaacgaccatctcattgaatacaactacattcacgatgtagttttgcactcttccgatgcgggcgccatctattctggccagtattggagtatgcaaggcacggtgatccgttacaattgcctttgcgacattggcggcggagagttccgccccgacggcatttatttcgacgacgccctttccgggcaaactgcctatggcaacctgattctcaacgccaagaaaaacggctttttgatcggcggcgggcgcgataaccaagtgtggggcaatttggtgatccatgcgggttgcgccttcacttacgacgaccgcttgcgcgacggccttttgcacaatggctgggcaaagcattccgtggaggatccgcaagagggctgcatgtgggtgcgcctgcggcaatccaattaccgcaagcccgcctggcaggccaaatatccctcgttggcaaaaatttcgcaggatttttcccagccggacgatccggaattcgcggtgaatcccgcgcacagcgaagtgtttggcaacatcgtgatcgacgaagggcgcaatgtgggccgctttgatccctcggtgcgccagttcagcacaattcacagcaactttgcctatgctacgctggaagaggcggggttcgacgagcaataccgcctcaagccagacgcgcaggcgcgcaaagacctacccgattttgccgatattcctttgtgcaaaattggccggtattagtcgcgccttgacagcgcgctaggatgaaaaaatattcaatgggcaaacgcttgctttttaatacatatataaactatctttggagtaaaccttattatatattattataatatataatacaataaatatttagaatatatgctttaggaggtactgcccatggccaaagccgcgaaagtttccaccgcatccatcgtgttgccctgccgcaaacccttttacaggcgcgccgcagagaactggcaaatgtatctgtttctgctcatccccctcgtttggctgatcatttttaaatattggccgatgtacggagcgacgatcgccttccgcaaattccgcgttcgcgatggtatcaacggctcggagtgggtaggactggaaaactttatcaagttctttgaatcctaccaattcgaccgcacagtgggcaacacgttgtttttgtccattgtgtccatcgtgctcacgttccctattcccatcctgtttgcgctgctgctcaattccgtacgcagccgccggtggaagggcattgtggaaaacatcacctatatgccgcacttcatttccgcggtggttctggtgggcattttgcgccgcgttttcgatatcaacaccggcgtgattaacaacctagtggagatgatccccggcatggactacacgctgaacatgtttatgggcggcagcagtttccgcattctatatatcggttccggcatatggcaagagaccggctggggttcgatcatctacatggcggcgctttccagcgtggatcccgagctgcacgaggcggccaccatcgatggcgcttcgcgcgtagggcgcatgcgctatatcgatctgcccaccatcattcccaccattgccatcacgctgattttgcgttgcggttccatcatgaacatcggcttcgacaaggcgtttttgatgcaaaacgacaccaaccttgtagcttccgaagtgatttccacctatgtgtacaaggtgggccttacagcgcagggcggcaacaatttttcctacgcgacggccatcggcctgttcaattccgtggtgaacttggcgatcattctattcgtaaacaaagtcgctaacaaagtaagcggcagcggactttggtaaaggaggcgaaacgatatgacggcaaaaaacgtaaaaacccaaaatttgcgcggcaacgccattcaagtgccgcgcggcgaccggatttactacaccgttgtgaacgtcatcctggcgctattcacgctggtcgttttgcttcctctgctcaatgtactcgcgtcctcgttttcttcgccggaggccgttagctttggctacgtgctcttctggcctgtcgatttcagcgtccgcggatatgaagcggtattcgaatacagcgggctatggctctcgtatgccaacaccgtgttctatgccgttgtcggcacgtgcgtgaacctggcgatcaccatggtttgcgcctaccccttggcccgcacgtcgctgcccgggcgcggcgtcgccacggcgctgttcatgttcaccatgctctttagcggcggcaccatccccaactatctggtggtgaaagacctgggcatgattgacacgcgcgccgccatgatccttccgggcgcgctgagcgtgtataacatgatcatcgcgcgcacgttcatccacaacatcccggcagagctggaagaagcggccaagatcgacggttgctcggattttaagtatttcttcaaaatggtgctccccctctcgcgcacggtgatggcggttctctcgctttactacgccgtcggccactggaacgattatttcactgcctttctgtacctgatggatccagacaaaatgcccctgcagatctccctgcgcgccattctgatcaagaattcgttctccgccgatacggtgggttccaacgcggaagagctgctcaacaaccaatcgctgcaagatttgctgaaatacgccatgatcgtcgtttcgtccgcgccgattttgatcctgtatccctttgtgaaaaagcactttatgaagggcgttatgatcggcgcgatcaagggttgattttgcgcgttggcaaacctgcgcgccaatgatctgggtcgattcaaagagccttcgggccctatgaatatacttatagaaaggggaatcatcgacatgaaacaaaaactgaccttgctcctggccctgctcctcgtcctatcgctaacggggctcgcctctctcgctgaaagcgaaggcggccttagcgagcccggcgtgctccccatttggacgggggacgaaccctatgtgctcaccgtgctgatcgcggagaacgcctatgtttccgattatgacgacaacgtttacaccaaatggattgaagaaagctgcaacgtggatctccagttcgtgtacctgccggaagccgatgcgggtgaaaaactgaacatcatggtgaacaccggcgaagaactgccagacatcgtggtgcatggactcgacgtggccactgcctattcctatggcgaagcgggcgcgttcatcgacctgagcgaatactacgagcgcggcctggccgtgaatgtgagcaaagccgtggaagaattcccggattggaacctgctgagcaacatcaccaactacgacggctccatctatgccgtcccgaagatccaggcttccccgtccaacgagacgaaatacaagctgtggatcaaccagacctatctggacaacctcggcctcgatatgccgacgacaaccgacgagttctacgagatgctcgtggccttccgcgatcaagacgcgaacggcaacggcgaccccaacgacgaactcccgctgctcggctctagcagttggggcggcagcccggtaaaattcctcaccaacgcttttgtgcacgaaggcgataacgacatgtggatgctgcaggatggtcacgtgaccgcctcatacattcaggatgcctggtttgacgcctgcgactacatgaagaagctgtgcgatgaaggcctgctcctgcccgaatccttcacctatggccgcccagacatcaccgccgtggccgccaatgaaaacaacctggtgggctgcctgttcgattcttcgctaggcttcttcggcaacgagggcacgcccgaatacgaagcgcgcctgcgttatgtgtgctgcgatccgttgatcgggcctgacggcgtgcagaccgtggcctacgcccagtccactaccaactgccagtggttcgttaccagcagctgcgaacagcctgaactcgcattccgcgtgggcgatttccagttctcggaagaggccttcctgctcggccgctatggggtcgagggggaaaactggatgtataccgaagattacctcaaggatcacgacgtggaagtgaccgcgaactacgctgccctgggctttgaacccgtttacctcgtggccaccacggacgacggcgccatcaccgaaatcttcggcacggtgcagaacgtgaactggtacgataagatgccctacttctccggcaatgtggaaaacgaaatcggctatatcagccgcctggaagacggcacggtgatcgacggctccgtgtaccacaccatccgccagacggaaggcaccgccgtgtaccagaagtataagcccggcccggatgtgtattgcccgtcgttgaacttcaccacggaagagctggaagaaatcggcgaaatccgcaacacgctcaagaccttcgtcaatgagcagcgcacgctgtacatcaccggcatggattccatgctctcggaccgcgaagcgttcctcaacgaactgaacgccattggcctggagcgcgtgctggaggtcgctgacgaggcgtatcagcgccagtatgtgaacaactaaggccggaagatctggccgccgcgcgactcgcgtaacaaatcagcgcccggttgaaaatctttcagccgggcgcttagcgtattgccaaagcatgggagcaagaggcgtccactagaaacagctcagctcaaatccccggcccgctctatgacgcgcagatgcccattttgccaaacgcccatcacatagcaggcgcggccctggcgcttggcggcatagagcagccggtcggtttgcggataaatcgtctgaatgtcctgcgggtgggtgaaccagcaggcgccaatgctgcaggacactttttccggcgcgggcagaatggcagcgatgccgctttgaaaggcatccagcttttggcgcaattcttcttccgtgatgctgcccatcagcaacacgccgaattcgtccccgcccattctgccgacgccgcccagggtggaaaacgcgctttgcagcgcttgcgccacttttcgcagcacggcatcgcccacgggatggcccagcgtatcgttgatggatttgaaatagtccacatccacaaacaggaagcagccctggcgcggcgggatcgcgtccttgctatccaaggcgtcttcgcaatagtgcaggaacattttgcggcccatcaccccggtaaccgcgtccatttgccccatgtattccaggtacgaaagataatgatagacgatgagcaggcaaaccgccaagagaaagcacagcgaaagcgtggcgaatagcgattgaatttgcaggtgcaatagatcgtgctccgcttccggggaaagcgccagcccgtgcacgcccagcatataggtcatccgctgggcgaaatacaccgtcgtcgccaccaccacgcccaggatgcacagcaaaaacagcacccatgcccagtgcaacttgtgcttttgcggccccgcgcggtgcgcccggttcagataatcgctaaagctgcgcagctttttgctctggtgcaggctccaagccccttccacaaggagcaggcagagcagtgccagcagaatgtcgctcaggtttagccggaaggcgttcgccacggtatagcccaaatcggggaacagcatttgcatggccgcgtacaccaaaatggagtgcagtttgggcgcgatcagggaaatcgcgcccgcccaaacgcgggcatgccgcgttcgcttggcccccaaaaagagcaggcccaccaggcagccgaacagcatccgcgcgccaaggctcagcagcaggctttccaggggcgcgccgctgaaaaatggggaaaaaatctgatccgagggcatcacataatacgacgaggccttgaacatactggctagcccaaagcacagccccataaaaaccgcttgccccacgcccaggaaacagcccgcaaacaggatgggcaaataggcgaaagtgatggaaatgggttcgatgtggacgtaccccaaaaaagtgaaggacatcataaattccgcggacaccaagatcataaaccggtaccaatcggcatacgacgtcctccgcggtgaaaattctttcaatccgttcatccccctcagcgcctgtgtatcccctcccgccaaaagttggctttgacgaaacttgcgatttctttcggcagtgcgcgttatatataatatatattatatccaaatcttggcggcttaaaagcacattcatgtcatttttagaaaatttaccatgcgtacaaaatcggttagatagtgtctacatgagatcaagccaaaacagccagccaaatagcgatacatctgatgtgaacagcagaaaggaacgatgacgtgtttttcgcatagcgcgtagcgatccctctccagcgttttaaccacagaaaagcgttctctacaagatgcctgattttgtagaggtagcggtcgtattcgcgctgtacctttcgattcttcttgggcgggatgacaacgtttattccggccgaaagcgcgaaagcaacgatttccgatgtgtcat

SEQ ID NO: 1674 - DNA, 1636 bp, Unknown
  16S sequences of unknown bacteria
gggagccgcggcacggccgtgttcggcatctgcggcggctaccagatgctcgggcagcacatctcggacccgcatggcagcgagggcggcggcgagatctgcggcatggggctgctgcccacgcgcacggtgttttccgagggcaagcacacgacgcgcagcacgggcaccatcggacgtctcgacggcctgttcgcgccgctttcgggcgcccgggtcgagggctacgagattcacatgggggcaagcgaggtcgtgggcggcaacgcgttttgcacgctcgcgggaagcgcgacaaccgatggctgccaggtcggaaacgtctgcggcacctacctgcacggcatcttcgaccgccaggagtgcgcacaggcgctcgtcggggcgctgtgccgggcaaagggcgtggacgcgacgtcgcttgccgccgtggacatgcgcgcatacaaggaagagcagtacgacaagcttgcggacgccgtgcgcggcggcctcgacatggagcttgtctaccggattttggaggagggcatatgagcggactggacaggctcgagttcgtgaaacctgccgacatcgagggcaggagtttcgagattatcggccaggagctgggggagagaaagctcgaccccgaaaacgagctggtcatcaagcgcgtcatccacacgacggcggatttcgagtacgcggacacgctcacgttctcgccgcatgccacgaccatcggcgtcgatgccttcaaggcgggcacctcgatcgtcaccgataccaagatggcacaggcgggcatcaacaagcgcgtgctcggccgcttcgggggctcggtgcacaacttcatctcggacgaagagaccgtggcgcgcgcaaaggagcgcggcctcacgcgctcggcgatctcgatggagcgcgccgccgagctcaacgagccgctcgtgttcgccatcggcaatgccccgacggcgctcgtcaggctctacgagatgcttagcgcgggacagatggaaaagccggcgctcatcatcggcgtgccggtggggttcgtcaacgtggtcgagtccaaggagctcatcatggagctcgacgtgccctatatcgtggcgcgcggccgcaagggcgggagcaacgtggctgccgccatctgcaatgcgcttttgtacttggcatctggaaacgagaggagctaggctgtggggacttgcacgaacgcgcctgcaaaaggcacgctctacggcgtgagcgtgggaccgggcgatccggagaacctcacgctcaaggccgttcgcgtgctcgaggcggcagacgtcatcgcggcgcctagcacggggcgcaaccgccagaccgcgctcggcatcgtcgccgactgtattgcgggaaagcccatcgtcggctgcctgacgcccatgtccaaagaccccgccgtcgtcgcgcgggcgcatgacaagattgcggacgacatctgcgcgctgctcgacgaggggaaggacgtcgcgttcatcaccttgggcgatgccggcgtgtactcgacctactactacacgcacgagcgcgtcgtggcgcgcggctaccgcgccgaggtcgtgccgggcgtcacctcgttttgcgatgcggcggcgcggctgagcaggccgctgtg

SEQ ID NO: 1675 - DNA, 32759 bp, Unknown
  16S sequences of unknown bacteria
cccagccgatgaggatgcggatcagaacgcgatcgacgcggcagtgcaggctttgaacgcggcgatcgaagcgcttgaggaaatcggcgaaccaggcgatccggccagcgatgcagctatccaggcattgcgtaacttgatcgacaaagccaatgcgctggagtctgatgatgaaacgctgaacgcagcgatcgctgcggcacaggcattgcttgatgatccagacagtgtatctgcgagcgcggtcgtggccgcaatgcttgatctgagcgaagcaatcgcagaactgaatgtagaagtcagcagcgataagcttaaagaaagcttgaaagcgacgatcgattatatcaatgatatgatcctgaccaatgtggacggggtccgtccgggcaaagtccaggaactgaagacagcgatagctgaagcatatcaggtatatctgcagagcgatgacgcgaatgagatcaaagcagcgatcagcaatctgtgtgaaaaggcacaggagctgtggctgatcgtaagcaaagcagaattgaacgcattgatcgaagcggcagaaacgatcagcgcagatggttatacagatctgacataccgtgcgctgcaagcagcgatcacggcagcgaagagcgtagcgaagaatgatgatgctacgacctctgaagtgacgacggccatcactgacctggccaacgcgatcgcgggtctggaaagcattacattagatacttccgcgctcgaacatgagatcgagctcgtaacagaaatgatcgctaacctggatgactatgtgccttctacagtagaaggcctggcggataagctggcagcggcgcaggcagcgcttgaggcgacgagccaggatgcaatcgatgaagcgacaaagacgctgagagaagcaagactgaacgcgagaacgaaagcggatatcagtgctctggaagagctggttgcttacgtgaacagccttgatctgcgtgcgtacacgttagacagcgtcgtgccggtgaatcggatgatgagcaagctgacacaggcgatgaatgatgaagagatcacgcaggaaaaggtcgatgagctggccgcagagatgcaggcagccatcgatggactgcagccagtgagcgaaggaagcgtcacgacgccggatgcggcagacaccgcggcagcggcacagacaggcatgatgcttgtattgctggcagctgcaggtatggcagcgactgcagtataccgcagaaagagaaactgagcgtcagcccagtagaggagacatgatcgtgtctcctcttttttgcaatcagtgaagatatgggaaaagcgcaaaatattgaaacaaatgtcaaaatattgttattgctcctgcagtataatgaaatcgttcaggaaggcactccagccacttacgacacgatacagcatcatgtcctgaacagactattctaggttccctttctaagaaatcctcccgagtcagtccgggagggcttttctattttgttggcggatacagacaaatgatgaaatcaagaaaatagagaaggatatcaggaagaggtctgggatcacaaaaatgaattctaaatgtcaagattttgataaaaagcgcaaaatattcaaacgctttctcttttataatgtatacaagaaggaaactcgaccggttttacggaaggaggcattgaaattagatgttaccgggatgatcaaacagaggaggttatgtatgaaaagcaagatgatgtggaaaaggatgggcatgcttggcttatccacgatgatggcattttcatctgtcgcgtttcccgtacaggcaaatacagggcagcctgtagaagagacgacgcgtgagacgcagatcagaaatgtcgcgttggatggaacagctgaagtatcctgtatcacagacgacaacggacacctgcacggacctgagcatatcaacgatggagatgtgtctaccgggtcatactgggattcaggcatctctggtgaggaagtatatgcgatcctggacctgaagcaggattacgacatcactgagatcaatctgatcacatactggggcaaggtatggcagcagagctatgatcgttggtataagtataaaatctatgtatccaatgataaagaaacatggacaaaggtcgcagagaagaccaatgaggatcctgctacttcagctggagaaacatacacctttgaggatacggtcaatgcccgctatgtgaaggtgaagagccttggcggcaacaacgcagatccgaccatcttccatctggtagaactgcaagtgtttgccgaagtggaaacgaacgaaaacctggcattgaataaaccagtcgaagccgcgaatggaaatgcgtctttgatcacggacggcatcaagaccaattactgggatggcggcgagggaccgcagtccttcgtggtcgatctggaagacttctatcgcctgtcagagatcgtggtctatccgtattacgcagatggcagacattatcattatgaaatcgcggtcagcgacaatggttataattatacaaaggtcgcggagaagacgagcgatgaagcagagactgcagccggaacagcgtatgatatcgctgatcaggaacagacggcccgctatgtaaaagtaaccatgctttctaattcggcgaatgcatctgtacacatgaatgagatcgaagtgtacggtgatcctgatccggatcatgaggcagctacaccgatcgatccggaagatccggataacatcgcgtttgccaaagagacccgcgcgaacagcggcgcatcagtatccaagtggacagtagacggcgatgtcagttcatcctggagcgcgttcgtgttccccgcttgtgtcgatgtcgacctgggagccaattatgatctgtctgatgtgaccgtatatttcccggaacatgaagatgtatactatcagtattccatttatacgagcacagatggcgcgaacttcgaacgtgtcgtacagaaacacgatcacgatctgacgccggaggagggcgatacatggagcctggagggcattacggccagagtgatccgtgtgaatgtggaatttgtctctgctggcgccagctcctatctgagcgagatccgcgtacatggcagcgcaagcgaggagccagtggtagaacatgaaaatctgacgatcgatgcatttgccgatacagaatacgcagcgccgatcacagaggaagagatcttgcaggaggttcgcggcctcatcgaacggcgtctgggcgctgaatatgtcgattggttcgaattagaactggccgaaggagaaaaagattattttgagctttccatgcatgatggcaaggtgcacatcaaaggcaacgagggcgtgtcgctgacttctggattgaattattatctgaagaactattgcaacgcgcagatcacgcagcagacagaacaactgaacaccttgccggatgaacctgtagaagtcacgacgccggtgcataaagatacagactttgagatccgatatgcatacaactattgcgccctgtcttatacgatggcattctggggtgaagaagagtggcagcgtgagctggactggctggccctcaacggagtcaatgtcgtactggatacgaccggactggaagcggtctgggtcgatttcctgcagaaacttggatatagcagcgatgaagcgaaaaactggctggtcggaccaggctatacagcatggcagttcatgagcaatatggaaaactatggtggtccgctgaatgatcagtatatccttgatcgtctggatcttgcccgcaagaatcagcgcaagatgcgtgcgctgggcatggagccggtacagcaaggttatgccggcatgatcccaagtgattacgatcagatcgtcggtgatgatccggactatcagaagttcgccgatgcgatgatggatcagggatcctggggcggacagttcaatcgcccggacatgttaaagacgaacactgaagcatttgaggaagcagcagagctgttctatgaatcgcaggaaaaggtactgggcaatgtgacctcatattatgcagtcgatccattccatgagggcggtatcccgccggctgatatgagctctgcagaaatctcagaaaccgtgctcagaaagatgatggagcatgatgaggatgccgtatggatgatccagtcatgggaaggcaacccgaccatggagctgctggaaggactgggcgaaaatcgtacagaccatgcggtaatcctggatctttccgcaactactgatccgcattacaacaacagcagatggggagatgagtttgattccacgccatggatctattgcatgctggataattttggcgatcgctcaggcgtacacggggagcttgaggtcatcgcttcacaggtcccgcaggcatataccgaaagcgactatatgaaaggcatcggcatcacgccggaaggaacgaatctgaatccggtcaattatgagctgttctttgagaccgcgtgggaagatgatgagatcgatgtagaagaatggctgaaggattatgtgacgaggcgatatggcgagtacagtgatgccgcttatcgcggctggctgaagctgttagacagcgcttatggcgcaactggcgcacattggggcggattcaatgccattgccaatcagcgtcctggttcaggcgtcatcctgggaaacaagacttcgttgccttatgattaccgtacctttgccaaagcggttgaaaacatcatggaagattacgatcagctgtctgacagcgaatcttatctgtatgatgtggcggcattgctgaagcagctgctgcaaaactcacagctgacttattaccgcaattttgaatcagcctttaccaatggagatctggagaccttcaatatcaatgcggaaaaattccttggcgcaatcgagctgaccgatcagatcgcggccacacagcaggatgacctgcttggtgagtggatcggcaaagcgaaggaccgcagcgaaggctatgacgattatacaaaggatatgttcgaattcaatgccaaggcattgatcacgacatggggcggacgcaacagcgcaaggaccctgggagattacgcttaccgtcagtatgcaggattggaaagcgattatgtattgccaagatgggagaaatacctggataacaaacgcagcgctctggaaggagagacgacctatacagagatttcttatgatacgtacttcaatgacatgtgggatttcatcttgaatggcaaagaatataccagagagacgacagacgctaagagcgaactgaagcgattaggtgagatcgtgctgacggattacaacgaaagtcaggataaggtcgttacggacgacaacattgcggtcaacgcaggagtcgtatcgagcaatggcgattcgtcagacaatccgcttgcgcagatcaatgataacaacgatgattcgctgtgggtttccagcaatggcaatacacctgcttctgtcactttcgatctggatggcgcaaaggaagtgtacaagatccagaccgtatttgaacaggaaccggcagccagccgcggcttgttcatcgacttcaccgtcgaagcagagcaggatggcgaatggcagacgatctacacgggcagcacgtccagagagcagcagtcatttgacttcttgttcgatcagccagaaagcatcagtaaagtcaggatcacgatcacggatgtagatggcgcgctttatccggccatcgcagaagtgagaattttctccagcaaaggaatactgctcaaggagggttctgaaatgacgatcgaaaatggtgcgctgaaggatgtttcggctggatcgacagtagctgatctgaaagaacagctgtatgcagaagtaggagagatcactttcctcaacgacggcagcgtattggcggacgcagatgaagtgaccaatggcacacagatccagctgtctgtggaaggaacgatcgtagatgtcctgaacatcgcgctgaaagaagaaagcgtgccggaagccagcgaagcagcgatgcaggctctgcgcaatatggtcgagaaggccgttgcgctggattctgatgatgaagcgctgaacgaagcgatcgccaacgcacatgccgtattggcgaaggaagcaccgaccgtaaccgaggtcgtgaccgcactgctcgatctgagcgaagcgatgcaggcgctgaatatggatgaaagcacggatgccttgagagaagatgtccaagcaacgatcgatttcatcaaggaacacatcctgaacgatgtagaagggctccgtccgggcaaggtagaggcgctgaaagacgcagtcaaagcggcacaggatgtcgttgataacccggatgcgagcgcagatgcgctgaaggcagcgaacaaagcgatgaccaaggcagctcaggagctgtgggagatcgtgacgaaggctgaactggaagcgctgatcgaagccgctaacggttaccttgatggtgactacacagcagaaagcctcgaggcactgcaggcagcgatcacagccgcacaggcagtggcagacaatgacgatgccacgacggcagaagtcaccgaggccattacgaatctagcagatgcgatcgccggattggagagcacgatcgtggatacttccgcgcttgaacatgagatcgaactgaccagacagatcttagcgaacatcgatgactatgtgccatcgacggtggaaggtctgcaggagaagctggatgcggcaatcaatgcgctgaatgcggcagagagtcaggaagcggtcgatgcggcaacggaaatcctgcgggaagcaagactgactgcacgcaccaaggcagatacccgcgccctggaagaattgatcatctatgcaatgtctctggatatgagcgggtgcacgactgaaagcgcagcagaggtgatccaggcagtggagcaggcaaagctgatgtccgctgatccggaagcgacgcaggaagatgtggatgcgaagctggctgccttgcagaatgcgatcgatggccttgttcaggcaaatgacagcagtacagacgccgatactgaaggaagcacaacggcagatcaggcgaatactgcggcagagggcatgacgaacacgatgttcgctctgacgctggcagcgggcgcagcggccatcgctgcatatcgcagaaagaaaaactaaggtatgacaaaagcggagacagagatcacatgtctccgcttttcagtatgacgggcatgctgtcagtctgtggtgaaagtccaccggggcgtagttgccgacgaaccttaaagcgactcccaaggtttatatcgtgaggtgcaggcgagaagaaggaatagcgaaatcgcagcctaacgaataggaacttgatcccaaggcgcatgcggaggatgagtgggccaaaggtcaaaaagtcccaaaaggcaaccgtgatccgcatgtgtagatcaagtggatagacgaggaaagactgccgacttatcccgtgaggtcttgtggacggcggaatcctatctttaaaagcagtgacggtacccattggtcgaaaaaggtctgccacaagaagtcagctctggtcgtagtagtgaggaagtccctgtaaatggggatgaagcgaaggaacggataattcaacgtgttgaatcacttgatcgatccatgctttgttcatctcaataaaagcttctttgaatttaggatcataaccaacgatctgcatgatcaatacctgtctttcttgcattcgggcaattgtgcccattatatgcattcagccactgatatatcgctgaatctataacaaacgacgatttgaagcagaaaagaggatcatatggaaaactgatcagaaagctgcagatcaattgcaatgttgatcagctggcgaattatttccatatatctccaatttgtatgttataatatgacataaggatgtaatggcttacattcatgccgaaaatacagatgtgaagagaggagggcataggtatgtgtacacatctgtgggatctatcctgtttgaccggtcgtgctgtgccggaatgagattttcgggagaatacagcaggaaggagaagttcccatgtgaaaacaagggagagaaaagaagatgaaaaatagttcaaagcgattgatgaaaggcctgctggctgtgatgctcatctgttcatcattctggctgccagttgagaccaaggcggcggatggaacgacgcaggcagattcgcagaccgtgaccaagatacaggcagaggatgctcagctcagtctgccatcaggatctgatatgagctccgcttttgtatttgaacaggagcctgcttctgatgagggaggtcatatcaagacctcagtgcttggcgcaagcgtgacgcttgagtttgagggaaccggcattcgcttttatacgaagaaaggcaatggcgcagggcagctgtctgtttctgtagatggcgaagagccgcagacagtggatgaatacatcgatagcacgactgcgcagtttaaagtgaaggtatacgaggatctggagctcagtgcggacaatgaggcacatacgatcgtcctcaccacgctggatggcgacaggacaaacttcaattttgattattttgaagtgatcgcagatcaagaggaagagcctgatccagatcttgaagaaaccgtgactacggtacaggccgaagatgacgagtatgtcacgcttgatccagcgcttggctcttcgatgagtgacagctttgtcaaagaagcagagccgaattcaaacggcggcgcgcatatcaagacttcggtgatcggcgcaacgcttacgcttcgtttcgaaggaacaggcgtacggttttatacgaaaaaaggcaatggagctggaaagctttccgttacgcttgatggcgaagatctgggagagatcgatgaatatatcgacagcacctctgcccagttccaggaaatggtctttgcgcgcgagggaatcagcgtaaataatgaagagcatacgctggtattgaccacagtagacggggaacggaccaattttaattttgactgctttgacattatttccctggaaaaaaaggatacctatatcccttctccaggaaatacgacatattatctggactctacagcagctgtgggcggtgatggactgtcagaaggaagtgcgtttgattccctggatgacatcaaccagatcgagttcgcgccgggcgaccgtatcctgatcaaggccggatcatctttccttggtcagctgtatccaaaaggaagcggaggcgctgaagcgccggtcatcatcgatatgtatggcgaaggtgaaaaaccgctcatcgatggcaatggccggtattcagacgcgccatccgttcatgatgatgggccgttcggtgaagcaggctctgccgtctatctctgcaaccagcagtattgggagatcaataatctgcgcgtgcgcaactggagcgatgacaatcaggacaaagagcgcagcggcatccgtgtggaagcatacggcggcggaacatatcatcacatttatatccgcaactgcgagatcagcgatatccgcggctataatggtcaagattccatctgggatgtcgtgccggaaaatggcggaacgacgttctatggcgcaaggaccacgcatcgtaccggcggcatcaacatcgtcagctacacgaagcgagatacttccggcggcctgggcacggctggcgcgatcctcgacgatcagcctacgatctttgatgatgtgctgatcgaagacaacacgatcgaaaactgccatgccaacggcattaccacgcacaatgtccgcggtgaactggatgacaaggcttatcgtcacacccatgtggtcgtccgcggcaatgagatccgcaacgtgcagcgcgcgggcatcgttccgctgtatacctccggcgcgctggtcgagcataatctggtcgatacattccagcagacgtatgccggttatggctgcggcatctggtgtgaccgcgcggatggcatgctcttccagtacaatgaagtctgcaacggacgcaatacgatggatggcatggcattcaacctggatgacatgacggaaaacggcatcatccagtacaactatacgcataataatgtcggcggcggcatcatgctgcatgtcaggaccaattcgtataaccgcaacaacatcgtccgctataatctgagtgtcaatgacacacagggctatgccgcgcatcaggccatcgtggtctgtgtcggcgaggatgccaacaccaagatcgagaatgccaaggtgtacaacaacaccttcatcaacaacaatgtcgtgcatccggtctatcagggagatgagatcttatttgaaaacaatatcttctatctgccaaatgagggcatgtccgcgcggaatgatgcctatgtcgtcggcgcgaacacgactttccgaaacaatgtgtttgccggatcacatcctgccagcgaaccatcgggcaatggcaatgtttctgtcagcgattccccggtagccggcacattctatggatctgaatcgctggatgaagcgctggacatggctaagctgcgtcatggcagcgcggccttaggcatcggtgatgatacattgatcacacaggatggagtggaaacagatgtttatggcaatcctgcaggaggagaacaggtcaatgctggaatctataacggcgaatcggtagatccgcttccggatgccggagatccaggaacaaacccagatctggatgaagagcctgatgaagatgaataccgtgtagaatatgtcgaagcagagagcgagtccgtagagaagagcccaggctatgtcctggtggaaggcagcggctctcagggacatgcgaactcacatatttattactccaatactggtacatgggtggaatacacgtttactggcaaggcaatttcggtctactccaagactggccctggtgcgggaaccatcgatatccttttagatggcgaacaagtcggtgtggatgatcagtacactgcggcacagaccttcaataaacgcgcatataccaaggtatttgaagaagaaggcacgcatacgatccgtctggaaaacaacgggctgaagaatccgtctgcgactggtaattccttcaatctggactgcttcaagatcttccatgaaaaggaagataatgccgatctgcgatccattcgttatcagacaggaaatggagaagcgatgacgatcgaaggcttcgacccgacgatcacagaatatgacgtgacgcttccggccggaacctatggagagatccgtctcatcgcagaggcagagagcacgctggctgatatccaggccgatccggtaaccatcgaaaacggcaaggcagaaggcgtgatcacggtgactgcggaaaacggcacggaaaaaacatatcggatccacttcaccgtggagagctcatctggttccattgccagcgccgcggcgatcgatgcattgagaaacatggtggacaaggccgttgcacttggttctgaggatgaagcgctgaacgcggcgatcgaagctgcacaggccgtgctcgccaaggaagcgccgacttctgcagaagtcgtcaccgctctgctcgacctgagcgaagcgatgcaggcattgaacacaagcgaaagcatcgatgcactgagagccgatgttcaggcgacgatcgatttcatcaaagaacatatcctgaacaatgtagaaggactgcgcccgggcaaggtggacgcactggaagcagctgtagaggcagcgcagaaacttgtcaatgatccggatgcgagcgcagatgagctgaaggcagcgaacagagcgatgaccaaagcagcacaggagctgtgggagatcgtctccaaggcagaactgaacgccttgatcgaagccgcaaacggttaccttgatggaaactataccgaagaaagccttgcggcactgcagacagcaatcaccgcagcacaggccgtggcagccaatgaagatgcggcaactgctgaggtaacagaggccatcacgaacctggcaaacgcgatcgcaggactggaaaccattcagctggatacgagcgcgctcgaacatgagatcgagctcgtgagcgagatgatcgccaatatcggcaactatgtcccaagcagcgtagaaggactgcaggagaagctggatgatgcacagaacgtgctggagaacgcagcgacccaggccgagatcgacgaagcgacgaagatgctgcgtgaagcacgcctgaacgcgagaacgaaggcagacacgagcgctctggaagagctgatcgcgtatatcaatagccttgacctgcgcgcctacacgacggaaagcgcacaggccctcatccaggaactcgcacgtgcagagaacctgaccaacgatccggagatcacgcaggaagaagtggacgacatggtcaaggccctgcaggcatcggtagatgagctggtcgaggtcaacaacagcacaaatgctgaggagtcgacaaacacggcggcgatgaacacgacgaacgcgatgttcgcactgatgctcgctgccggcgcagcggcagctgcggcatatcgcagaaggaaacaataattcatgatcgacaggaggcagacgtttcgcgcgtactgcctcttttttgcaaagataagcaggaaaggcgcgctggacaggtgtgtatgttataattagaacaagagtgtaaaggcttacattcgtgggacgaggaacgacgcgaaagggaaggtgaagagtgagaatgacgcatatggaggagctggacacgatgcgtgcaggcttgtttctcagcaatgtccagcagaaaggaacacctgcagatctatgcaggttcaaaaagagatgaggagaagaaaaacaattaagatgatgaaggccgtcctggctgttctgcttgctttgacagcgattcctggctggacaagcacgacgagagcagcggatggcgccaacatgacgataggcgaaaatatcgtcttaaataaggagacgatcgcgtcttccacggccaacggtcttggaccgaaattggtagtggatggaaataccgcagctccgcaatggaattcgtccgacatgaaaaactggggcgcagcttcagatacttcgaaggatgaagtggagcagactccacagtggatcgtgatcgatcgcggagaagacgctgaaccagcgaacatcacgcagatcaagctgtggtataacgccagagtatggccgatggaatatcagatctatacggcttcagcatcagatcttgaaacgggagatacggtcgatctttcaagatgggatgaagtggtctctgtggatcggccttcttcagcttcaggaacaagcggacaagtcgtcaacggagcgggacagaatatcgccgataccaacgaaaacagtgatacgatcactgcggaaacagtgcctgcgctagatgctgatgtacagttacagcgatatgtgctcatttattttgcgaaagtaaacgcacaggcgcctggaaacaacatcaatctcagagagatccagatcttcgatgatacgcagatcgtggatgtgcaggcggccttggattcgatcagcgcatccgatctgatcatcgcggaggaccaggttaccctggatccggccgcgcagatgcagggtgttgagttttacgtccgaggcagtgatctggaacgggtcgtggacaatgagggcaggctgagcggcgccaatattggcgatcgggaagtgaccctgcttgtcggagtgagagaaacgcgcgatccggataacaaggcagaaaagaatctgaaggtgatcatccctgatcaaagtgatgcttatccgcagtcttatttccctgccgttgacacgcagaatgagaagccggaagtcattccgacgattcaggagtggtatggctatcagggtgaattcaagcttgatgcgcagtccaggatcatctatcatgacgaggcggatgtcggacttgagcgtgcggctgaaaacatgaaagcagatcttttggagatcactggtctggatcttccgatcatcgccgcagatgcgtcagcggctggtgccagcgacatctatctcgcgtcagtgagcgaagacagttatgacgttggggatgaagggtatctgatgatcactgatgataatggtttgcggatctattcgccgacttacatcggctgtctgtatggaacgatttccgtggaacagatcctgtatcaggctgaggatcatttgagcgtgcctaaggggatcgcccgtgattatccggcatatgaggtccgcggcatcatgctcgatgtggcgcgtacgccgtatcgtctccagcagctgcaggattataccaaggtcatgctctggtacaagatgaatgagtatcacctgcacatcaatgataatgacaactgcaacattactggctcggtggaggatcattccggattccatcgtctggaaagcgatgtgttcccttcactgaaatctgaagtcaagcatgccggcataccagaggaactggtcaatacggattattatctccataatgaagactatcaggggaatccgacctataccaaggaagagtggagaacgctgaaggagacatgcacggatctgggcatcaacatgatcacggagatcgatctgccaggacattctttgctgtataacaaatatgcggaggaaaatccggacaatatcccgcagctggaaggcgggatcaagtacacggccaatgcgctgtcgaccaatggcggagcggaactgctcgatctgaccggggaaaatgcagaaagagcgctctggttcgcgcagaccttatggaatgaatacactgatcctgatcaggaaggcggcccggtcatctatggcgatgtggtgcacatcggcgcagatgaatactgggatcacagcactgcaggcatccgtgataaatttgcattgtttgcggacagccttcgtcaggtcatccagggaaatcttgggtctgatacaaagatccgtatgtggggagctggttctgtcatgttctctactgcgggttctgtattggaagatgtcgatctggcctctaattatcaattggatgtttggtatcatggttatgaagatgctaaggcaaggatcgcagaagggtttgaagtgatcaattgccgtgacgcatatttatatggaaatccgggacgctcaaaccgtgatgtgccgaatgccgaatacttgttcaatgagtggaatccggctatgtttacagacaatacgcctcagccgggaaccggaagcaatccgctgcttggtgaaccaaatctgcttggcgcaaagacagtgatctggggcgatcagagtcaggagggcatgacagagcgtgatgtcaatcagcgcgtgctgcgcgcggtttccatcgtcagtgagaagacatggggcgcgacggatgaagaggatacctttgaacagtttgaacgccgcgccgcacggcttgcggaaggtccaggcactcagatcgccatgcaagttgattccgcaagctcactagtattggattatgattttgatcatctttccgcagatggcatgaccgtatacgacacgagcggaaatggctatgatggcacgctgagcgaggctggaaccgtgagcgaagatggttatctgcgctttgaaggaggaaagctgagcactccgttggagacgctctcttatccatatacggtggcgttcaatgtgcgtgtcaacgcagaacaggcagcgaagaatacaacagcttcttctatcttctctgggtatgacggacaactgcagatcgctgggacggatgatggcagcctcagcgcaaacgtaaattacttcaccagagatcttgattaccagattccgacagatggtacagaaatcagcgtgatgttagtaggcacattccaaggaaccaagttgtatatcaatggagaattacagacattcctgtcacagaagagcgatcaggatggtgtcgcacctggtaatgtcagcacgatgtacgcttctttcccgcttccattggaaaagatcggtgaagggctgtatgcggaattggcagatctggaagtatatgatcgcgccttctcttcagaagaggcggcttcctattacacagaggagtggcaagagccagtaaataaaacaaatgtcgcacaaggcatgtatgctggcggaacatcaagaacgatcggcgatggcaccggctacgacaatagcgatggaagagtgcgagtcgcattcaaagcggtggatggcgacgcgtttgaactggcaaacgatccagcagatcagatggacgtgtcaacatctgatatttactcgtactggaaaggaaatagtgctgacagcgcgctgagcgtcgatcttggagaagtcagagaaatcagtgagatacagatccagtggcgttatggcggcaaagggcgagattttgatattcaggtttctgatgatggcataaattgggagagcgtttcttcgatcagaaataatcaaaatttcctcagcgtgattactctggacgccccgatcgatacgcgctatgtacgcatgcagggcattgcgtcaaattcagtgtctggttatatgatccaggaattccttgtttatgaaactgcagataagacctcccttgggcaattgttagatgaagcagaaaagatcgtaaatgacaagggacttggatttgaaacacagaatgagacagatagagaactattcgcagctgtagttcaggcaagggcggttcgataccatgctcagatgagcgtaagcgatgtgggaaaagccacggcgagattgagagcggcattagacgcgcaggcaacagaacagcaggtgactgtaacatttgatacaaatggcggaagccaagtggatccgcaaacgatcgaaaagaacagtacggtacatcgcccggatgatccggtaaaagaaggctttgtatttactggctggtatattgataaagagtgtacagagaaatttgattttgatgccttgatcacagaggatctgacgatatatgctggatgggacaaacagcagcttccagaagatccggccagcgacgcagcgatcaaagcgttgcagaccatggtcgacaaggccgtcgcactgggctctgatgatgaagcgctgcaggcagcgatcgaagctgctcaggctgtcctgaatgaagagacgccgacagcgaccgaagtcgttacggcattgctcaacctaagcgaagcgatgcaagccttgaatatcagtgagagcactgatacattaagagctgatgtacaggcgacgatcgatttcatcaatgagaatatcctgaatgacacagagggactccgtccggccaaggtacaggcgctgagagatgccgtacaagcagcgcaggatgcagtggacgatcctgaagcagacgctgatcagctgaaagcagcgaacaaagcgatgaccaaggcagcccaggaactgtgggagatcgtgacgaaggcagaactggaagcattgatcgaagctgcaaacggctacctcgatggcaactataccgaggaaagtattgcgatcctgcaggatgcgattacgaatgcacaagcagcagcgaacaatgatgacgcgacgacagcagaagtcactgacgccatcacgaacctggcgaacgcgatcgctgctctggaaagcatcacgctggatacgagcgcgttagcacatgagatcgagctcgtgacagaaatggttgccaatatcgataactatgtgccttccacggtagaaggactggcagacaagctggctgacgcacaggcagcgatgaatgcgacgacccaggaagaggtcgatgccgccacagagaccctgcgtgaagcgcgtctgaacgcgagggcgaaggcagatatcagcgcactggaagagatcatcgcgtatgtgaacagtctgaatctggcaggttatactgcagaaagcaggaacatgctggatcgcacgatctttgaggtcaagaaagtgctggctgatccagaagcgacgcaggaaaaagttgatcaggcagtgcagacgatgcagacagctatcgatagcctgcagccagtagaagacagcgcaggcagcacgaatgccgatacgacgaataccgcggcagcagcacagacgacagcatttgccggcatgctggcagtatcagcggcagcgatcctgatggcgaacagacaccgtcgtcaggcaaaataaaattatgatcagactgtggtgatctgtgtcatcacagtcttttcatgttcgctgaagccaatgcggcttatgccctgcagatgcatgcttgccccgggcacggacagctgacaaatgcaggagaattattatataatgagagaagtcagagccttgctatatgacaaaggaggggatacgcatgggaaagatcaatgtgctgagcgaacatctgagcaatatgatcgcggccggagaggtcgtggaacgaccaagcggcatcgtcaaagagctggtggaaaacagcatcgatgcacatgcgcatgacattgctatcgacatcatccagggcgggatcgaaagcatcgtcatcacagatgatggagaaggcatggatgcacaggatgcgaccacagcgttcgagcggcatgcgaccagcaagatgaaagaagagaatgatctctggaacatccacaccatgggattccgcggagaggcgctcccctctatcgcatctgtttcccatgtcatcctgcagaccaatgatggtcatcaggggacggaagtccagatcagctatggtaaattcgagggcgcacatccagctgcctgtccggctggcactcggatcgaagtcaaacatctctttcagcgcacaccggcccgcttcaagcacctgaaatcgccgcagtatgaattttccctgatcagcgatgtcgtgcagaagtttgcgctctcttatccagagatccgttttacgctgacccatgagggaaagatggtctttcagaccaggggcaatggcagcctgcgggagatcctcatgcagatgtatgaccgcagcgtagccaaaagtgccatcgagatccatggtcaggatcttgattattcattggaaggcatggcggtccagcccaaatataaccgagcgaccaagtatttcatcttcttgttcatcaaccgccgcatgatccgcagctatcatttgcaaaaggcgatcttggatgcgtaccatccttatctgccaaaggaccgctttccgatcgtcgtcctaaacgtcaggatggacgcgcagcttgtggatgtcaacgtgcatccgagcaaatgggagatccgcctgtcaaaggagcggcagctggaaaagctcatctatgagaccttgcgcgaagcattgaaggaagcgttcgaagtcgtcgagctggaaagccgcaaggaaaagccgaaggtggaggtgcagacgctgcagttttcctatgcgcaggatgcacagatggaacagctgcagcgcgaaatcaatgagagctttgcccctggcgcggcattggcagaagaacctgctatgcctccggtgtccacctttgcggtcgaatccagccctgcgcggcagaaagaacggcatgatcagctcaaacaggagctgtatccaacgccggagcctaaatcagagccggtcgcttcgcctaagccgaagcagccagcaaaacgagaagaagaaccggtggaaaaggcgcctgagcagaaacccgcgcccgttcagcagtctgcgccgcagaaggaacccgagccggctcgtcagcgcctgccggaattgaaggtcatcggccagtttcatcgttcctatatcctcgctgagggagaggagggactgtatatcatcgaccagcatgccgcccaggaacgatatcattatgagcagatccgcagcgcgatcttgtccggacagaaagatacgcagatgctcgtgcttccgctgcagatcgagacgagcccgcatgcggtcagtcggatcgatgagctcaacgcgctgctgggcagcctcggcattcagtttgaggcctttggcgaacagaccttgctgtgccgggagcttcctgtctggatgaaggatgtcgatgaagcggctttcctgcgcgatatgatcgatatctggcaaagagatgagcgcatcgatatcgctcgtctgcgggaacatgccatcgccacgatggcatgtcatagctcgatccggttcaaccgcaccttgaacgaagaagagatgaagcgggtcatcgatgatctgaatcaatgtgagcagccgtttcactgtccgcacggccggccgaccatcgtgtgcatgagcgacgcgcagctgcgcaaggagttcgaacgtggctgagcaaaaggataaggtgatcgtcatcgtcggcccgaccggcgtgggcaagaccgcgctcagcgtggaactggcaagacgcctgcagggagaagtcatcagcggagattccatccaggtgtaccgcggtctggatatcggcagcgccaaagtgacgaaggaagagatgcaaggcgtcacgcatcatctgatcgatgagctggatcaccatgaagaatataatgtgaaagtgtttcaggaacgatgccgggaatgcctgcaggagatcctggataaagggcgcatgccgatcctgtgcggcggcaccggcctgtacatcaaggccgcgctctatgattatacgttcgcccaggaagagccggatgaagactatctgcgctttctggatacgctgagccaggagcagctgtacggcgcattgcagatcgtggatccgcaggcgagcgaaaagatccatccgaacaaccggaaacggatcatccgcgcattgagcatcgtccatcacggcgaagccaaaagcgccatcgaacagcggcagtctcatcagccgctgtatgatgtgttcatgatcgggctgacgatggacagagcgcacttgtatgcccgtatcgatcagcgggtggacatcatgctggagcgcggattgctcgatgagatccgcaccctgatcaagagcgatgatgactgggatctgcacagcttccagggcatcgggtataaggagtggaagccctatttccagggaaatgcttcgcttgagcaatgcagcgaacaagtgaagaaaaactcgcggaactttgccaaacggcaatacacctggtttcgcaatcagttcgatgtgcactggttcgatgtggaaacggcggactggaaaacacagctgtatgcacagctggaggaatggaggaatcggtaaatggaaacggcagaatccaggacatcgctgctcatcggggagatgggtttgcagcggctgaaacaaagctgcgtgctcgtgctgggcgtaggcggagtcggctcctattgcgccgaagcgcttgcccgcagcggcgtaggaaagctgatcctggtggacggggacattgtagcccccagcaacctgaatcgtcagatcatggcgcagtttgatacggtaggccagcccaagaccgcggtaatgaaagcgcgcatccatacatatcgcagcgatatccagatcacttgccatcaacgcttttatgacaaagaagcaaatgcgcagatcttcagtgagccagtcgattttgtcgttgatgctatcgatacactgtctgccaaacgtgattgcatcgcatattgtctggcgcatcagatcccgttcatctccagcatgggcatggccaatcgcatggatccgaccaagatcgagatcatggatctgatgaagacaagctatgatccactggccaaggtcatgcgccagatgatccgcaaggcagacatccgaggaaagatcccggtcgtctgttctactgaacagccgatcatccagcatcagatcatcaatgcggaaggaaagacaagaaaggaaaagatgccgccggccagctcttctttcgtgcctgcggcagccgggcttgcctgcgcgtcatatgcggtccgtcagctgttaaagtaaacaaaagggaaatgtccaaaaagaagacatttccctttttagcagagacagatcaagatcacggcgtggatgatcgtcatcagcgggacgagaaagacgaaaggcatatcgctgatcttatggcgaaacagcgtcattgccgcaaacgcgcccagggaaccgccgctcaccgtcaggatgatcaatgcagattcccggatgcgccaagcatgtcgcatcgccttggccttatcggccgcataagcgataaatgcgctcaggttcatgatcagcaagatgagcagaaaggacacatgcatgagggcatctgtatacagccatatgagcgcggcatgaatgatgagccagacgatacagaacatcaaaggaacatcgccttgcttttttggtttcctgcataaaactgccaaaatagtgcctgaagcgccgccgatgatcaatgccagacgtcctgaaaagcgcagcatggcattacggctgccataaaagaaaaacgcggcggcatttgtgaataacaggaaaataaagagtgaatgattcatgaacatccctccatgagccaagatgtatatcaaaatattacaagaaagcgcaaaatattacaatttgttttagtgtaaaataagaaggaagaaatgacagcgattacaaatatgttgtcattccagcaagagaggagagaattgatgaattacctgagaaaagggtgcatgctgctcatggcaggcattttggctgccagcggtacattcggcaccattcaggccaaggccgcggaagatccacagatcgatgggatcgaagtcagcggaaaaagcacttccggacatgaagcaagcctggccgtagacggaaatgtggagacatattatctcactccttcgtcttcctccatggaagattattatcgttacatcgatctgaaactggatgggctgtatcacatcacgaagatcgagatcttcaatcagaccaatgatacgtacaatcattatgagatctatgcgtcagagaccggcgcggaatttaacaagatcgcatataaggatgacgatacattggcagacgcggatggagagacctatgccgtagatgtcaatgccagtcagctgcgcatcaatctgagctataattccgcgcagatggaaggcaatctggcagaagtcaaagtatatggcacgcgcatcggcgatgcccagacctacgagacaaacatcgagacgactgatttcagcgaaacacagtgggctgaagaatacgagcggttcgagaatgatgaagaatatgcgaaccagaagacgatcaatgagatgtccgagctggtcggccgcgtcatcggtgacgaatggaaagacgatttcgtgttcgcgctgcgcgaggacaacagcgatggcaaagacatctttgaagtcagtgacggtgaggatggcaagatcctcattcgcggcaacaatggcgtcgccatggcatcgggctttaattactatctgcgttattactgcaaggtagattacaatcctctgtttgcttcacagctggatatgccggaaacactgccggaagtcggtgagacgatcgtcaaggaaacggattacgacgtgcgttatgcgctgaatttctgtacatattcctatacgatggcattctgggactgggatgaatatgaagcgttcctggactgggccgccatgtccggcatcaacctgatgctcgatatcgtcggtcaggaagaagtcatccgccggaccttgcaggattacggttatactgacgcagagatcaaagagtatctttgcggaccggcttactttgcctggtactatatgcagaacatgactggttatggcggggaattgccagacagctggttcgagaatcgcgtggaactggccagaaagatgcatgaccgtatgcagacgtatggtatcaccccggtgctcagcggtttctccggcatggtgccgaccaactttgatgagaaatatactgatgcgaccgtcatcgagcagggaacctggtgcggctatacccgtccggatatgctgcggacatatgtggatgacggacagaaagattacttctccgagatggctgatcgtttctatcagaatcagcgcgatatctttggcgatgtgaccaattattatgcggtagacccgttccatgaaggcggacgcaccggcgacatggatgtttcccttgtctatgagaccgtccagcagaagatgatcgaaaatgacgaagatgccatctggctgatccagcagtggtccggaagcatgaccgatgccaagctgagcggattgaaagtcaaagatcaggcactcgtcctggatctcttttctgagatcaatccaagctacagcgtgatggagcgcaacgatatcccatgggtatggtgcatgctgcataacttcggcggccgcatgggcatcgatggcaatccggacgatgtatcacagaatattccggacgatcatcagagcactgaatatatgcagggcatcggcatgacgccggaagccattgaaaactcgccgatgatgtatgaattgctctgggatatgacatggaccaaagatccgatcgattaccgtgaatgggtgcaggattatgctgaacgcatttatggcggaaccaatgaagatatccagcgcgtatgggagatcatgttggaaactggatacaacagcaaagatacatattatcaaggcgcagctgaatcggtcatcaattcccggccgaccaccaacttcacttctgcgtccagctggggacattctgatatcaactatgataaggaactgctggaagaagcggcagccttgatggcaaagaattatgatacattcaaggacagcccggcatttgtttatgactttgtcgatatcctgcgtcaggtagttgccaacagcgcgcaggaataccatacagaaatggtgagcgcatatcagaatggtgatcttgagctgtttgatgccatttcttctgatttcctggagatgatcctgcttcaggatgagatcctttcttgcagcagtgatttccttgtcggcacctggatcgaagacgcaagatcgatggtagcggacagcgatgactggaccaaagatctcttcgaattcaatgcccgcagcctgatcacgacatggggcggctataagaatgccaatggcggcggactgcgcgattactctaaccgccagtgggccggcctgacgaaggactattattatccgcgctgggaaaagtgggtgaatgatgcgaaagcagcattgaccgatggcactgcgatgccaagtaccaattggttcttgatggaatttgaatgggccaatgaaaaatcagaccaaggcacagcttacgcgaccgaagcaagcggcggagacctgaaagccttgagccagcaagtgctggataactatacgatcgctgatctggaagaactggtggagacaccgagcacccagagcgagaaccttgcgctgggcaagagcgtgaatgcgtcgatcgcgacagccgaaggctcatcgactgacctgttgaccgatggcggaaaagagacgctgtggcaggctgctgaacatgcggacagctttacgctgagcatcgatctggaagaagaagcacagatctccggcatggagatcgacatgcagcagatcgcgggcggcttcccatacagctatgtcgtggaagcatacagcgatggcgcatggcagatcgtggcagaagatgacagcggcgagatcacgagccagacactgatcgactggcagggcacagcttccgcagtgcgcttcacctttacgagtgatgatgcaagcatcgtaccagctgtggccgagctgatcgtatatggcgtacagcaggaacagaaaaactatgaaaatgtggcgcttggcgccagcgtgacgacaccgaccggcgaaaccagcctgatcactgatggggataccggatcgctctgggtaagcaatggtgactattatccggcgcagatcgtcctggaactcgatgaagaacaatatgtagatatcatggagctgtactttgaaaaaccagggctgcgttatcagtacgatgtcatcatagaggatgctcagggtaatcagacgaccgtacaggatatgtcagacaatacccaggatctggctggcatgtacacgatcgagatcggtgcaaatgtgaagaaagtgtatgtcaacctgaaggcacgcgcggaaggcggcgaattctatctcgcatggccggcactggcagagatcgagctgcttcaggaacaggccgttcgtttcatgggcgcagatgtcgcttccggaaagacttctcaggtcatcaatgccaatggcacggtagatacagatatcctgaccaatggcagcacatctgatctgtataatgtcggatcagatgtcttcccgacaactttccagaccgactttggccgggaagaaagcatcgaacaagttgtcgtgcattttgaaaaggcaggcctgcgcttccaataccgggtgatcctggaagcagaagatggcacgcagaccgtcattcaggacatgagcgaaaataccgcagatatggtccagtcttatacgatcacgctggatgaggcagtaaaggcacgcaaggtattggtggagatcagcggccgtgcagccggcggtgagttctacctcgcttctccggcactttctgagatcgaagctttcgccaccgcggaaaatgttgccgctgacgcgcagatcaccactgatccgcagctgagcgatgaagatctgcataagctgctcgatcaggattcagcgacatcgatcacattggcagaagacggtacacaagtatttaaattccagctgccgcaggagatcgacctgtatgcatatgagatcattaagaagagcgatgctccgctgcgctttcagatcgaaacaaagctgggagatggcgaatggcagatgttcgttgatcgcagtgtcaacacatccgacacagaccgctatgtggagacactggacgctgtgctctgcgacagcatccgcctcacggtaaacgccgcaggcgatgagctgcaggatatcgctttctacagcagcaaccagagcgctgaactgctttcctacatctctgatctgcgcagcaaggtgaacggtacgaccgttggtgaatatgccggaaactatggacaggcgcagtacgacgcgctgcaggccgccatcactgctgcggaagaactggcagctggagagatgacttccatggctgtcagcgcacagaaagaagtgctgagcgaagcatatcgaaactatctgctcagttatgtcagcatcgaccgcggtgcgctgttacgcgaactgaacgaagcagagatcttgatgagtcacgcggatctcgcagacaatgaggcattgaatgccgcctatgacagcgcgagaaccgtatatgaaacgtataaagtcacccaggcacagctggacgacgcgcagcaggccctggcggcagccaatgataccgcattggcactgctggaaggaaaagaagcattgcaggcacagatcgaactggcgcagcagctgttagacagctgtgcggtcggcagcgataccggcaatgtttctcaggaagcgcatgatgcgctggccgctgccatcgccaaagcgcaagatgcattggacagcacagatgcttctgtactcagccaggccgcagaggaactgaaacaggctgcagagacgtttactgatcagatcatcacgaccgataagagcgaattgaatgaatggatcgctaaagcgcatgctttgcagggatccgcatacacgaccgacagctgggctgccctggaaacagcactggcccaggccgaaacgatcttggcacagtcggacagccaagaagaagtcgatcaggctgccgcagatctgcagaacgccatgaatgcgctgcaggccaaggcgagcgcatccgcgctgaacgctttgcaggatatggtcggcaaggccgaagcgcttgattctgatgatgatgcgctgaacgcagcgatcaccgcggccaaggcactgctcgctgatccggacaacgcatccgtgaccgcggtcgtgagcgcattgctcgatctgagcgaagcgatgcaggatctgaacggatccagtgatgtggaagcgctgagagctgatgtccaagcgacgatcgacttcatcaacgaacacatcctgagcaacgtggaaggacttcgtccggctaaggtgcaggcactgaaagatgcggtcgccgcagcggaagagctgcttgccagtgaagacgcaacggcagatgcgctgaaggcagcaaacaaagcgatgaccaaggcggcacaggagctgtgggagatcgtctccaagacagagctgaacgccttgatcgaagtcgcaaacggctaccttgacggcagctacacgacggaaagcctcgaagcactgcaggcagcgatcgatgccgcacaggccgtagcgatcaatgacgatgcgacgaccgcggaagtcacagaagccatcacgaacctgagcagcgcgatcgccaacctggagaccatcacattggatacgagcgccctcgagcatgagatcgagctcgtgagcgaaatgatcgccaacatcgataactatgtaccgagcagcgtagaagggctgcaggagaaactggatgcagcgaagacggtcctgagcaatgcgacgagccaggcagagatcgatgaagcggtgaagagcctgcgtgaagcacgcctgaacgcgcgtacgaaggcagacacgagcgcactggaagagattatcgcgtatgcgaacagtctggatctggctggctatgctgcggaaagcaggaacatgctggatcgaacgatcgttgcggtgaagcgtgtgctggctgatccggaagcgacgcaggaagaggtcgatcaggcggtgcagacgatgcagacagccatcgacagcctgcagctggtggaaaacagcacaggcagcacgactgccgatacgacgaataccgcggcagcagcacagacggcagcatttgccggcatgctggcagtatccgcggcaggcatcttcctgttcagaagaaaaagacagatgaagtaataagatgtcaccgaacggggactttggcagatgagccaaggtcctcattttatctttatatttaaaaatccgggaaacattatcttttcctgtatccttttgctaaaataagaaggagagtacatgttttcaggaaaggagtgggctgatgcgaagcaggctgaacaagatcttcctgtctatattcgtcctgctggcagtgataatgagcggctgtcagacacagagcaggggtgcacaggacgaagactacttgtattttttgtttgcaacgccgctgcgcaatcatgtcatctggctgcaagccaaagaagggttcgaacaggcctgtatggaccttggcatcaaatatgactggctgggaccggatgtcattgatacagaagcaatggaaaaagtgatgcagaccggattcctgcaggatgtcgacgcgatcattacccaaggcgtcgtaagcgacgaggtcgtcaatcttgcctgggatctgggcatcccggtctttttggtcgacagcgatatgccggattcagaccgcatctgttatatgggaaaagattttcgggaacaagctgaactgctcctagaccatatcgaagaacgagtggacccggataccgaactgcggatcgccatccaggtggcagaatcaagattcaccatcgcccaggaacagatccgtcagatcgaagaagtgttcgctcagcatcccggcggcgtggagatcgtcagcgtcagcgattcgaaatccgaagaggcgcgggcccgcaaagaatgggatgcggtcatccaggaacatccggacatcaacgtggcgatcaactttgcggcagagtctgcggaattctgctgggaggccgtcaatgacagcggtctgcgcgacgatgtgctgatctacggcgtcgatgacatgccggtcaacctagagctcgttcgcgaaggaaaggtggacggcatcgtggcgacttcgttttatcagtatggctaccacagcgttgaactgctgtatgattatctggtgaacggcaatattccccctgaacaggaaaagaccgatctgcagatcgtcgatcgatccaatgtagagacataccgggaggatgaacatgaaagccgctaagaagatcagcttccgcgctaagatccgcaagacgatgctgatgacggggatcgtgctgtttctgatcatggtcctgtccaacttcttcaattacagcacccgcatcagctataaccgggtgctggatggctatgatacgctgcatgcgtattatgagcatgtagaatcggcatcagactatgtgaagagctatctgtccacagacagcgaagagaccttgcggcaatatcacgacatgatggaggaagcgcaccgggatgcggaactgctgcgcagcaacaccggactgaatgaaagctggcgctatgatctgctggagaacatgctggtcagctttgagcaagtcgtcgacaatgtgctcgtgctgtatcagaacagcaacggctcaggagaataccgcaccaactatgacatgttcatcgtttccggcgatctgatcgccgatacttcaagcgattattacagcctgatcactgcatccatgagcgatcaccgagatacgatggagatgctgcagaatctgacgtggatcagcttcatcatcgcgtttgtcctggtcatcttctggttcatctattatgaccgttcggtcaaccatatgcttggccgcccgctggaagagatcctgcgcaacatcgagcagatccagcaggggaaatatgatctcaaggatatttccagcagcagtctggagatcacccagctgtgtgaggcattggaagatatggcacattcggtctcgcagaacatcgagaccatgcaggaacgcgaccggctggaaaagctgctgctggaacaggaaaatgagaacctgaagaaagatgagctgctggcacagagcgaactgaagatgctgcagaaccagatcaacccgcactttctgttcaacacgctcaatatgatctatcggatgtcgctgaaggaaggcgcggacgatgcggcggacatgctgatgaagacgagccagctgctgcgctatggactagacaatcaaaagcggatcagcagtctgcgcaacgagatcgagatgatcggaaaatacatcgagatccagaagaagcggctgggcaagcgagttaggttcatcctggaatacggcgatgggcaagagcagatcagcaacatcagcatgccggggatgatccttcagcctctggtggaaaacgcgcttcagcacggactgcatgatgtgacagaaaacggggaagtcgtcatcagcattcagcagcaagacaatgtgatcacgatcagcgtttctgataatggcaaaggaatgaagccgcaggagctggaagagctgatcctgaatgattatcagatgaaaggcgggacacatcttggcttatacaacgtcatccgccgcctggaaatgtattttcatgaccagatccagatcagcctgcacagcgatgaaggatgcggatttgaagttttcatggaaatcaggcaaaatatacagtaagggaggtggatcagatgtatcgggtactgatcgcagaagatgaacagatcgaaagagagatgctgatgcagatcgtctcagcacattttccgacgatcgatcagatcattcccgcggaaaatggtcagcaggccgtagacctgtttgatcagtatcagcctgacctcatcctcatggacatcaacatgccgctgaaaagcgggatggaagcgctcagggagatccggcagatcgcaaagaaggcgtttgtctgcatcatcctgacgtcttacaacgatttcagctatgctcaggacggcattcgcctgcatgtggacgattatatcctcaagccggcggaagacgcacagatcatcgcttcgatctctgccgggatcgagaagctgcagcaggagtggaacatgcatgcctctattcgtgagctgctgaggcagaatgaggatgtcagctcgctgctcgagtcagaatgcgtgttagccatcatcaaccagaaagaggaaaaggtcatcgcgcgatattttcagatggctcgcatgagcgcgcgctatgccttctgccttgtcgctgaagtggaagaggacaacatcctggtggcgcagatccgcggcatcatcgaggatgcgggatatgcttgcatggaggctcggctgagcggatgtcagatcctatatgtcttttcctctatggccatggacatgaaagaacgcgaccggctgaagaacctgacccggccgctgctggagagatctggcatcccctatgcctggggaccgcagcaggatcagatcgcccgcttccatgttgcgttcgacgatgccgtagcgcagctgcgctttagggagacagacgaggaagagcgagatccctttgtctggaaaagcgtagaacagctgctttctaatctggaagagacgcagatcgccgtgatcgtttacgatttgtatgagtcgctttcttccatgaatatcgaccgca

SEQ ID NO: 1676 - DNA, 6224 bp, Unknown
  16S sequences of unknown bacteria
ccgcccgccgttccggcccccggcgcgggcgcagcctgagggtggatatcgccatcgacctggagcaggcgtataaaggggtaaccaagcaggtgaacatcgggcgcaacgaagcgtgcgcctcctgcggcggtacggggaaggtcatcaaagacccctgcccggactgcggcggcaagggcgtgcagtataaaaagcgcaagatcaaggtaaacatccccgccggcatcgacgatgggcagatcatcaccatgtccggcgagggcgaggcaggcacgcagggcggcccgcccggcgatatcaacgtcgtggtctccgtccgcccgcacgagatctttgagcgcaacggcccggatctgtatatgaagatggatatttcctttgtccgcgcggccttgggcggcgatattatcgtgcccaccatcgaccaacccgtgaaataccatgtgccggagggcacccagcccggcgctattttccgcctaaaagggcagggcatgccgcggctgcgcggcatcggccggggcgatctgtacgtgacgctcaacatcgaggtgcctaaaaagcttacggaaaagcagcgccagatgctgctggattttgaggattcgctggagggcagagagccaaaggaaaacggctttggaaagatctttcataagaaaaaatgagaaaggccccaaggggccttttttatgtgcgcaaaatcctgccggcgcagaataggacgggataatgatgcccggcgcctttgttttttggcagcaaggcccggcaaagctcagccgatgggccggacatggccttgggccgctgcccccaatacggcggccataccgtatcatgatgcgccccggggcagtgcagtttggcaaaatcatggagaaggaccgaatatggcggcacaaaccgcacattttgcgtacgtccgttcccccaggcgctcggttgtgctatactatccctaccaactccctaggaggcaacagctatgcagtggattgaaattaccatacataccaatacaaacggcgcggacgccatggcggacgtgttcttttcgctgggcattgcaggcgtttccattgaggacgccgccgatattgccctctatcagcgcgaaagcaacgactgggactatatcgacgaaagcatctttgcaaaccgcggcggcgatgtcagggtaaaggcctatatccaggacgagccgcacgcccccgccatcctggaagccgtgcgccaaaaggccgcggccgtggccagtacccccggctttgacgccggccccggcacggtggaaacgcaatccttgcaagaggaagattggtcggaaaactggaagcagtattataagccctttaccgtaggagaaaagctggccgttacgccggattgggagccgtatacggcggacgacgggcgctgtgttttgaccctggaacccggggctgcctttggcaccggccagcatgagaccacctacctctgcctagacctttgccagcggtatgtccgccccggcgcgcgcgtgttggatgtgggctgcggcaccggcattttgggcattgccgccgtgctgctcggcgccaaggactgcctggcagtggatcgggacgaagtggccgtgtccgcctgccgccacaacgtggcgctcaaccattgcgagggccgcgtggcccctgtgcacggcaaccttgcggaccaggccgaagggccgtatgatttgatctttgccaacatcgtggcggacgccgtcatcgcccttttgccggatgccaagcggctgctggcgccggggggcacgctgattgcctccggcattattttgggccgggaaaacgacgtattacaggccgccaaagccctgggcctttcggtaaagcagcggcaaagcaagggcgaatgggtcgcccttgcgctggagggctgagccatgcctgcgtttttgcccgataccatccaggacggcgccgctgtatttttggaggacgcgccgcatatcgcccgcaccctgcgccatagcgtgggggacgagatagacgccgtagacgggcaggggcatacgcttgtctgccgcctgaccgccgtttcccccaagcgggtggaggctcaagtgctgtcttgccgtgaggccggcacagagcccgccgtacgcatcacggtgtaccaggccatctgcaaaaaccaaaagatggaatccgtcgtgcagaagtgcagcgagctgggcgcggtatccattgtgccggtgcagacccagcacagcgagatcccggccaaggactaccaaaagcgccagccccgcctgcaaaagatcgcccgcgaggccatcaagcagtgcgggcgcagctttgtgccgcaggtgggggatgcctgccgcctgctggattgcgacctatccgcctacgatcttacgctgtgcgcctatgaaaccacgccccggacctcgctgaaaagggcgctgtcctattgccatgcccccaagagcctggcgatcctcattgggccggagggcggctttgcctcgtatgaaatcgaggcgctgtgccagcgcggcgtggtgcccgtttcgctgggcccccgcattttgcgcaccgaaacggcgtcgccggcgctgctggccgccgtattgtatcattacggacagtgggaggattagtatgaaggttgcgttttataccctgggctgcaaggtcaaccaatacgatagccaggccatggcaggctatttgcaaagggcggggcataccatcgtgccgtttgacggcccagccgacgcttatgtcatcaattcctgcaccgtgacggcggaatcggaccgcaagacgcgccaggccatcggcaaagccaaaaagcacaaccccgacgcccttgtctgcgtggcgggctgctatgcccagcacgcaggccctgcgctcttgcagcgcggcgatgtggacgcggtgctgggcacggggcataggcagcgcatcgtcgaggtgttggaaagcgcccggcacgggcaaaagctggatgctgtggagccataccgcgccttggccccctatgaggaagggcagggcgcgctcatcgagcgggcgcgtgcgtatttgaaaattcaggatgggtgcgatcgacactgtacctattgcatcatccccgcggcgcgcggccccatccgttcccgcagcctggaggcgctgcgggcggaaacgcagagcgccgccaaggccgggcatgctgaaatcgtgctcaccggcatccgcctggccagctatggccgcgaacgcgggctgacgctggcagacgcgctcaaggctgccgccgagacggatgtgcagcgcatccgccttggctcgctggacccggacgagatctcgcaggacctaatcaacgcctgcgctgcggaggaaaaattctgccgccaatttcatctttcgctgcaaagcgggtgtgacaaaacgctgcaccgcatggcgcgccgctataccacggcgcagtttgccgatactgtggcgcgcatccgcgccgccatgccggacgcggtgtttaccaccgatgtgatgtgcggctttgtcggcgaaacggaagaggaccaccgcgcttcgctggcgttttgtgaaaacatcggcttttacaagctgcatgtgttcccttattccaagcgggagggcacggctgcggcgcgtatgccggggcatctgccgcaggcggtaaagcagcagagggctgcggaaatggccgcgctgggccgccggctggagcaaaggtatttgcagcagatcgtcggcacagagcaggaggtcgtgctggaaacgcagcaaaaggacggctttttggggcatacccgcggctatgcgcccgtattggtccggggcgaggggttggccatgcagcaggtccggcgcgttttcatcgaaaaagcggataaaaatctgtgcaaagggcttgcaaagtaagcgcctggatgctacaataaagacgaagaaagagagtaaggaacaaaaaagaaaccaatagggcaagggggtgcatcgccaatggaagagtgtctattttgccggatcgtcaaaggagaaatcccttcggaaaaaatctatgaagatgagaaggtatatgcgttctccgatgtcgatcccaaagcgccggtgcacgtgctcattgtccccaaagaacatatggccgatgtaacggacccgcgggccgttgcgttggcgggcagtctgttttccgctgtgcaggcaatcgcaaagcaacttgggttagaggaaaatggtttccgctgcgttatcaatacgggtacacagggcgggcagactgtgggccatctgcatatgcatctgttggcaggccgagacctcgcgtggccgccaggctaatggtacggaatagaccgactgcgggcagagaaaagtgaatataagggatgctcgaaacaagaagactgaaaattgcttccatgagaattccatgcaaaggggctggctttaagacagcccctttttttctttgccgccccgggaaaatcccctgccgttttggttgacagcctacgcgattggcagtataatagcataaaccaaggaatgtcgatcatggagggagggaaaccgaatgtccgaaatccgcgttggggaaggcgaatccctcgaaagcgccctgaagcgcttcaaacgtaagaccgcccgtgcaggcatcatgcaggaagcacgcaagcacgagcattatgaaaaaccgagcgtacgtcgcaagaaaaaagctgaagctgcgaaaaaacgcaaatattgagcacaatggctgttggaaatttccagcagccttttgttttttatggcgttttgcgcataggcgtatgcggcgctctttggaagaacatgcaaggggcacgctgccgatgggatagagcggaggtaggcattggaaaagcgcgtggcgtattgcggctgccatgcgccggcagagaaaaacggggctatgcggggaagctttgcacccgatgggatggcgcagcaaaagcgatgcgtttttgcccgcgtggaatttgaaaatgcacaaaggcatatcttacccagactacggaaaaccgcatgcaggggcaaaaggtgcggcaggcaaaaaaatgcgccgcagcgccctcagccatatggctcggcatagactgtcggcagggcaggtttggcatagaaaattgcagcgcggcagttggtttttgtcgaaaaatgcggtaaaataaattgattcgaaatcattgtaagggggaattgttcaatgttttgtagtcattgcggaaagcagattgcggatgatgcaaagttttgcccatcttgcggggcgcaggtagcgcaaccggggcagagcgcgccccaggcggagcctgtgcagacgccgccgcagccggagccccaggcagagcctgtgcaaacgccgccgcaggcagcgccagtgtatcagaccgtctcctcgccgcagcccacgcagcttggcaccaaatggctgacggtgctgccgtttttgctgggcttgggcgccatcatgaattttgtgaccgtcataaggatcctgggttccggcgtttcgctgggcgatatgttctctgtgcccacggcagggccgatctttgcgctggccttttttggcaccattgcgctggtcgctttggctgtggtggccatcgtgtatttggtacgccgtaaaaaactggggtaccagtgcgtttacgcgttgtacggctgccagctcgccgtgaatctcatcgtgtttttatccatgatgggctattacggcgtagacctgacctccaccgtcatcgccatcatcgtcgccggcgtgatgctgggcatcaacgtcacatactttaacaagcgcaagcacttattcaactaaaaaggggcgccttgccgcccgcaagatagggggacctttcatgttttgttttcgttgtgggcaggagctgccggaaggggcaaagttttgcccgtcctgcggccaaagccagaccatagacacccagccggcacaggcggaagcgcccaaggcggagcccgtgcaggcggaagcacccaaggcagaaccgcaagcagagcccgtgcaggcggaagcgcccaaagcggagccgcaagcagagcccgtgcaggcggaagcgcccaaagcggagccgcaggcagagcccgtgcaggcggaagcgcccaaggcagagccgcaagcagagcccgtgcaggcggaagcgcccaaagcggagccgcaggcag

SEQ ID NO: 1677 - DNA, 28585 bp, Unknown
  16S sequences of unknown bacteria
gaaaaagacgcggctggctaccgcgccttcaaccgtaactatattgtaggaggtaatgacaaatgatgctttttggcgaacgcgaagatgattttccggagatcgacctgctggataaccaaagcaaaaaaacagaggacatgagcaagttcgagaccatcatcggtgcgcgtaacgccgttaccggtaatatcgagggtgcttctcccatctgcatcaatggtaagctcattggtgatatcaattccaccagctatgtgtatatcagcaagactggctcggtagagggcaatgtgaccgctgaccacctggtgctgctgggcaatatcaccggtgacagcgtaaatgttggtaagctggtagtgactgcgaccggcgttatcaatagtgatgtagaggttgccaagctgaccgtggaagagggcggcgtgctgaatggccagaccaccgtgaccggcagctataccgctcccgcggaagaagagtaatgcgctgaaagaccgtactatggctccctgccgcccggcggggagctttgctttgggcggatttccccctaatgaacaagaccccggataccgcagtatccggggaatttttatttatgcggttggcgcaggaacatccggggaaacgccgtgggggtccttcagcggaaacacccagtcctggaggagagaggtaagctcctcatccgcatagaaatgggtgcattggtaggggccatcaccccccggcaggatatcccacgggatgaaagtgtagagaccgttgtacccaagggagagccattccggggacaggacctccgccagctggttgcgccggtcggcgtccagcggctccagctggaccagcagccactggcgcatgtagttttcatcaggcttgaacaggctccaaaaggatacctgctcgccggttttgcggtcatagacggcattgtagtatttttcgtagttgcggcgggtattgcgggaaagggtcacattggtgcagtaaaagatcacgcggtcattgtaatagctggtggcggtggactggcgcgccacataggcacggaaatccttggggcagcccagttcattgtattcggcccaggcgcgctccacctggtacgcggtatcgtagaagaagcccagttcctcatagtggtcgatgaccttttgctgcgcttctttggggaacacatcaaaatccacccgatcgacaaagatatcatcggggatctgattgtggatctgaagcagcatcatgccatccggtgcgtagtaggccaggccctctctgttcagccgtacctgtaccgtggtgccgtcctcaagggtcagcggctcgccgtaggggatgctattgatgataatgaccgaggcggtataggtgggcacttcggtgccatccgcagcggtgagcttttcttcggctttttctcctgtaacggtaacttccatgtgggggtattcggcattccgcagggcttcatcggtgatatcaacgagggcggggtagatgccggtttccccagtgagccgcacgccgatggttttgccgtcctgttccatcaggaaagcattgacctcggtatcgccgcgcaggtattcggtgatggtgccacccattgttttttcgctgctgcagcccgccatcagcaaaagggcgagggcaagcagcaggagccatgttcttttcttcatgcgggtaatcctcctccggtttgtcgtttatggccttcaccctttataaacgatctatccgggaaaagtgtgacatattttccggaaaaattttttataggaggatcagacttcttcccgcgggatgacggggcaggcccagcggcaggcgcggcagtaccggcaggaagagaaggaaaccctggggataagctttccctcctcgttcggcaccattttgatcacaccgtggctgcaggctttggcgcaggcaccacagtggatacaagggaaatcgggggtgatcttgatcatggtgtgttcctccttggatagttggggataaggggaggggcgcccgcagggcgctccggcgcagccggagccggcggccgaaggccgccgaagccgccgtaaggcggcttgccctgcgggcgccctacccggccttctgcacaaatttaggatagggaaatgtccgagccgcttattcagctgctttacggcgggcagcccgccgctggatgagctgggctgtgatgctgaccgcgatctcagcgggagtttcggcatcaatggccaggccgatgggggtgacgatgcggctaaggtcggcatcggtaaagccgtcctcccgcagccgccggaaggtggcctccattttgcggtggctgcctaccatgccaatgtaccacactgggctgcgaagcgcttcgcacagcacctcataatcgccctggtgcccccgtgtcataatgatgacgctatcccctgtggtaaagggaatggcggccgccagcgcgggcagggggccgcagcgggcctctgccgtggggaacagggcaggagtggcgtaatcgggacgctcatccagcaccacgcagcaaaaatccaccccgctaagaagcgggaccagcgcctggctgacatgcccgcccccgaacacatagcatcggccgccctcctgcagcttcacggtaaagctgccctcggcagcggccgtttccgccaccggcaaaagcgccccccgccagccgttttcgtcgtactctatccgcagggagcagtctccgttttggcccgcagcagtccacgccgcttcggccagcggaaggtcacggggctcccagcgcagcagcaggatctcctcctcaccgccgaattcctgccccatatggcgcagctcctgggtggataggcactggtgccagccctgctgtacaggcaccccgccccgcagcatttccatggccggtcctatgatatcatgctcggcctggccgccgccgacggtgcccagggcagtctctgccgttagcaccagcagcgccccaggggagcgcggggtggccccgcggcagccggttactatggcagtcacagcggagctgccctgccgcagtgtccggcacagcagtcggatccgttctttcatggcgcatctcctcctatggttggcgcagggtgcaggaaacggcccgcagggcgccccggcgaagccggggctgggcggccttcggccgccctacggcggtgcaaagcatcgccggccctgcgggccgtccctttgcacaaaccctgccaatgtgaattattcgatggtaataggcactacctgccccaggttgactgctttcatgccggttacactacggataacgccttcgtgacatacaacaatgatcttttccgcctggccatcataccggcgcaggcagcccagcacccgctcagcgatgacagcgtaggtctcgcagttgtcctcgccggtcagcatatcatgctccatgtagcggtagaagcagcgggtcatatcctcccggccaaagcgttcgccgggagtgggcaggtcgccgcgcatatcgcggtcatacagccattcgtgcagctcccactccacagttaccggcaggtccagccgccgggaaaggatctgtgcggactgcatggtgcgggtgtagggggaagccagaataaacgaggcgcccctcagctgcgaatcacaggcggtgtgctctatctgttccacccccaatggagtgagcggcatataggcactgcatgggccgtaaaagcgcatggcctccgcccagtcccaatccggctggccgtggcgtaccaggtaaaatgttgttttcatggtaggatcccctttcggcaggatgttgcattttatctcattataccgtattggccgccgttcggcaaggcgcgctgccccaaaagaagagctccccgccgatgggcagggagctttggaagggtttaattactgggggataacattgacagcgcgcagcttgccggtatccttgggatcgggctcggtatcgaaggtgaccttctgaccctcagccagagtcttgaagccatctacctggatagcagagaaatgaacaaagacatcctcgccgccctcatcgttggagatgaaaccatagcccttttcagcgttgaaccatttgacagtaccgttattcatctgggtacctcctgcattaaataatatttttcgtacccaaaaaaacaaagcccattctgcggcaggatcaaaacaacaatgccatgcagcaagcgggccatagtggtgatcttgaatacaagcagattatagcatctcctgccggtaaagtcaatcgctattcccccactaaaatcgctttgggcaaattttcgtccgacggcattttccatcctcggcggcatttcggcagcgttcgggctgcgcccgaatttaccgccttcgctgaattccgtccgtttcgataattctatccaataccaaacttgaagggatcggtaaagtgccctgcgccgaaggtctttgccgccatgcgtgccatcgccttggcatggatacggtcgtgccagataaaccgccgcagcaccttgcgcagtgaccattcctcctcgtaactgccaaggaacacctcatttttgaggtagtccagctgccgctccagcagcaggaagccccgctcgcggcaggagaggatatccccctcattatctgccgcaatgccgatctcccgaaagtaataggcatttacatttttggtgtgctcgtacatttcccgcgccgtccgcggcactgccccgtaaaaagtctcccgcggcggcaaagcactctggtccggatcggggatcgagcggtacagcgccagaaagtcggcagcggagcgcagtgctagcgccttctgcgccgcgtattcttcgggggttagcggcagccgctcgctttcaaacagaacatcgctgtcggcatcggcaacgcgcagggtacttgtcttttcctgaatgatcaccggtgccagctcctccggcggcagctccctgcctatccaccgcaggaattggggcagctcctgccgcattttttgcagtgcctcctcccgaccaacgccgcgggcataggcacccggtaggtcgacggcatacagcagactgtccgtgccgttatgctcccatacacattttatcgccatttttgttcctccctgtaccttgcggagggtcggtcgggctgcgctcgaatttaccgccttttccgaactccgcaaaaataaatcgtccgggcagaaaaacagctcccgcctgttgccgtcgggagccgccttgcgccggaaatttaaccgtggtttttgcgggagacgatcgcaccgacaatcagcaccaccatcgcaatggcaaccagtacaacgaaggtggtcttgggcatctcgtacaccagcttatccaccgcgtagacgatggcaaacatcaaaataccggcaatggcaatcaggtcggtctttttgaattcatttttattcatggagttctcctttccggcgcagcgccgtgtatttcagtattgcgatctgcgttttcgcgtcctcgatctcccctgccagcaccattcgctcggcttcggcaagcggtacccattccaccgtgatgaattcgtcctcatcggggtgggtgtgtccggcggtcagtgcccccgccgtaaagatccagatcctttcatcgcagtaggcaggggtggggtacagcgtcgccagcagctccagccgtccggcaatgagcccgcattcctcctccagctcccgcctgccgcagacctccggcacttcgccggcgtcccgctttccggcggggatctccaaagattcgtgccccataccgctgcgatactgccgtaccatcagcagccggtcgttttcatctaccgccacaatgccgacgccgccggggtggcgaatcagctcccgctcggcggtcgcaccgttttccagccgtaccatccgccgctcatgggcaaatacccggttttcactcagcgtttcccgctgcaaaagttcttcggtatgcggcatcgcttcattcctccccggggtggtttttgcggtaggcaaggtagctttccagaataatggtcgccgctactgcgtcaatggtatttttgcgctttttaccccgcacatcggtcatgttcaggtactgtgtggcagtgacggtggtgctgcgctcatcccacatctttaccgggcaggggagcttttccgccaggtcatcggccagagcatggcacagttcgctgcgtgggccggccgtgccgttcatattcaggggattgcccaccacgaccagatcggccttttgctcggccacctgccgtgtaatttcctttattaccgcttcccggtcgccgctgtggaatacccctatggggctggccagcagctcgccgcggtcgcagatggcaagcccggtccgggcatcgccgtaatccaccgccaagatacgcatgggtttcccctccttctttgcttgcggcagggcgccggtccgcccgccccactgcccggctttgccgggcgttccgacggcccccacagggggccgtcgtttggcgcgctttgggcgcgcctgcggggcgggtggaacccgttccctgcaaaaattctgctcccattataccggttttcccgcaaaaatacaagcaaagcttgtaaccgggcgctggatatgctaaaatagcggagtccttttgggatcgtcagtcgaaagatcctgacgctaaacaaaactaataccgcttttgtcggtatccaaaggagaaatgaatatgaaaaaccgcacgctacggcagatcactgccgccggagtcatcgcggctgcctatgccgctctttcactggtgttggcatccactaccttcgggccggtgcagtgccgcgtctcggaggcactaacgctgctgcctgtcctcagcccagccgctgtttggggcgttaccctgggctgcgccatcaccaatggggtaggcgctgccaccggcgccaattttctggggttgatcgatctctttgtggggacggctgccacgctgctggctgctattaccagccgcctgctggggaagatccgcttcggcggggtaccatggctttcggcgctgccgcccattctgttcaatgctgtcgccatcggcgcggaatggtgctatgctgccaccgggtcgatcaatgtggcattttgggcatttgccgggcagatcgccctgggacaactccctccctgcctgctgggagtttggcttattcacctgctggagcgccgcggtctgcaaaatatcatcgaagggaagtgacgccgcatggcactttttggccgcaaaaaggagatagtccccctgccgcctattgcccagtgggaataccgctgcggggacggccaccattgggggttccattaccgcgtggccgaagagcaggaccatgtacggctcacctattcccgtaccatgccggaacacctggagagcatagcggctccggccgtgctgtggcagcagctgagcgagctgggcgaccgataccatatcaccgcctgggccgggtacaatgagtgccgcctgcgcaccccccgtaccaagcgctggcttttatatatcaccttcgccgatgatacgagcctgcgggcggagggctgcggcgccgccccaaaaggacacgaacagtgggaaaacgacctgctggccctcctcaattcctgcattgatgtatgatcgcattttttgccccgccgggagccccgcactggcccccaataaaccaaaaggctcccccgcatgcctgcggaggagccccattttttattttgccagtgccagccggtctatcttggtgtcgctcataaaggcggaggtactatacagcaccagcacatcggtaatgccttcctgctccatcagctcactcagggagccaagataataccgcaggtccaccgccacgatcttttcgtagtccgccgccgcaaagggcagaagcgcattggcgtagctgtccttcagcaccagcaggcggcggccattttccggtccgccggtaatggtcaccgtgggccagttcccgccaaagaacacttcgtacatatccttttgctggagtttttccgtatcataacagctggcatgatcggcgttatcgtaggtcacggtcaaggcggcatcgcctttccggaggtacagctctacggtatcggtcgccgcgtttttatccagcaccttgctgtacagcgtcccgcggaagccatcataccgctctacggtgtaatctgccgctgcgggaatcgaaagccccatggccgcgcggtagcactggtagcccagcagagcgcctgccgttttccagtggtgatcggtgcggtaataaagctgctcactctctgccgccttggcaaagtccgttcgcaggtccaccagctggtcatcaaataccagcttcatctcgtcaaataccgcatcctcatcaaagagggtggcataacgcggcagcttatcctgcagggtatagccgggggtcggcaccggcataaaggtcaggttttccgctgccagtcctttttcctcgcaccgggcaaagaaatccttcaccgtttgcaggttcttttgcagccttgcttcgtccacatcggtttgggtcaccttttcgatgtaatacccatcctcacacaggtacaccccgccgatatccttgttgcgcagcagcattttcattttgctgcgggcggcggtccagctatcccgctgccagaactgatcgcttaaataatcctccacctcatcgccaaaatctccatttaccatggtatcttcggaaagctttggcagctcctgcaggtagcggttctcattttcggaaaaggcttgatccggggtgagccaccccagcagccccagcccaaagatcagcgcgccaaaaacgatgataatgataatattctgctttttcattttaggcgcctcctctcagaaccggaaatacagaaatggattgtagctgtcgcctaccaggaaagcgacgcacatcagcagcaccgccgcgtagaacaggcaccgaagcagcgtctgcgccgcccggggaagccgtgtcagcaggtcatttgccgcgtgggccggccagcgggtacaggccagcgccgccaccagcagcagggagatattggtagtcagcagatacatcgtttgggcatcggcgccgccgtgcgccccaaagagcgccgcaaaatagttcccgatggccccaaaatcggtcagggcaaagatgacccagccaaggataatcagcagcagggaatagaggcgctgcaccacacggggggctttttgcagcggcttttgcagccacaccttttcgatgatgagaatgacgccgtagtaaagcccccacagcaggaagttccagctggcgccatgccacaggccggtcaacccccacacgatgatgagattcaaaatctgtcggggcaggccgcaccggttgccgcccagcgggatatacacatactcccggaaccaggttcccagcgagatgtgccaccgccgccagtattcggtaatgctgcggctcagataagggtaatcgaagttttccaggaactcaaagcccagcatttttcccagcccaatggccatatcggaatagccggaaaagtcaaagtaaatctggaaggtaaaggcgatggctcccaaccaggctgtcccggcggaaagacttgtccccggcagcgccgccacggtatcccacagggcgcccacctggttcgcgatgagcacctttttccccaagcctatggtgaaccgtccgatgcctgcggcaaactgcgccgttgtttcccggcggtgagagagctgttcctccaccgttttgtactgcacgatgggccctgcgatgagctgcgggaacagcgcgatataggtgccaaaggtgatgggattcttctgtgccgccacggtgcctcggtatacatcaatgacatagctgagcgcctggaaggtgtaaaagctgataccgatgggcagcgccagctccagcagcgcaattttgctgccggcgatattatttacggtgccaatcagtagatcagcgtacttaaagagccccagcgccccgatattccccgcaatgcagaggatgagcagccccttggccaggcgctttttctcccgcttctgcagggcagccacccccagtccgcacaggtagttgaacaggatagaggccgccatcagccggatatacaccggttcgccccaggcatagaacagcaggctggtcaggagcagccataggttgcgcagcgcccgcgggcacaggtaatacacccccatcacaagggggaaaaacaggaacaagaaggtaaggctgctgaataccataggaactccttacaagcgggcaagggtcgcggaggattagtctctgcgacccttggaattttgcgtcatagccgggggaaaagcttgccctccccaaagggatggcaagttagttaccttacagtttaggcaaagtactggtcaatgaccttgtttacattgtcggtatcactggtcacagccaccgccacatagttgcccatgctgtggatcttggcattctgcagcagcgccacttcatccacattgtacttggcgtcaatgctgtcatcaatgtaggtctgaatgagcttctttaccgcagcggcagcatccttatccttgcaggcaaagacagcgcagcgcaggtaggcggaatcatttgcggccagataggcctcggtgccctcaggcagctcgccgcccagcagcacgccggccatgctgctgtccagctcggtagcgttatcggtgtaggtcacatcgttcagcagcgccttaaacatcgccgcagcgtctacggttttgtcggtcgccttttccccgccgcaggcggcaaaggaaaggcacagcatggcggccagcagtacagctacaaactttttcatgggtaatctccttctcgtcagcattttcagttcgatggcttaaaatcataaacggtcacgccgtccattactacatcgccggggtggtagccggtcggtacatcgtactcgccgttgtagtcctccggcagtaccacatggcacagcagatagttcatccagtcacggcagtactcggcgttcagatgcaccccgtcccagctggcctcatccagcaggtagcctttttcatcaaccaatgcgtccggaatatccaaataccagatctgcttttcggtgcagattttaagaagctgctcattgaactccttcacatgcgccagcgaaaacccattggccgcaccgctttgctccttcagctcagttaccggcagtaccgcctgcgcgtaaatatcagcgtccgggtggctcttttggatcagatcgaccagacggctgaagtattgcccgaaggtatccgccgaaagtcccatatcattcatgccaaagactagatagaaccgcttgccctccaccttcggaattaggttagctaccgtatcggtgcccagtccgggcagcgtcgcttcctttttggtgtaattggtcagcgaaagcgatttgaccgccagcgaggtgcagttagataggctgttgtataagatcagcccctgcgagcggctgtcgcccaagatcaccgcgtcatcaaaccatttttcacttacctgctggctttccggcaccacgggtcccggataaaaaacaacatcgtcaccgtccggattcggcgttggtgtaatatctccggtgccgcttgggtcggtggtcggatctgttacgggaccgggcgtcgggtcgggcgggtttatttccttattcagcgcggggatgacccaatgcaccaccgcaaataccactgcggccaccagcaggattgctgcggcgatcaccattatacggcggcgccttagcaccctccggcgggagtgattatagtgttgctgcatttgtgtcacctcgcttcgtacataactatgcttattttaccacatttgcggaataaaacaacacctcagcaaaagattatcggcttctttcccttgcgggagggcagaaaaagggaagtgctccccgccagaaaaatttcaaacggggagcgcttctgctgcggtttattttatggctgtggcgtagaggaaaggctccacatcggtgtggttcttccattcgttggtcacacccgcatcgctcagcagctggatcacggcgtcattaaactctgcggtcttggcgctgtccacggccttcaggtcaaagtccgcatcaccggcatcctccaggatcgccgcatcctcgtcgccgttcagcagggccagcgcggtcttcatggcctgctgccactggaaggagaagtaatccttctgggtctcgttcatcccctccagataagcctttacggtctcctgggccttgccgctctcatccatcgccagcttcatcacggctaccgccgcgttggcctgctgcaggctggcgcccgcgctgccgtagctcacttcatcgatggagaccagcagcttggtcagctcatcctcggtctcgggggtgtacatccagtcagtcaggctgccgctgtaatccaccttggtggtgggcgcggggtcgggggtcggctcaggatcaggggtcggggccggttcattgttgttgcaggctaccatagccagtgccatcagcgcggccatcagtactaccaagaattttttgctcttcataatttaagcttcttcctttcttttttgtttgccctttctgcaaaaggtcgcttgtttttcccggagcgtttctccttcgctccgttgtcattgtagtatattccgcggcgcaaatcctcacgcgtttgcaaataaatttcccttattttatgaacacgcatacagtttccacccgttttgtctttcctcagcagtctttcccacaagtttcatttttccccaagaatttatacatattcaccaaacagaaccccattccgccgttcaaatcgtataaaatcaagtcattgacaagcgcgaactgtgacggtataataaaatcagaacctcggtattaccggggaaaaaacaaaatacagtttgctcgatataaatcaaatgatatggttttgaagtctctacccggctgccgtaaatggccggactatcgatgcagaatacaggcggcggtgccttttactccgctgtcgtgctttgcattgcgggagatcatcaaaatctcccgcaatttttgttttttaggaggaatcgctcatgcagcttttagaggaccacatccgccgtgagggcaaggtagcccccggcaatgttctgcgcgtcgatggctttctcaatcatcagatcgatgtagtgctgctcaccaaactggcggaggaattccacacccgcttttccggggaaaaggtggataaaatcctcaccattgaagcctccggcatcgccatcggctgccttgtcgcgcagcagttcggcgttccgctggtctttgccaaaaaatcccgctcttccaatctgcccgctgatgtttacgccaccgcggtacactcctatacccacggcaatgtcaatcaggtcatggtatcccgggagtatctgcacagcggtgagcgtgtcctcctcattgatgactttttagcgcatggggaagcattggcgggccttgtttctttggtacagcaggcgggcggcaccgtcgtcggtgccggcatcgtcatcgaaaaggccttccaggatggcggcgaccgcattcgacggcagggcatccgggtggaaagcctggcccgtatcgctgcgatgagcgtggaagagggcgtcacctttaccgattaagttttgtgttcgaccgcctatgggcggaacaaataaaagaagtcatgaatgacaaaggagatcacacatgaaaaagattctggcatttcttcttgctgcaatgatggttctggccttcgccgcctgcggcgaggataacggcggaacccccacccctacccccgatgtaaagggtatgtctgccgatgtcctgccccgcaacgctatgaccccctccgtcgagatccccgctgatttcaagatcggcatgatctgcctgcacgatgagaactccacctacgataataacttcatccaggccctgcgccaggtgcagaaggacctcggtctctccgatgatcaggtcgtcatcgtcaccaatatcggcgaggacagctcctgctacgatgccgccgttgacctggccaagaacaagggctgcaaggtcatcttcgccgattccttcggccacgagtcctttatgaagcaggccgcccaggaatatcccgaggtccagttctgccacgccaccggcacctccggcaagatcgccaacatcgaaaacttccacaatgccttcgcttccatctatgagggccgctacctggccggcatcgctgcgggcctcaagctcaatgagatgatcgccgccggcaagatcaccgccgagcaggctgtcatcggctatgtcggcgccttcacctatgccgaggttatctccggcatgacctccttctacctgggcgcccgctctgtctgcccctccgccaccatgaaggtccgctacaccggctcttggtacgatcaggccaaggagcaggaggccgccaccgccctcatcgagaaggataagtgcgtcctcatcagccagcacgccgattccctcggcgctcccactgcctgcgagttggccggcgttcccaatgtttcctacaacggcagcacctattccgccggcgagaccaccttcatcatttcttctgccatcaactgggctccttacttccagtatatcatcgaaaccgttgtgaagggcgaggccattgcccccgattggtgcggcaccatcgccaccaattccgtcgttctctccggtgtcaatcaggatgttgccgccgagggcaccatcgaaaagatcaatgaggccatcaaggcgctggaagccggcaccctgcatgtcttcgataccgccaacttcaccgtcgatggcaagaccctcaccgagtacctggccgatgtcgatggtgactacaccggcgagaccaatgtcatccacgatggctacttcgatgagtccaacgcggtcgatttccgctccgcgccctacttcgatatcatcatcgacggcgtgaccaatctgaacaccaatttcggcggctaagaccggctctgcagagccgcttgacggctgaaacctgccatcaaaaaacacaagcgggggccttggccccccttgtgctttgatttttctccccgcccttttcctggcaagggcagacctccccggtttgcccttgccagaagaagggaacacaccacaccgatgaggaggctttttgtgaacgcactggaactgcacaatgtcaccaagcgctttggtgaaaaggtcattgccaatgatcatgtcagccttaccgtccgccggggcgagattttggccgtgctgggcgaaaacggcagcggcaaaaccaccctgatgaacatgatcgccggcatctaccaccccgatgagggcgaaatttatgtcaacggccagccggtcaccatctcctccccgcgggatgccttccgctgcggcatcggtatggtgcaccagcacttcaagctggtcgatgtctttaccgccaccgaaaatattgtcctgggtgtggaggatggcaagccctaccgcctcaaggaagccacccgccgcgttgaggagatttccgcccgctatggcttcgagatcgacgccaaaaagaagatctatgccatgtctgtttccgaaaagcagaccgtcgagatcgtcaaggtgctgtatcgcggtgcggagatcctcattctcgatgagcccaccgccgtgctcaccccgcaggaaaccgaaaagctcttcgccgtgctgcgccgcatgcgggaggatggcaaatccatcgtcatcatcacccacaagctcaatgaggtactcagcctttcggatcgtgtcaccgtgctgcacaagggcaaaaacgccggcaccgtcaataccgccgaaaccaacgaggcccagctcaccgagatgatggtcggccaaaaggtcgttctcaatatcgaacgcaaaatgcccgaaaatccggaggatcgtctggtggtcaaggatgtcagctgcctcagccgggatggcgttcagctgctcgaccgggtcacctttaccgcccgcgcaggcgagatcctgggtatcgcgggcatcgccggctccggccagcgggagctgctggaagccattgcgggcctgcagcccgtcaccggcggtgaaattctctacgaagaccccaagagcggcgagaccgaaaacctgcgggataagactcccctgcaaattcgcgagctgggcgtccgcctttccttcgtgccggaggatcgcctgggcatgggccttgtcagcaatatggatatcatcgataacatgatgctgcgcagctaccgccgcggccgctccgccttcctcgatcgtcagcccccgcgggaactggccgagcgcatcatcgaagacctcggtgtcgttacccccaatgccaccacccctgtccgccgtctttccggcggtaatgtgcaaaaggtgctggtcggccgcgagatcgcctcggcgcctaccgtgcttatggccgcataccccgtccgcggcctggatatcaattcttcctatcttatctatcatctgctcaatcagcaaaaggaaaagggcgttgccgtcatctatgtcggcgaagacctcgatgtgctgctggccttgtgcgatcgtgtcatcgtcctcagcggcggccgcgtcaccggcaccgtggatggccgcaccgccaccaaagaggagatcggcctcctgatgaccaaagccgaaagggagggtgaaagccatgtcaaagctgaataaaccgcaggccactgcccgtcccgcccgggaacccttcctctatgtcacccgtcgggatcagatcccgctgggccgggccatcctcattcgggtcattgccatcctgctggcgctcattgtttgcagtgtggtcacccgtgtcctcaccggggatgaccccctctccatctacgccaccatcctccacggcgcgttcggcaccggccgtatgctggtcaccctgcatgatatcgccattctgctgtgcatctcgctggcggtcaccccggccttccgcatgcgcttctggaataccggcgccgaaggccaggtgctcatcggctgcctttccaccgcggtatgcatgctggtgctgggcggcaaggtgcccgatggtctgctcatcctcatcatggcagtttccgccatcctctccggcgttatctggggcattatccccgccttctttaaggcccactggaacaccaatgagaccctcttcacccttatgatgaactatgttgccatccagctggtggaatacttcctcaaggtggcggataagaccggctccaatgttgtcggacccgatctgctcacccacggctggttcccggaaattttcggcgtcaagtatctgctcaatatccttatcgtcgccatcgtctgcgtcgccatgcacatctatctgcggtacagcaagcacggctatgagatcgccgttgtgggcgaaagcgaaaataccgcccattacatcggcatcgatgtcaaaaaggtcatcatccgcaccatggctctttccggcgccatctgcggcctggccggtctgctgctggtcggcggctcctcccactccatcgattccaacctcgtggatggccgcggcttcaccgccatcatggtttcctggctcgccaagttcgatcccttcaccatgatccttaccacgctgctgctggtgttcctggcccgcggcgccgatgaagtcacctccaagtttggcctcaacagcgatttttccgagatccttaccggcatcatcttgttcttcatcatcggctgtgagttcttcatcaattaccaggtccatttcaattatcacaaaaaagaaaaaacggcgtcggccgccgtcagcggggaggggaactgatccatggaaatcatcatcagctttatccagcgtgccatactgcagggtaccccgttgctgttcggcgccaccggcgagatcctcaccgaaaaatccggcaacctgaacctcggcatccccggcatcatgtatatcggcgccatctccggcgtggtcggcggcttcttctatcagaatagtgccgcccgggtgcagccggtcccggctatcctcattccgctgctgtgctgcctggctggctcactgctcacctcgctgctctattgcttcctcaccgtcaccctcaaggccaatcagaatgtcaccggtctggccattaccaccttcggcgtcggcgtcggcaatttcttcggcggctccctcatcaagatcgtcaaaagcgatgtgccttacctcgccctcgtcaagatcgccaaggcctataaaactaccctgccctttgcctccggcatgggccccatcggccagctgttcttttcctatggctttttggtctatctcgccgtcattttggcggtagcggtcagcctgttccttagccgcagccgcgccggcttgtacctgcgcgccgtgggcgaaaaccccgccactgccgatgccgcgggtatcaatgttacccgttataaataccttgccacctgcatcggcggcatgatcgccggacttggcggcctcttctacatcatggattacagcaatggtatctggtccaataacggcttcggcgaccgcggttggctcgccatcgccatcgtcatctttgccacctggaagcccaccatggccatcctcggcagctatctgtttggcgcgctgtatatcctgttcaattatctcaatgtccccatgcgcctgctgcccctcattcagatgctcccttacctcgtcactatcattgtgctggtggcggtcagtatccgcaaaaagcgggaaaaccagccccccgccagcctcggcctttcctacttccgcgaagagcgctgaaccaacccgaaaaaaactcccccgaccaacatccgggggagtttcctatataagctataagcttttcaaggggggggagaaccggagcggattcacccttcgcgtttcatcagaacacaggctatcccttagcgcaggctttcgttccccctggcaccaaataaaaaagacgccccagtgtatttcttcacaaactacccccatcggagggaaagatagtgtgaaagaaaaccgtcagggttgtctttcgcgtttcatcagggcacaggctagcttttagcacaggctttcgttccccttggcaccaaataaaaaagacgccccagtgtatttcttcacaagctacccccatcggagggaaagatagtgtgaaagaaaaccgtcagggttgtctttcgcgtttcattagggcacagactaaccctttgcacaggctttctgctccccttggcaccaaataaaaaagacgccacatggcgtcttttttatttggtgcgggagatgggacttgaacccacacaccgtcggtactggctcctaagaccagcgcgtctgccattccgccactcccgcagggaacaacccctatcttaccacgaaaagggccccgatgtcaaatccccggcgacgaaggaggtttggcgctggctttgcggcggttcgacaggcatcagcccgcctgcgcttcgctccaacgggcatcagcctgccttcacctgccgctttgccatccccccaacctcccccgccgcctcgggggatcacccggtaaaaaccgtcacatcacttattttttgaaatcccagcccggcgtagaagctctcccggtgggcctcgcaggccaccagcgggatgaggttcttttccagcagccacccggcgcagtggtacaccaccgcccggccatagccctgtccctcgtattcgggcagcgtcgccacatagctgatctgcccgtaccgggtgccgcagtcggtcaccgccgccgcggaaacggcctttccatcccgctccagcgttacggtgtggcccacccggcggcgctccgccagatgcaggttcaccaccgccgcttcatattggacaggggaaacctcccccaccgcccggttgcagccggccgccgcggtcgccgtatgggtgcggtactccgcctccggcagagaaaaccccaccccctccggcagctccatcaccgccaggggaagccccgcttccccggtcttttcccgccacagggcggtcagggtcgggcacagcatcacccagccctcctgccgccattgcagaaaatccacgatctccgccgccgcttcggggcaaaaggcgcttgcccacagggcgtgtcccttttgcagaatgacccccttcggggtccggtcccgcagtccctcgtaaacgccccagaactcataaatgagtcccatgccgcagcaccgcgccgccgattccaccatcgtggccagcagcggctcgccaggcaggtcccgcagccggcggtcatcgtagctcagaccccttaccatcacagcgccagcgcctccggcagcagccgcagcagctccagcgtgttttcaatgtccttttcatcggccacgcaggcgggtgaatgcaggtaccggctgggaatggagatcgccagcacctcgctgccgcccgcggcggtcatcaggctgcgactctcattgccgccgcacaccgcttccttggtctggttggggatgttatgcgcatccgccagcgcccgcacctttttatacaggtcgtaggtgtatatggtgccccggtccataaaggataccaccggcccattgcccagacggcacacctttttctcctccggcaccccggccaggtcgcccgccgtggtggtctccaccgctaccgcaatatcggggcgcagggtataggcagcggtcttgccgccgaagcagcctacctcctcctgcaccgtaaaggaaaagcagcagtcacagggcagctcctcccggatcattgccagcagcatagcgcagccggcccggtcgtccagcgcgcggccggccacacggccctcaccgtagtgcgccaccggcccggtaaaggtcaccatatcccccagggaaaccagcttttcggcctcggccttgtccttggcgccgatgtcgattttcatattgctgatcttgccggggtcactgcgctctttatcatcgcacaggtgcaccggcttgcagcccaccatcccggggatggcgttatcgcccaccagcaccatgcggccgccggtcacctccggctgtacgccgcctaccggcgcaaaggaaaggaagcccttttcatcaatgttggtgataataaagcccacttcgtccatatgggcggaaagctgcagcacctttttggccggttttttgccctttttgcggaccagcaggttacccagcgggtccacctcatactctgcgtggccttttatttgctcgatgagatactcccggacggcggcttcccggccgctggggccgcgcagggcgcacagggtctctatatccttccacagctgttcgtatttcatgttaaaagccctcctttgccgccagcgccatcagccgggcggtattcgccgcgtcctcagggtcaatggtctcggccacggtatgcatgctccgcagcgggatggaaagcagcgccattttaatgccccgtccggcggtagccagctcatcggcatcggtgccggtgcggccgcccatcggctcgtgctgcagcgggatgttattttcctcggccagctttttcagcttcagggtaaggtcccggttcagggtgggggcgtagcccagcatggtgccgccgcccaggggactggttttctccggcgcgcagccaaagccatccccaaagctcacatccaccgcgatggcatagtccggctggctggtaaagccgccggtctcggcgccctggccgcccacctcctccatgctggaaagcagcaccgttaccctgcagtccggcttttcggccgctatttcctcggctgccgctatcaccgccgcgcagccaatgcggtcatccaaggcgggccccgccagccgcttattcagcagctctacgggcttcgccgcaaaggtcacaatatcgcccggggcaaaaagcttcgctgcggtcttggcggtaaacccggtatcgatcagcagattctcgatcttgatggaatagtcgctgccatcccccgccaggtggggcggcaccgaggtgataatgccggggtaatcgcccgccgccgcgtggatgaccacaggggtggcaggcagccagcgggcgtctatcccgccaattttgctaaagcgcaaaaagccctcctccacccgcgtcacaataaacccgatctggtcaagatgggcctccagcagcaggtggggcgcgccctccttgccctcattgacgcagcacagcaggctgcccagcggggtacgctttacctctcccatcggggagagcagctccttggcggcggcataggcggcgcattcccggccgctggggccgggggcttcgcacagctttttcgcagctgccgctattctttcggtcgtgatactcatggtgttcctccttttttacgccccactcataccctgtacggggcatgagcaaagctcctgcttattcatctgttaaaaatcagagtcccctcctggggcagttacagcaaaccgcaaaagggataaacgaaatttctgcttacccatgcgttaaaaatccgggcctctttctggaacagtcccagcgagccgcaaaaacggcaaaccgagttactgcccgcgtaagcgcctaaaatctgtgccccgccctgggataaccccggcaggccccggggggcgctttttcgggtccccgcaaaatccgggcaccggcccgccgggcgctccggctgcaccggagccgacagcggcccagccgccgtcgaaaccgtcctgcggacggtttgccctgcgggcctctcggcgctctttgcaaaatttctttccgccttttggcctcacttcagcccattcaccagcgccttgtagcactgcccacgcacctcaaagttcgggtagcagtcaaagctggcggaagccggcgaaagcgaaacgatatcccccgccttggcaagctcatgggccattgtcacggcttcctccagcgtggccgcccgccgcagcaccaggccgctttcggcatagccgggatgagaggtcacagccttttctatcttatccgccgtcgccccggtcaggatcagcgccttgacatgctccagcaccggcccggccagcggggtgtagtccaggtgcttatcgtatcccccggcgataatgatgagcttttggtcaaagctctccagtccggctatggtgcgggtggggctggtggcaatggaatcgttgtaccagcgcaccccgtccagctcccgcacaaactcaatgcggtgctccaccccggggaaggtattcgccacccggcgaatgacctccggcgggacaaggccccataccgcagcgatggccgtcagcatattttccacattgtgcagccccggtatctttatctcgctcatcgcgaagaggggggtatcccctttgccgtcagtgtagtgcagggtgcccgcttcatccagccaggcgccgcgctccaccgggtgccgccggctgaaccaccggcagtcgccccgtacctccgccgcaaagccggcagtcgtggggcagtcggcattcagcaccgtggcggtaaaggccccctggtgcaggaaaatgtttttcttggcggcgatgtactcctccatcgtcccgtgcacatccaaatggttcggggtcacattggtcaccaccgctatttccgggctctgccgcatcgaaagcagctggaacgaggaaagctctaccaccgccatgtcgtccggctttaccgtttccagctccgggaacagcgcccgcccgatgttgccgcctaaatgcaccgttttgccgctctgccgcagcatctcagcgatcagactggtggtcgtcgttttaccgtcgctgcccgtcacccctatgatggggcaggggcagcactgcataaagagctccagctcgctggtgacagcagcgcccgctttcatcagctccttcagccgcgggtggttaaaatacatgcccggcgtgcggaagatcacatctccccgcagcttttgcaggtagtccgccccggtgacgaatgctacccccatggcggtcagctcttttgctgcttcgcccagctcctccgggctcttcttatcgtagatggtcaccttcatgcccttttgggccagcagctttgccaccggccggtggcttacccccagccctatcagcgcgatctcttttccctgcagctccgcaaatacggtcgccgctgtcagtttctgcatggtctccctcctcggcaggttttcccggggcgcgggccttccggcactccctgcacccttcacaaatttctgcccctattatatcccacattttcgggttctgcaatcgcttttgggcggcagcaccgccccggttggccccatttcccccggaaggtcctccggggggcgggccgcacggccggccgccccttggctcccctcgggccgaccctccgttttactgcgggcagccctcggccgccgcggggcggccggcctccagcaccgtcagcacctcccggatgcccgccatcggctcctgccccttttgcagcttcaccgtcaggtagggcttcgccccggcgttcatcagcacccggcccggcagggcctttgtcagcgcaagcaggtcgccgcggtctatccggtcactgtagaacagcaggctgcccacccgctggtctatctcccgaattcccagcgccgccgcccggctgcggatcagcgccacatccagcagccccgccaccgagcgcggcggctcgccaaagcggtcgcacagctcgtccatggtgtcgctccagtcctcctcggtgcggatggccgcgatcttcttgtaaatatcgatgcgctgcgccagcgagggaatatacttctccgggatgtgcgcctcgatctgaatatccaccaggcactccaggttctctacgggtttttcgcccttttgctcccggatggcatcccccagcagccgcagataaaggtcatagcccaccgcctccatctgcccatgctgggcgctgcccagaatgttgccggcgccgcgaatttccaagtcccgcatggcgattcggaagccgctgccgaagctggtaaattcccgtattgcctccagccgcttctcgctgatctcggaaagcgccttgccccggcggaaggtgaagtaggcataggcccggcggccgctgcgccccacccggccccgcagctggtacagctgggaaagccccatccggtcggcgtcctcgatgatgagggtgttgcagttggggacgtccactcccgcctcgataatggtggtacagacgagaatatcgatctcccgctccagcagccgctgccagatctcagaaagctcctcctcgctcattttgccgtgggctgtaacgatgcgtgcctccggcagctcctcccgcaggtgggcggccgtcagctctatgttatcaatgcggttgtgcaggtaaaatacctgcccgccccgccgcaactcctttcgtatcgcctcggtgatgatatggtcgtcatattccagcacataggtctgcaccgggtggcggtcctgcggcgcctcgttgatgaccgacatatcccgtatgccgctcattgccatgttcagcgtccgggggatgggggtggcggaaagggtcaggatatccacgctgcccttcagctgcttgaatttctccttctgcttcacgccaaagcgctgctcttcatcgatgacgcagaggccgagatccctaaagcgcacatcctcctgtaccaggcggtgggtgcccaccaccacatcgatcttgccgtctgccagtctttgcagaatttccttctgctgcttcggcgtgcggaagcgggaaagcagctccactgtgacggggtagccctccagccgccgcaggaaggtctggtagtgctgccacgccaggatggtagtgggcaccagcacagcgcactgcttgccatccagcacgcacttaaagaccgcccgcagggcgacctccgttttgccaaagcccacatcgccgcacagcagccggtccatgggggcgggctgctccatatcgtgcttgatctcctcgatgcagcgcagctgatcgtcggtttcctcgtattcaaagcgctgctcaaactcggtctgccagtcgctgtccgggctaaaggcaaagccctttacagtgctgcgcttggcatacagctggatgagctccgccgccatatcctccaccgattttttgacccgctgccgggtgcggttccattcgttgccgcccagccggttcagcttaacggtctgctcatccttgccgcccacatatttggtcaccaggtccagctgggtgacggggacatacagcatatcggtgccggcataccggatcttgatgtaatccttggtgacgccgccgatttcctgctttacgatcccctcaaaaatgccgatgccgtgcgccacatggaccacggccatgccgggggtcaggtcggtcagctcccgcagcacctcgccctgctggcggcgggccttgcggcggcttttagcggcggtggtgctgccgcccttggctgtggtgatgacagcccaatgcagctcggggtattcaaagccggaggaaagcccgcccggcagcacaaatattttaccggttgtaatattttccggagattttacaaatctcgccgcaaatccccggcgggtcaggtcctcggtcagcgccagggcgccgcgttcggtaccggccagcagccatatggtccagtcccgctgccggtagctttccaggtcctcacacagggggtccagcgccccgccccaaaccgaaagcgcattggccgcaacatggtacagccccgccagcggcaggccggggtagctgcggggaaagctatccagaatgacggtggggaggacgggcagctcctccgccagcacccccgcctccgggaacagaaaagcgcagcccggggccagagttccctcctccagcagggcggtcacatcctgcttttgctgccagcaggtgtggttcaggctctccttcaggttcaccccttcggaaagcagcagcagccgctccccccggtaggagagcagattgctgctcgccgggcacagcagcccggcatagcggtcggcggccggcagggccacaccgccctccagcagctccatatcctgccggagggtttcttcacacagcgcccgctgcttcgggctcagccgggaaagcttttctttcagctgggcggccagctcggcggggtggtacagcagctcccgcactggggtgatttccaccagcttcatgctgtcctcccgccgctggctttccggcgaaaaggccgcgatggaatccacctcgtccccccagtattccagccggatgggccagctgtactgcggcgggtaaaaatccacaatgccgccccgggccgcgaactgcccgatgccctctacctgctcggcccgctggtagcccgcctgcaccaaaaattccagcagcttttggggtgggtattcctgccccacccgcagtctcagcgtggcggccgaaagctgctccggcagcagggtgggctgcagggcggcggtcaccgtccccaccacgatgagggaagggtccctttgcagccgccgcagaacgcccagccgcagctgctcatattcccggcttacactttccacgctgtggtaggtgaactcccgctcggggtacagcagcgcccgttcctcgccgtaaaagcggttgatatcctccatcaggcgagtggcggcagcctcctcatcggtgaggaggacagcgccccggcccagttcccggcacagggcggcggcgaagtgggccttatggacggcggcaaggccatccagcagcagggggcttttgcccgcgcgcagcgcctggcaggcggaagagaaagcggctaaattttggagcttctgaagcatgtggtacctcctgcggaaacttttactttatatcaaatcattttaatgtcaaatttgcagtcgcctgtcggcgtcgcggagtcttttgcaaaggtatagttagtacgcctgcccggcgggggcctacttttgttcgtgcaaaagtaggcaaaacatggtcaagggggacagattcccccttgacgaacccctttctgtcgcttgctgtgctggatacgaatttagatttttctggggcgaaaaatccaaatccgtactgcgcacagatacgctcccaaggtagccgcaggcgcatctgcccccaccgccttgcggtgcccgaaaaaatcttcgcgctgctcgcttgctcgattttttcgaccgctgcgggtgctccgcctcgctgcatccgccactggcggcgctcggctccgcaccccctacccctcccc

SEQ ID NO: 1678 - DNA, 15413 bp, Unknown
  16S sequences of unknown bacteria
tgccgcgcacatagagcggcgcgaaactttcgctcaccgcgacgggcggcaaaggattggaacaaagttttccttcgggcgcatccgtacaatacgccgcgacgaattccgaagtgctcaccgcgtaatcgggcgaaaaccaatcgcgttcgcgccgcgcgtcgtacacttctccgccgtaaatgctgttttccgtcaccgcgccgcccgtcacgttccacagtctgcccgccacggtaggaacggtttcgcaagagccgtccgcgtactcgacgaacagttcgcccttcattttttttgcgccgtaaaagccgtagcctatctccatgcaaagggcgttgcgcccctcccgtatctcgggcgcgtacacgctgtaatatacttttttccgatagacggatacggaaccgttaaagtaactgtcctccgcgagtttaccgttgcaatagcagcgccccgtgccgagcgcagccacataaaaacgggcgcggcgcacgggtttgcgcgccgaaaagtccagccggacgacgtccgtgccgcccgcgtacgagagcggcatgccgatccagcgcgcgcagggcatcggttctccgagataggaaacttcgaaccgcgcgggagaagaaagcgcgccgttgacctccaccgtccaaacatactgcccgtgctctttcagcggcgttccctcgtagcataccccggacgttgcgtcggatacgatcgtaccgctgtcccaggcttctcctgttttcgacaaagccgcttcttcggaatagtcgacgcggatcctgtacgtctgctgaaagacgttctcgccgcgtattttccaggaaaacgcgggatgcgctgcgtcgatgccgaggggctcctgccgcccttccgttcttaaatcgtaaatttccattgccgtacccgaattttcatccgaagcgcggaaaaaaccgcgcctcggacaaaacgttatttatgcttttttctttttcaaaaggacgatcgccgccgcgcccaaaaggagcgccgccgctgccgacgaaaccgcagccacgctggagccgcagccgcccgccttgccgacctggatcgcaatcgtgcccgtaacagacttgccgtccaccgttaagcggaacgtaagcgtctgttcgcccgcggtatcggcgtcgtagcccgtcacgcgcgctttggtaagatccacgctgtcgccttcggcgcccgacgcgagcactaccgtgcctttcagtccgaatttttcgatgagtgaagcgacgtcgagttcggctcccaagtctaagcggatcgccttgtcggaagtgagtttcagccccgcgaccgcgtcggtgacttttactttgtaggtgaccgttttgacgatcgtgccgtcggaagtcttcaaagtggcggtcacggtggtttctccgatgcccttgccgctgatcagcccgttggcgttgactttcgcgatcttgtcgttttcttcggtaaagaaccattcgccgttggtggcgtaagaagggatcgtttccacgttggaggcgtgcgtttcgcccaggcctacttcgacgatctcttccaataccctgccgtcggcgggcgcgatgttccaggcaaatttaccctgcgcgttgtatcggatgacgacgtcgtatttgatctcgcccacttttacgaaatcgccgtcgcccttgggcgtgttggtgccgtccgtttccccgaaccatttatagaaacacagcccctttttgagggtgatcgtgtcgcccgttttgtattctgtgatcgctacgccgtcgattttcggcgtgaacgcgagcatattcgtgagatatccggggttatccaccgtgaccgtggcgccttcgcgggtataggtcacgaaatcggtgatcgtcttgccttcctcttcggtcagatctttggggtatacgttcgcctggttggggaaagttttctggaagtagatgaggatcgtcgtgcccgaccacgcgttgtcgtcgttgcaggtgaggttatcgggataggtttccacgacaggctgtacgtcgacggaaacggtcactttggcctcgatatccacgccgttgactttgagcgtgcattcgatctcgacgttcttcctgcccgccgaggcggtatccagcgtaaacacggcggtcgcgtcggtaagcgcgatctcgtcgcttaaaaagccgtcgccgtaatcgatctgcactttgactttggaaacgtcgaaagttccgttttgcgcaacgtagaaggtgcggtcgtttgcgacgacgagcgaaacggaatcgggcgccttgacgttgactttcaaaactttcgtcttatcgccgagtttcaaagtgatctccgcattgcccacgtttttcgcgaccagtttgccgccctcgaccgccacgatatcggcagccgaagaagtcatcgacaatgttgcaaaggagccctccggcagcagttttacgtcgggcgagaacgacgcgcccttgggcacgacgagttcggttttcgcaagttcgaaatcgtcggcgtccgccacatagttctgccatgcggcgccgtcccacacgtaggaaacggggccgtcgaatttgtaagaggcgatccaggtttcatcgacgtaccgatagaaacggaaattttcgttcagcgtcagcacgcccccgacggggaacttttcgggttcggtcgctttataattgttgaacgccagaatgcactgtttttcggaaacctgtccgatggtgtacagttcgtacgacgcacccgctcccgtcgcgggatcgcgcaacgtcgcgatcgtattgtcgatgccgtattcgggtttctggcggaaatcaatcgtttcgacgagagccgactcgttcccgtcgatcacgtccgtaaaccagagatccagaaaatctccccaggacaccaccttatcgggcgccagggcgtcgactttcgtcacttcgtacacgtacacgggcacgtcgcaactgacatcgtccttggtgacggtgatcgccgaaacgccttctttcgtaagatcgagtttggaatcggagatcattgcggcggtcacgtcgaacgtgtcgccgaaagttccgttttcatattcgatggtcgcgttcaggcgggacgccgcaaacgccgcgtcgaacgccctgtcggtatactcgacgagatactgcttgccgtcctttaccgcagcgcccttgatctcgaaagtaaatcccttgatcgcggattccgcgttgaccgtgatctcgatttgcgcgctcacgttcagaaaatgtgcggtgatcgtgaccgtcccttccttgacgccgtgcaccacgcccgtttcgtctacggtggcgatcgcgggatcggaagaggtgaacgcaggcataggctccacggcgccctcgttgatcttccatttcaaaggcacgtagttgcccacgcagacgctgttcagttctgcctgggtattggtgaattcggcgctcgtcgcaaaattttcgacggcgttccatttgtttccttcgaactgaaagacgagatctttttgcaagatcatgacggggtgataattatttatgcccagacagtaatcgctgttcaaagcctcgtcgatatgccccacttcatatacgggcaaccctttgcgcaaaatcagtacggcgccctcctgtacgatcgtatcggtgacggcgatctttccgttattgatcgcaatgcgcgtaaaagcgtttacctcgtttccgttggtaagttggatatatttcgcgatcttattgaatatgacttgcggcttattgccgaaagtcgcgtaccacccgctctccttatcgcataaagcccccttccccgctacgttcgtcagattgaaatccacgatgatgcagtttccggaattgatggtatgcgttttaaaatctccgttggaaaccgccgcacccgtcaccttgtcgctgacgagatcgccgctccaaccgtcggcggtgtaggtgatcgtcacgtctttcgccgtcgcgatgcccaagtcgccgccgtcccagtttttaaaggtaaagccgcttgcgatcttcaaagtgtccccgacctcgtaaacgaccgctccgtccgtaacagtgtcttcattgaacgcaaagacgagtttgctcaccgcgtcgtcgaagacgtatgagatatttttcaatgttctcgtgccgccggaagcctttgtatacgttactttatccgtcgaaggagaacccacgttgaacgagttttcgcccaaattggtattgatgacaaacgctaccgactgtttgtcggtctcgccctgcggatctgcggacgtgaccgcgacgaaaccgaaatttgtgcgggccgcgtcgatcccttcggcgcgcgcaaacagcagcattcccgtcaaaagggaaagcgacagtatgagcgccgcggccagtgataacaggacgccgaatctttttttgctcatagtttcctccataaattttttattttgcgccgcgatcatgcggctttcggatcagtttaataaccgtacgcgtaattcagtctgccgatgggcgcgctgtcgcccgaaatatagtagtccataatgtcggtatattgcgtcacgttgtcggccactttgaattcgaatacgaaattttccgcggaaagcccgagcatggcaagcggtatggtgatcatcatctgatttttttcgatcttcatgtccgccgcgcctacgttcttccagttccagccgccgacgctcatatccacgctcgccttgccgtctacgggagcacggttgatgatgaagttatagccttcccaactgttttccgccgtactcgctttggttttgacgagcacgttcatccagttttctccgcccgcgtaaggcgtgatatcgtctttcgtctggatacgcagatacacgtttttcccgtcgtgcacgatcgccgtctccacgatatcgttgcggttggaagtgtcggtgtaccaactccctaaaagattcgcttccttcgagcccgtgcggatatcgaagccgtagaaatcccgcacgcgcgcatcgccaacgaaatccttgtatttcgcctgcactttgtcgaagtcggaaagagaagagacggtcttttcctcccattcgtaatcatcttttgccgcgccgtacttgtatttacgcacgttgcgcaccaattgcagatagaaattatcctgatagtaatcccggtccatttccagatcgcgggaaaactgattgttgaagttatcgacgtacaggatgctgtcgcccgcggggttgtatttccaggcgagccactcgttccaggcggaaacggtgaccatttccacctctttcccgttttcttcgtagcggaacacgctgtcccactggtcttcgatatttttacccgattcccagtcctcgtcgatggaaaactccgcttcgttccagccgcgggaactcctgccgtccgcgggccgcccgtagtgcgtgtaagccgaataggaagtttcgctcgaaccgtgctgggcgacgttgacgttcatcactttattgtcttcgaaatagaagttctggttgccctccgaccagtccatccagggaaagccgttgctttgcgaggcctgattgggccactgcgattcgcgcacgtcgaagtattcctgcatatccgcggaaatatccacgcgattgtcgcccgtctgatcggtgcccttgtttttgtcggtcgtaccgacgatcatgggcttgccgaacggggcgaaccagatagaatcgtatttgccgctcgcataaaaatcttcgtagatctctttcacgcgttcgcccgatttattgttggtataaaagacgacctgcggcacgtcccacccctggtcggaaagttccagaatggtatccagaaccgcgtacgtcgggcggctcaactgcacgtttttgggatcggacgggtcggaaacaaagcccgtatgctcgttctcggcataatcatactcgttggtggtgtcgaaaaagataaaatcgacgccagccatcgtgagaagttccatatggcgcgcgacgacccagtcgtccgcggtgttgtaataaccgtagagcggctcattggtccaatgcacgtaattggtggggctttccatgccgtcgggataaccctcctccgcgtttacggtattcgggactttctgccccagacgataggatgcgtcgaacacggccgccgccccttccgccgtcttttgcaattttgtcacgtcgtacacgcccgccgacgacaggtgcgtgcccagccaaaggaagtagaatacccccacataccgttcatggtcggtcttttccttatgcatgggcgtgatcttccgtcccacgcggtctgtcgcggaaaaactcgctttcgtgaacgaatattcgtccattccgcgccgtatatcagtcgtaatcacgtatcccgctggctgtattctcgcggcgctcacgcataagagcagcgccgtcagcagcgatactaattttttcttcaaatcatttacctccattatcctttcagtcccgccgtctgtacgccttcgatcagatatttctggaacacggcgaataaaacggtggggacgaccgacatgatcgtcgcagccgcaaagatccattcggggtgcacggaattcgtttccttgctcgtcatatcgtagagcgcgtaggcgagcgtaaacggcgcgtcggtgctgttgttatacatggaaggcgtgagataatcgccccatgcagcgatgaacgcgttgaccgccagatagatgaggatgggcgcgcacagcggcgcgcagatgacgaaacaccgcacgaacgcgttcgccccgtcgagtttcgcgctctcttccaactccttgggcacgccgagcaagaactgcctggcgaggaatacgttcatcgcccccgcgaaaaagagccccgggagaaagagaggaaacaaggtgttcgtcagccccatatcgttgtataaaacgtagagcggcacctgcgtgacgatggagggaaggagcgccgtcaccatcataacggcaaacacggtatttttgccgatccattccagccgcgcgaacgcgtaggaggcgagcagcgtcgccaacggcgtgctcacgcacacgatgaggcagacgatcagactgttcacgagcggcataccgtagccgccgtcgctgaacgcgcgcacgtaattgataaaatgcagcccgtccgtccaatagtacatatgcgcatccagcacccgctcgttggacatcagcccgcggttgagcataaatccgtaaggaaacagcaatatgactgcgatcagtacgagaaagaagtaaacgatcgcctttccgacaactctttttactgtttttttcttttcaactgtcatactgcacccacttattggttttgaaaaccagccccgtcagcagcccgaccgcaaccacgagcacccacgccaaggcgcaggcgtaacccatgttgtagcggcggaacgcctcgtgataaattttcagcccgaacatataggtagccttgtcgttgccccgcccgccgttgggcgcaaaagtgagcgtgccgttgaattgcagcgttacgataaaggtggtgatcagattgtaaaagatcatgggcgtggacatgggcaaggtgatggaaaaaaatttccttcccgcgcccgcgccgtccatttccgccgcctcgtacagttgtttgggtatatttttgaactgcgccaaccagatgatggtgccgccgcccaaactccataaattcatcagcacgatggaaaggatcgccgtcaggttttccgcattgaaaaatgcagaggaggaaagccccagcgagatcaaaaactggttgaatatccccggcgtttcgggattatcccgcatgagataactccatacgatacccccgacgatggcgggcatcacgcacggaagataataaagcacgcggaacaccttgatcccctttacgtttacgttcagaaacagcgctaaaagataggagccgcacatgacgacgggtatattcacggcggcgaaaaacagcgtgttcgtcacgaccttgctcatttccgattcggtaaacaccttgatatagtttccgaatccgacaaagtcgaagacggaaaccacgtcgtaattaaaaaaggaataataaaaggactgcacgatgggcacgagcgtaaagacgcagatgccgaccgtcatcgggagcacgaacagccagccgctcacgctcccccgtatcctttttttaagcgttacggaaatcatgcgaacgataccgcctcctccaactgctccttgcaggcgatcacaagcgaatccaccgacttatcggtatcgaccagtttcatcataaattcctgcatggcggtgaggatatcgaatgtgcaggaaggcgcctgcgaaacgaaaaatttggaggaaactttgtattcttccccgacgagccaggcgtcgagattgaggtcctgatagcccttcgaccaagccttttcttccgcaagatcgatacgcacggagggcgtggcaagccccgcgttgatgagcgcgctctgcccttccttggagatcatgtattggagaaactgccaggcaaggtcgcgcttggcgccgacaggcgtcgtggaactgatgccccagcccgcgaaaccgcagccgattttcggatcttttccgatcaaagggaacggcagcgcgtcgaatttacctttgatcgccgcgttcagatccattctcgcgggtccgagggaggaaaaatgaaatgcgcaatttccgttgccgaacgtggagcccgaagtactcgtgcgcaggatcctccccgcctccgccagttcgcggatcattttcgccatggttttcatgttttccgattcgacggcgactttaccttccccgtcgaacacttccgcgccgtaggaaagcatcatcgcgttgaacaccgcttcccaatcgaaatccgcgtgcagagcgaaagcattgccgtagcccgccgctttgccttcctcgctcgaaaagtaagcgttcagatcgtagcagacggaaacgaggtcttcccaagtccaatcgttggaaaagcgctcgtccgtttcgggatcgatgcccgccgcctgcaaaatttccgtattgtaataggtgacgacggaatccatcgagcggggcacgacgtagcgcttgttttcatacgtgctcatgttgaaaaacgaattgtaataatccgcttccagatcgagcgtgcccgcctttttcgtcgcctcgtagtaaggttccaggctgacgacgcagtttttgctcacgagatagtaataaaagaccgtgttggtgtaaaacaggtcgggaacgttgctcgaagcgatcgcgctgctgatggactccgcatatttcgcatccgaaatggtgcggcggtcgagtttgatctccacgttggggaacatttccttaaatccgggctttaacgcctcgatataggattcttccaacccgccgtcgttgctgggcacgagtatggtgagcgtttcggaaatgtttttatcgacgttgaggttgacctcgtattcgtcgtcgggtttgtcgataatgttcgggcgacagcccgcgccgaccgcgcaaaaaagtgccagcgtcaaaaacgcacaaagtatttttttcatctgaattcctcctgttttcctctttatttcgccgcgagggcgtcaaaatcgaatatcgcgctcagtatattcatcgcataaaagcggtgaataaaatcgttgggatggttggcgttgtttcccgccacttcgtaataatttttcgtttcgagcatatcgcgcacgccctcgtacaggctcacgtacgccacgtcgagtatgtttttcgccgcacaactctccgaaatgctttgcaacgtacggcaaatgagttcgtggctgtgcgcggatttcaccttttcgttggacggaaagggcgcaatgagaaggatctgacattcgctgttggccgcttttgccgtttcgatgatcttttcgatattggcgcggtaagttttcccttccagattgttcaacgaatcgttcgtgccgaacgcgacgagcagaagatcgggcgcgagagaggtcagtttcgcaagttgctcctcgtccgccgcccaagaagaatccatgcctcccttggaaatgttttcatagcccactttgatgccgccgaacaattcaagcccctctttgacgagtttcgcatacgggggcgaatacggcgcgtgcccccacaattcgctggaagagtgcccctcggagatactgtccccgaatacgaccatttcgatatcctctttctttccgattttttgcgacagcccgtacaaatcgtccgaaaactttttgaaattcgagcggtccgcagccgcggggtcatatacataggtcacgtgaatgtaattcttataaatcaatcccgtttccgtatacataacgctgttgccgtctccgatcatcacatagcccgtccccgcgttgccctcggggtaaacttcgggcacgttcacgccgcgcgaccattcgtcgtcgaacacgggaatggaacttcccgcgggaagcgtgatcgtatcgccctctatcatgtaatctttgcccgcctcgtattctttttccagcgtccagtcgcgcacggagatcacgcgttttgcgtcatataacagacgtccctccgtcttgccgtcctttttcacgaccatgatctgttcattgtaaatgacgttgccctgccagaacggctgaatgcgttcgcaggcggtataactgtaattcaaactgtccgtatcctccacataaaaaggtaaatccgccgcgtcgaatccgggttcgggcggcgcggactgcgcgcagccggccgcaaagcataacgtcagcacgaaaccgagaaacgaagcaaactttttcaatttcattgcctttctcctttctttgaatctcgtttttcgggtttttataaaaacccgaaaaagggcatgcccttttaaatgatctttctgtatttattttatcataacaatgcgtaaatgaacatagataaatcctataataaattgtaaaagtcctacatttccccctgtaaaatattgacaagcgaaacgccgcggagtacaatgaaagaaaaacggagcgcgcttgcatgaacgatttttacaatttttttcaatctgcgaaactggacgtcgatatggcggcgtatctggatatcggcacggaatggaaacacatggtcagcgccttccaatacgtgcgtatctattatatccgctcgggttccgcacggcttaccctgaccgacgggattttgccattggaagaaggatatatgtactttattcccgctttttccatactgaacggcacctgcgaccatcatttggggcattatttcattcatatcattcccgacctcgtcaccgagcactttttgaaacttctccccttgcagcaccggatcaaaatggacagagataccgcggactacctgttctgtcttttatcgaaaacttttaatcagcgttccttttattctcaattcgccatggacagcgtcttaaaattgatactttcctattttttcgagaacatgcaggaattatccgttccgtcgggcatggaacgcttcaccaaagttttcgaatacatcgacagccatatcaacgaaaagatccatatcaaagacctttccgcgctcgtctatatggacgacgcctatttttcaaacctgttcaaaaaaacattcggcgtctcactgcaaaaatatattctcgaaaagaaaaccgataaggcgcggtatctgctttccaccgacatgacaatcgcggacatcgccaacgcgctggatttttacgacgccgcctcttttaccaactttttcaaaaagcagaccaatctcaccccgaaagatttccgcaaacaacttttcaccctcaagccctaaaaagggagcctgacttttgtcaggctccctttttaggtacttctatttatgtcaaggaaacattttttcaaatttttttaaccaaaaaaatataggagcatacttgctgttattcaaatatttttctgctttttccctcagcggtacgggaataccataatatgcttctgcaaccgaacccgtaattgcggcaatcgtatcactatctcctccgatactgattgcattccgtatggcatcctcgaaaccgaccgattcaaaaaaagcctccaaggcttgcggaacgctcccctgacaatcaacatggtactcatacgaatcgcggatttgcgccaacctaaaatcgatcgaataataattttttaaaatttcggagcgaatttcttctttacttttacattgtctcgcaagcaatattgccatagcgacggcttccgcacctcttaaaccttccggatgattatgactaatctccgtcactgttttcgacatttgtctaacttcttgcgcattccgcgccgcaaatccaactgcacagattctcattgctgccccattaccataactttcgtacggttccggcttttcggaatatatccagtcatagaatctagaaccatatccgcaacgcggatatggtcttcccaactcttgcatacagcgtatcgcacgagccccgagattttgatactctccttcaatctccaaaatagctttcccgacagccacagtcatgatcgtatcatcggtaggaaaacattctttggcaaaaagctcaaaatttttgtttttacaattgtcgtattcaaatcggctgcccacgatatctccgattaccgcacctatcatttcctactgctccactttatttattttaaaaaagtcttttacatcatccattatttcattctttactgaaaatggtttccccgtcctattacgaacgtaaacaataagttttttatcttgttgatagatttctaattcaggcccgtggggtgaatgtttttttaaaatcaagcaattctgttttaattgaaaagattccagcacttgttgccattctaaggaaatgagtacaacgtcgggcgataataattccaataattttataaacagcccgaactgatttattgaattttttttaaatttatttaacttaccccaagtcggatttgtcgcgatcgatgagtacatgtctatatgaatcgccgtattcttttttccgtatgtaaagttatacgttgcaatctgagtttccaaaattttactaaaacaattaaaataatttcgatacgggttaactttaaaataatcgtttaaaacacaatacaatttttccacagaaaaatcttcactacctatatgaaatctactttcagaaaactcttttaacgacggatttaaacctactgtaatcaccttctttgaagaattcagataaccttctatatccccgaaccaaataataggaatagatggtttgacaacaaaatctaaatctcttttctgactaaaatcagaaacatattcttctgttatttgttttaatctttcatccacagccgtttttttctccgattttctatcctatccatggcgttctttctctcaatatctgactctaagatttttttccaacttgtcgaaatttctttatcgtcgcgaaattcatccaccgctaaaactaacgcttcgttgaaacaatttcgtattccgcggacatcacaagaatactgtgcagcccgatccgcagatataccgatttgccccgctgttgtgacagtgtctatatttgcgcctaaaaacaaaaattcccatgaatacttttctttctgatgcgtaattttttcacgtatttgttctgatgtatataaacagcttgcattttccttaccatccgtcataataacgaataaaattttagatggacgatcttcctccgaagtatataacaatgtttttccaaccccgtcaattgtctttccgatagcatccaacaatgccgttgagccacgagcaaaatattctttatttgtaagaggtctgatttgattaacgttttcacgtttatataataccttgtattcattatcaaataaaattacagtcagcaatgtttccgttgaattttttctttgcttatctaccaacgaattaaaaccaacgatcgtttcttcttctaaattatgcatggaaccgctcctgtccaaaatgaaaacgagttccgttaaattttctttcataaactttaccctccattattttttcaaatattgttttaattttttcatattcacgttactttgttgcgcaatcaattttttttgtaatctcattttttctaattcatctaattttgaatttttaactaaatttatcagtgtttcactttctgctttggtaaattcgtttttatttaaataatacccttttctttttacagaaacaatgtcataccccgcggcaatcaacaacttaatatgcctgccgacggtctttctgtcacaccatacatcacaatccaatacacctcctatatcatttaccatctttacaagatgaatttgagaaacaggatgcgccatatcactcatctgttccaacgcttttaaaaccaaaatcaacgaaatctttttatttccttgacgattattcatcttttatttccccctcatttatattataacaaaccgattgtaccaaaaatcgcccctagcaccgcttgaagtaaaatcttttgttgtattatatcttactctttctcaaaagtatgctgtcacttggaatgcactgaatgttttggcaaattctaataaaaatatagccaaatttccccctcttaaaagaaataaaaatatgaatgatcttgtcgatctcacaaatgcggcatcgaacacgcccaactccgggttctctaaaaaagatggatttaatacgatagtagattccacactggcaacaaaattgcaaatagttttaaaatagcatattccgttttttgctgattgcttcaaactcatatcactcaatccagaactgcttttaaaagtattggaatttttacttatgaatgatttaacatctaaaaattttacccccattatcaagcacggtatcaacacaaacggaatttctgcggaacatcgggcactgttgctcgatatccgaaaaaattttcttaacataaaaacaatcaatcgtctcgtccgtccattttccctctaacggatattaaaaaaattttaatcctcacggaaactttttcttttattagatatcatccagtataaattattacagtcataataaaaaagagcaccaaattggtgctcttttttggctgcccctgacagactcgaactgacgacacttcggttaacagccgaatgctctaccgactgagctaaggggcaatattagatgcggcaactacctatccttccggggtaatgaaacccaagtactttcgg

SEQ ID NO: 1679 - DNA, 2358 bp, Unknown
  16S sequences of unknown bacteria
gccgctgaacgtcttaacatagacctccccccagggcagctggcggaaattcagccaggccccgccgaagggaatctgctgcccccgctccaggtaccgcagcaggaaggtctgcgccggcattttgcgcagcgccagcgccgcagcgtccgggctttcaatagcgtaatccggccaggccagccggtagggccgccccaaaaacgagaggccaaaggcttcgccgtcaaatgtgacgtccccgcccaggcgggccgtcacctccgccgggtccagcccggcgtactttgccaggtaataggcaaagggcatttcttccttttgatttttccgcagcatccgcatcactcctgcctgcttgaggggaacagcgcccgattcgtgtggggcaggaagcatgccgccacaaaattatccatatagcccgggtgggtcgaaagctccatatacgtcatattggaagcgatctcgccgaccttggcccgagcgtccgctgagagcaccatggcataggccccggccagggaggaattgccgatatactggaatttctccctgggtacatccgggaacatgccgatgcgcacggcgttttccatattgatcccgctgccgatgccgcccgcgacatagacccggtcgatcatctccggcgtgaaatccagcgcggagagcatcgtgtcaatggcagaataaatcgcgcccttggcccggacgaatgaggcgatgtccacctctgtgatggcgatctcccgtcccgtcgccgattcttcggcaaaggccaggatatagcgccccatcccgtggatatcccgagcgatgcggcggccctcccggacgaaattgcccttcgggtcaatggcggaggtccggtacagctcggcgatgacatcgataataccgctgccgcagatgcccaccggccgctgccctgccgggccgacgatgcgcagctttggctccagcgtctccttttccagccgcacggcctccaccgcgccgtccgtcgcccgcatcccgcaggagatatcgccgccttcaaaggcaggcccggcggagcaggcgcaggacatcaaaaagtcctcattgccgaagaccagctcgccattcgtccccaggtcgataaacagggcgtattccggccggttccagatcaggcttgtaaacgcgcccgcggtgatatcgccgccgacgtaggacccgatgttcggggccagccacaccggcgcatccggatgcaccggcagcgccaggtccccggcccgcaggccgtcgaaccggaaaaagctggggatatacggctccatccgcaccggctccgcgtcaacggccagcagaagatggttcatcgtcgtattgcccgcgacgcaaagccgcgtcacgcaggcaggcgggaccgccgcatcccggcacagggcctgcaacagcggcgtcagtgtctctttgatgatcgcatcctgcagccgctgccgcccgccgggcttcgcctgctcgacgatgcggttgatgacatccgccccgtagcggatctgcccgttgccggccgacgccttggccagcagccgccccgtctcgcagtcggccaggacggcggagaccgttgttgtgccgatatcaatggccacggcgcaggcgtgcgccgccggttccggcggcagcagggcgtagaccgtgcagcattcgccgctgcaatcggccacggcctggacgtggaattgattctcccgcagcacctgggctaggccccgcagggcgtcgtaggtgatgacgcactgcttgcagcccgtcaggtggcagatcgctcgctccagccgctcgttgtccggcatcgtgtcgtccagcgtcggctgctctaaggtgacgggcagcacccgggcgttgtttgcaagcgccacccccgccccgcggatctgctgcagcagcgcctcaaaaatggcaatctcctccccggaggagaggtccgccgtcttcatccgccgctgataggccgacgcaatatccggcaccaggacggtcacgtccccagtgatatggctgcagcagctcaagcgccagcccgcggcgtaatcggcatcggaaatgtgcgtcgtctgctggctatcaagcgttccctccagcagctgcacgcggcatttgccgcaagcgccgttgccagagcacggcgcatcaatggcgacattggccccccgggcgatctccaatagagtatccccccggttggccgggacgacgacaggcgcgccgccctcaatttgaaaggttacatcaaacatgctttgatcctcttgcctgttcttggagttatactagaatctgttaaaaagcttgaagagctttttatagcgccaacggcgcgtc

SEQ ID NO: 1680 - DNA, 17028 bp, Unknown
  16S sequences of unknown bacteria
agtcatgtacggaagatgaactttcgacctacacagcaacatttgagaacagtgcgtttgagaagcagacaaagacagatgtaaaaacagcagataaactgggacacgactatactgtgcagcagtctgatgataaagaccattggaagaagtgctcacgttgtgatagcataaatgctaaagaagcgcataaatggaatgatggagaaataactactcctcctaccacaacagaagaagggattaagacatacacctgcgaagtatgcgggaccgcaaaaacagaatctgtacctaaacggcattcgggtggcggcgttactccgcctaagaacgatactgtcactgtagatgtaacaggagataaaacctctgtcaagattactgcggagatttcaggagatactgcttctatagctgaaataggcaggaacgatattgacaaggcaggcgcaggcgttgatatcacaatagacttgacagtactgccaaatgagatcgcagaagtaacagtgactaagaacagtcttgagaatatatatgactccgagactgataatgtaagcatcaaacttactgaaaccactgtgaatatggacagagcgactcttaaaaatatcatagagcagatgaacggttcagatctgaaactggtggttgataaacatcaggatgctttagaatccatgaacaaggcgcagaaagatactcttaaggggatgaagaatcctaagcttatagatgcatacttcatatcgggaggcataaggataactgactttaaaggaggcagtgttgaaatcaaagtgccttattctgacaaaaaaagagtaagagcatggtatattgacgataacggcaaaaaagaaaaggtccctgtaaaatatgacggcaaaacagcagtgcttacgataagccacttcagccattatgtgattgaagaagacagcagtaataatgtcaaacctgcacatgttaaaaaaacctcggacaaggtgatttatgtcaggtcgattaaatactcaaagaaaaccggaacaaaaataacctttaacaaggtatccggtgcagacggatattatgtatacggtaacagatgcaacacagataaggtatataaattcaagaagcttgcaactcttaagggcaatgacaatacagtatttgttcataagaaaactgcaaagaacaccttctataaatactatatcaaggcatacaggctagttgatggcaggagagtaactgtaagcagatctgaggagatacattttgtaactgatgtcaaaggatacaaatatggtaatccgaccaaggttgctttatcatcaaagaaatgtaccttgaataaagggaagacctttaatcttaaaaacagggttaaggtatattcatccaaaaaggtgctgcttcatacagacaaagtgagatatgtgtcctctgacagcagggttgcaaaagtaaacagcagaggcagaattactgctgaaaaggcaggacgctgcaatatatatgctatagcccaaaacggcagggcagctaagattaccgttactgttaaataaaagggacgggcagttttctgagttatatgagggaaatgtacgaaaattatgaagtgtttttgaactggaaaatgcttgctatggtataagggaaagaagtataataaaaggaatagaggacatgatgacagcgtaacagttaaaggaaggaagaaaaattatgaagacgagtctgatgcaaaagggaaaaacgggagttaagaaatctttgattgtaactctcattatggtgatgataattaccatgattcccgcaaacacatttgcctatacaggttatccttgtgaaactgataaagcaagtgcagaattatatccgtttcctgtagaaatgaaagttttctcacagtacctttacggcagtgagaataatttggccggcaaggttaaaagtaactactttaaaaatgtaccaagagaatggtatgcgcgtgaattgccaaagagattggattactataatatagggatagctacagtcaataaaagaaacagaggttccagaagtgcggctccggtatatttcgagcctacatcatctccgtctaagaactggcatgatttacgaatccaggaattaagcaagaccaaatactcttatcagggaccaaacaatccgtctaaccagaacatagccttctatgttgcggagagtactgagttcaaacttttaggatataacaaagaatgggctgcagtctgggatgtcggaggaatcgatcagggccggggtttaagcacaacctgcggaggaatcggaagagagcaatatggcagctggaagccggccatttacttcattaagcttaaggatatttatgtaagagatatccgcagtcttgacagaaacgttcctcaggttactgcatccggtacagcaacctgcaacctctacgtaaagacaactcctatagccgacaattatgtgtcaggaggaatgatcaagacaaatcagctggttcaggtcactaatcctacgccgataaacggaaattatcaggtttactatcgggatggtctttattacgttaacacaaagtggataaatcttaagcgttcagatgagagcaaaccatccatccagtataacgcagtagtaaaaaccggcgattctgtagaaatcaagagtgaacctgattcttcggccactgccgttgcctcggcaaagaatggatttaaaattcaggttgtaaagaaaaatgcaggaaatggtttctccgaagtatggtttaactctaagaaatgctatatccagacaaaggacttaagtgaattttccaacagctgttcatatgcagctgtaaagaagctgggcaaagcgaagggcacaatggttcttaacggaccatggtcttcatacggtggtatggcatatagccctgagggaattaagattctgaaaaaatataaaatggatgaaggtgcggcttacaggaagcttaaggctgttaacggcatgattccgatgacagatggggacatttccatagtttacggagtaagtaagtttgtttacaggccggagcctcattataaagaatcagcgatgatatataaagttctgtatgacggcaaggtttgctacatacctattaagaatactgaacatcacaaatataactattacaaaacaggcaagggcaagataaaaacgaagtctgagacaaagtggctcacgacatatgctacatccaaagccagatcagataaagagctggaggcatataagataaacaagcagtactacttcaaaatcgatgacgttgcaaagcttatgtcagtaacgaataaatcatttgatgtcaagtttgaagacaatgctatagtagttaacagtatgagccgttacagcggaactgcgcctctaaagaaaggcgacggcaaaacccgctatgcagagcgttcaactatgagcattatatgggacggacaggttgtagggcttacatgttataaaattaacggcaagtattatgtgaacatggatgaaatcgcatacatgaccgattcagaaataggggagggttccttaggcggaccttatgttacaacaacaatgccaaacgaagtggaggcttatggctgatttcatataaacagcaaacaggagctcatcggtgcaggatgtatcggtgagctgtctgtttccctgaaacacccggtcagtgatgagagagccaatgattggaaaatgaaatataatactaaaatagatctttagattcatgtaaacggcagaaaaaaagatatataatattaaaaaagcagtaaatcatcattgtactgagcgaaaggagaatttatgaacaaaaagcattttaagagagttgttatggtgatatttgtactggtgcttgcattttcatttgcaggctgcggagataaaatcaatccgaataattatgtgactgtagaaaaatacgaagaattaagagcggcagactggggagacatgagctttaaggaaatggaaaaattccttgatgttcagggtattgttgacgaggaaggcacagcagactggggagaaggctacactgtagttgattttccgggacctgatacagattcatatctgcatgtactgttcggaactgatgatgacggtaaagaatccgcctcaagcatgagccctacagggaaattagcagaaaattaataccttatgacctgccgtactgctttaccggcaggtcagatgttttttggcatcaatacaatgctatgacattaatgcgcgccgggacagcctctgcaggcgtgctttttctttgccggcagccatagatgacaaaataaagggaacgaggggagtttgtttaagggattctttcccgaatagggaaaagtaataaactttttttgacaatgtggcaaaagtgcggtaaaatagtggcatgaaataattaaataagcagaggtgcagatggaagaaatctttaattttaaaaacggcccgaagaaaccggaggagttacggttacggctccgacgtaagagggcatgcctgattatcttaattgccgtaatagcggcgggcattgtaactttagactgttttgcggcaatcccgaaaaccgtaacagtatatacagatgactctaaggagataaagagcagcagctataaaacctgcgcaatgacagcgggacagttttttgaagcaaataatattgaatatgacagatatgacgaagtgagctgtgaagaagatgacagaataacagataatatgacagtaaaaatcacacttgcggttgatattagaattacttccgatgataagacagtaatatgccatacaagcggcagaaccgtaggtgatgtaatcagggacagcaaaatcaatctcggcaaaaatgatattacaattccgaagctgagtgaaacggtaagtgaaggcgatgaaattgtaatcaaaagagttaaaattgcaacagaaaaatcaaaagaaaaactttcttatgatactctttccaaacccggctatgcagtgcctatcggaagaacccgcacagtacagaaagggcgaagcggcataagagaaacaaccttcaaagtgacatatgttgatggcaaagagtattcaagagagaaaataaagacagaaacaacaagaacaccaaaagacaaaatagtggaatacggacttgcaatagatatgtcagttcccgaaaacctgaactacagcagagtctacaggggctgcagagcagtatcatacaactacagcgaaacaagatatacggcctcagggcgcaaatgtgaatatggtatagcggcagttgatacgaatatttttcctttcggaacaaaactttatatcaccggatacggctatgccgttgcggcagacagaggcgctgcaatatcagggacaacggtcgatttgtatttcgaccaccgtattcagtgtatgacatggggagcgcagagcgttgatatttatgtgctcaaataggagagacatatgagagaatacagtttgagagagcacaagcagattatagatgcgtatgcagcgctgggttatgacctcgatacaatcgcaatatcaaaaggtttttatcagcctgatgcggcagagatactcagaggatacggctttaaactgggcagccggtggggagatgatgctgacgatatcggcagattcaaaaaagtgccgcagacggttgtaaacgaatatgtagagaaatattatccgggaaatcccgcagtgactatggcagagtacattgaaacacagaggcccggctggcagtgtgcaaaagaaacgcatcacagccttttttcaagaaaacttacagaagaagaacagcaggctgcaggaagtacgcagcagacagagaaaccgaggaaaaaaagaaaatggaaaagcctgtattaaaaaatatgacaatagatgagatgaaagacttcatggcaggaataggcgaaaaacctttcagagggcgacaggtttttgagtggatatataaaggagcaggcagctttgaagatatgcggaatctgccgaaaactctgagggaaaaactggcgcagacaacagtatttgaaaatatacgcattgtcgaagtacaggagtcaaaaacagacggcaccagaaaatatctgtttgaaatgcctgacggagaaaaaatagagtctgtatttatgaagtacagatacggcaattctatatgcatatcctctcaggcaggctgcgccatgggatgcaggttctgtgcatcggcaataggagacctcaggagaaaccttgaaagctgggaaatggcggcgcagcttctggcagtcgaaaaagatacgggagagcgaataggccatatagttataatggggacgggagagccgtttcataattacgaaaatgctgcaaggtttttaaaacttgtaaattcacctgaaggtcttaacatttcaatgagaaacattacagtttctacctgcgggcttacagacggaataaaaaaatttgcaaaggattttcctcaggcgacgcttgcaatatcacttcatgctccttccgatgagatcagaagtgaaatgatgccggtaaacaacagatatcctgttaaagaagttatagcggcggcaggtgaatatgcgcaggaaacagggcgcagagtcacatttgagtatgcgcttgtaaagggcgttaacgacagtatggagcatgccgatgtgctggcaggtctgcttaagggaatattatgccatgtaaacctgatacctttaaatgaggtgaaggaaaccggacttgcgggagcagacagaaagcacgctgaaagcttcagaacaagacttgagcagcgggggataccggctaccgtaagacgcgagctgggaagcgatatagatgctgcctgcggacagcttaggaacaagaaatagcgggaataaggaagcacaaaagcgtgcttcttttaatttgcgcacaaaagacagaaaatttatcgaatttagaaaaaaggcacaaaggggctattgcgaaaagaaccttaaaaagctagaattacagcaacataaatataattatattttttattaggaggaaatggtatggaaaaaagaaaacacagatttctaggccgtataacttccgtgctgctggcttttacagtagtatttggaatgtgcggcatggtttttcctgaagaggcaagtgcagcatcatcattaaagtcaccgcagaatgtgattgtcaaagcaggaaaaacaacagcaaaaatttcatgggataaggcagacaaagctaaaggctatgaggtttatgcgaaagctccagatggtaaatataaaaaggttaaaacacttaaaaagggaagcagcgtaagctttacgcataaagaacttaaaaagaataaaacctatacatataaggtgaggagcatagcaggtaaggataaaagttctttttcgtcagttgtctcaatgagaaccactaacagtaagcttaagaatgttaaatcattaaagcttagtgataaaacggtagaattacgtactaaaggtacagaaacactgaaggcagaactgactccttcaaagaaccttgtatccaagaaggtgaaatggacaacatcagataaaaaagtcgcaactatttcatcagcaggtaaaatcactgcagtgggagaaggcagctgcaatattacagctacagctcataatggtaaaaaagcagtatgcaaggttactgtaaaagcgcctttatcaatgacagaagacgttgaaaaatatgtggaaaaggttgataaggattttgcgtgggaagtaacaaatactttgtcatacgatgaaaaatactgggacgattccacaggctggagaactgcaggttcagatgcggagcacagagcagcagactaccttgcggatacattcaagaagatcgggcttgaagacgtaaaaaaagagccggttacggtagataaatggcagtttaacggcgctgagttcacacttgaaaataaagatgccgatgtaaatgttaaaattaatcctgtatcttacgcaagttcaggtacagacagcaagggaattaccggtgaggttgtatatctgggacacggatatgaagcggattatgaaaaatattacgatgaacagggacttaagggtgatgacagaaatatgaacggtaaaatcgttcttattgatataaatcagaatactgattactggattacacctcattatcatgaagcgtacttccagggggctgccggattgatgtcatattccagccagtatgttgataaagatggtaaccagagaggcgacaagtgggatacagcttgtcagatacaggatttatgctctcttgactataagcttccttgtgtaagcatcagcagagctgacggtcttgaaatcataaatggaatagaaaagataaaaaaagcaggcaaaacaccgacatcaaagcttgttgtggataatgaggttggaaaacagaacggtacgtcatataacatagtaggaaaaattaaaggaacaggcaacacaggacagcagatacttgttgcaggtcattatgataaatatttctacggaacaaatgatgactgcgctgcgataggtcttgttgcggcaatggcaaaggctatggttgattcagaatacaagcctttaaatgatataatatttatagcacatggtgcagaagaatggggaagacagggaacagaaactgattgggcagaaggctcatggcagatgataacaaaagttcatcctgaatggcagggaacaactcttggaatacttaactacgaacttcctgctaaaaagggcacacagggaggccttaatgggactttcagaacaacggaagaaaactatgaaatccagaatgaatttttaaaagaaagcggactgactgaaatattgggagcaacagcagatatggcgcagaaaaacggctcacagccaatgagtgatgctatttgctatcagtataaaggagttccttgttatgaaattaatgctcagtacggcacagaaggaaatgaactgagtacatatcataccaagtatgatgataaagaagagtacagcgcagaggctatggattatgctctcaaattttcaggagcagttgctatgtatgtagacaattctccggcagttgtttttgattatactttaaggtgcgaagaacttgaaaaagcaattgaaggcaatgaatccctgtataaagaagcaggtattgatgccgaagcgtataaatcaggtgtaaaggctcttagagaagcaggaaaagcatatactgcaaaggcaaaacagataaatgcatcatatgaaaaggcagttgcagcaggcgaggacactgcagcaattataaaagaggctgtagaacttaataaacagggccttgcagcgtatcgctacctgcaggataatttcctcggcatgagtggagacggcaatgtatatgtattccataagattgctcaggataacataaatactatagatactgtagtaaacgcccttaaagccggtgatgccaaaactgctttcggaaatgcatggaaaataaacggtggtgtagaatacggtgcgtacagcttcagcaacaaggtttcagaagaagctctgaagacagttttctgtgaatatctgactgacaatcgttcatatggaaagaaggtagccagagcagatacatatgaggcaacacatgcactgcttgcaggagcaaacagcgaaggcttcaaagatgaaattgccgtatatgaaaaggcaagaacaaaacttattccggaattaaagacttacatgaataatgaaattgacggaatgaaaaaacttgcagaaatgctttctgtgaaataatgctttaaaaagatttgatcaaataagtaataagcatatcagatataaacaacggagctttaattccgttgtttatattttattgatgttatataattaaaacaataattcattaaaaaattacaggggtgacagatatgactttccatggggcaatgggacttgtatacataggagcaattatcatagcggctttttcttttacaataattgtaacaatgaagagtcgtaagataattaatcttgagaatgaaaacttttatctgctgattgttgctacttgccttttattaataaatattctctattttttaattgattattacagcataataattaattattacagaagtggaggagtaataagggttttagatatatggcttgctatttctatgcaatttgcatggtttatgcttttaaaagaaatactttttaaggacatggcaaggcggttatggttttttataaaatgcggatatattatacttcttgtggtgacctttattaattacggatttattatggaggaagggtattttgttgaggataaaaccttgaaaacattatcagtcatactggaactgacggtttcagggcctttattttcaattaatctaattcttgcagtattaatcataaaaaaaatttaccgggaaaaggcagagactgctgttaaaaaatttacacttatagctacgattgtaatagctatagatggtatgcaaaacacaaaggcaagtataaatctggtgcttggaaatatcgggttgcatgaagattacggaaatggaataaatgtaaccgcaatagccagactaatatttggaatctgtttgttatggtatgttgttaagcattgtttccttgagcagtatcagagatctcctgaaaccgctatagctggaaaaaagcttcttaatgaagaggcacggcttcagaatatggcgggcgaagcggggcttacagagcgtgaaacagttataatgaaactgctttatgcaggctctacatatcaggatattgcggattttctgtatatttcaaagaatacagtcaagcatcatatcacaagcatatacaaaaagcttggtgttgcatccaagatggatctgataaatactgtaagaatgatggataagcacatattaaaagatgtgaagaagattgaatgatttaaaccaaaggctgccacattaatgacttattaatgtggcagtctttttagcattaattcgataaaaccgcttactcgtatcttgaggcgcggcctgtgttgcctctgccctcctccatcattccgaagatttccataaaaaatgtcttaatctttaaattatatttgacggaaacactgtcaagagcatcatttactatatcgctcatatcctgagagtcggcggcagcccgggcattgattacaagtgacagcgcgctgtattttttatcaagctttctggaatattcaacgtcatagtctacaccgataagacttgccttgaagaaatccgtcatgttttcggcatcgtcagccgcaaacattttgaggtgaggcacattgctttttttggagataagaccttttcgtatttcctcaaatatatcataaatcacatcgttgaaatcaatgtttttgtcctctctctgttccatgaaaattcttgtattgaaccagctcagtctgctttcggcagcaacaaatgcatccgaaccgtagcctatttccttgtgaaccgctgcagccttgctgctgagaatatagtcaacgacattatcaactccggtacctttgagcgcagatatcgccataacaggcactgcaggatagttttcctttatgaagccgatgatgttatctgcttcggcatcgcttatagtgtcaatcttatttaaaactatgatatccgcctctgccatctgggcatcaagcaggaatttcatttcttccggcagatttatatcctcgccctgcggcatgatcatttttattctttcgggatccacaatgcacataaacggcataagcgtaaactgccccttctccttgtcatcaagctccagatacacatgatcaagagcgcctataccgcagccgggaatatccgaaaaaataatgtcggcgcctgcagcttcaagctgatgcagcttgtctacaagattttcatgctgatagcatatgcaatttcccgaaatcggcagagttttaataccggtagttgccgtaaattccgcatcaactatattgcctgcccaaggtcgttggcaagtatggctgcgctgccaagccctctggaattgatgctgcctgcaaaggctatcatggaagtggtcttgcctgagcccaaaaatccgctggttaccatatattttgcagtcataatatattcctcctgaaaattattttgagataattgtatagttcatattgaaaaaaatcaatatgtaaaatacgcagacaagttgcaaaagtaatttaacaagtatgaatatgagcaaagtaatctgcatatgaaaaaatatgcagggcaattatcatcaaagtattgaaaatttagaatactttgatataatcaaaagactactagttattatgttaaatgaaaggagagaaggaatgaattttaaagcaaagaaaagctggagaatattctccatagcactggcatttgcttttgtttttactacttttgcggcgacttcacttacagctgacgctgcaaccgtaaaaccaaaatcactgacaatttcagcaactgccaagactgttgacatcggtggcaaggtgacagtcaaggttaaatcagtcaagccgtcaaaggcaagcaagagtgttaagtggaaatcctcagacaagaaggttgccactgtaaccagcaagggtgttgtaaagggtattaaaaaaggtactgttaagatcacagcaacatcaaaggcagacaaaaaggttaaaaaaacaataacaatcaaggtaaagaatatcaagcctacaggcattactcttgataaaaaagaactgatgctttacgagggaggcaagactgctgcacttaaggcaaaacttgcgcctgcgggagtatataacaagggtattaaatggtcggtttccgatgaggaaatcatatcggtagacgaaaaaggcattgtaacacctaaaaaggccggaactgcggttgtaactgctaagacagttgagggcggacttgctgcagagtgcgccgtaacagttgcagaggcaacagattataaggttctcaaaccttatacacttgtcggatattatgcaaaagacaagataaattatgtacctgtagcttctgatgcaagtgtacagatgtgggatgcggcaactgacaaatttgaatatgtgccatacaccaaggctaacatagtaggaaactatgtacagcttatagatcttgacaatgataagaaagcagacgtactgcaggttgtcaaagtcaaggacggcataaagaaatgggattcaaaaatgcagtggcttgacggagccggcgagaaggcagatcctgccgtaagcaatgaaatgggcagaaaactctttgaaggagccgaatacagaatccctatgggacagagacttcttgaaggctacggtcttggagactacagcggtactacagatttctcaattcctgcaaaacaggacacatactataaggattatgacttctataatgccaagtcaagcaaaaaccttacaatacttccgaactacaagacacagcttcagactacaggctggacctgcgtattgtcaacggcaatatcagtgcttgactggtacggacagagaggcgatctcaatgaagaggatcttgcagcgctcagaagtgacaagagaaaaaggatggagggagcaacctcacttaaagaacttgcaaatgtattcaataagttagagacacttgatctgacatgcgcatggactgtcgaaagctcatttgacgatcctgaaaaaatttatgatcctgcatggatcaaggcgcatcttgaagcaggccacccgattatgactatatggaattcatatggtggacatgggcagacaatcataggctatgatgatatgggtacaacagttacaagtgatgatgtgctgattatgatggatccgtatgatactacagaccataaccctgacggatacattattcagtcatatgaaaaatggtgctatggactatccgactatgcagcagataatattcagagtgtaagatatctcgttgcatatcctaaaaatgcggcagactggaactacaaagtagacagaagcggagcaggatttgcagacattaaaagcaatacattcaagcataaggctgaaaacaagcttaacagcaaacttttagagcagaccaagcttgaccttgcgaagtattatcctactaaagaaggtgaggaatcagcacttgcagactggatatatatgaactgggacaaaggagtaggcggacctctgggaatagaagatactgaatacagcggtaattacaattattcgccgtactataatttctatgactactataatggtgacggacctacaaagacactcaaaatattaaagaactacaagaccatacagcagtcaacagaatggacctgcggctgcacatcagcgcttatggctatggaatggtttggcatgaacaacggcgaaactccaaagactgatgtttcactctcatattcaagacaggataaggaagcgggagctacttatctcaaaggtatgaaacagctgtttgataagaaagactggtatgtattcagcattgatgatctgacggatcctgacagtgaagaatcctatatcaacggttactgcctgcaggcgggagctgacagcaagggccttataccttaccttatcagtaacggcatccctatgatgataggttcagatgactggggcggacactggcagactattataggctatgacgatatgggaacttccggaactcaggatgacgtgcttattcttgctgattcatatgacactacagaccatgaacaggacggatatgttgtaaagagttttgaaagacttgtattcggctggaatgttcagtttgaaacgtggaacgacaaatggggcagcggacaggattacaacaactttatcgttgcattccctagaacagctaaatatgaaaacgttgcaaaggaattaggagttaaataatccatacggtatcgacagggcttcagagagaggccctgttttattgtgcggcgatacttgttgcggcagcaggaaactgatataatgacaggggataaaaattacaggagaagatatatgatagggttaggcacagtaatcaatacagcggcaatagtggcggcaggcattctgggcgttgcactcaggaaatttttccccgaaaagattcaggacacgctgatgaagacagcaggtgtttgcgtgctgtttgtaggaataggcggcacaatggaggagatgcttgtttttgaagacggccatctggtaacatcgggaagcctgatgatgatattaagctatgccctcggagcccttgcaggcgagcttatagatatcgaaaagggcatagaaaacttcggtgtatggcttagaaaaaagacaggaagtgatggcgacaacaggtttcttgatgcgtttcttacagcctcgctcacggtatcaataggagcaatggcagttgtgggcgcactgcaggacggacttacgggagattactccctgcttgttgcaaaggcaatactggacttcataattataatgattatggcagcctcaatgggtaagggctgcgcctttgcggcaattcccgttgctgtatttcagggcagcataactgctgttgcagggctgcttgagcccataatgacacagcaggcgatttcaaacctgtcctttacaggctccatgctgatattctgcgttggaataaatcttgtatggaataccgggattaaggtggcaaatatgctgccggcaatagtgtttgcggttgcatttgcattcatattatagtgaaaggagagcgttatgagctacggtgaacttgttaaagaacttaaacttgaggacagaattattgcagttacaagagtttcctcacaaaacgagaaattaaacgatgtgggaggctgtatatataagtcgcttggcagagtgcttgcgggagaaactctggtgctgggcaaaggctcatgcagctgcgcaggctttgaccacaacagcggactcaaagacgaaagaccgatgataccgggaggatttggagtgtttctttcaaaggggtcagaccagatgtggacaccgccgggtgaaagatttaaatgcgatccgcagactgccgaggctatgtttgaaaatctgcccaaagacgtaatgggcggctttgatgccattaaatttgaagcctacagagagggtatgaagcctgacatagttgtgatacttgcagatgccgatcagctttcagctcttttagttctgcacggctaccacaggtcagagtatgacagcgccattgcaactacagtttcaggctgtgcttcaatgcttagaataccttttgcggagatgaaaaaagaaagacccaaggctgtaattacagccacagaccttgcgcagaggcattttgtggacgaaaatctgctggctttatctgtttccggcagtgattttgaaaaaatgctttcggttacctctgagtgctatttccattcccctgtattcaaaaaaatacggagaagaattcacaaggacgaggctttggaggagaagaggttttcaatacttgcataatatacaggctgcattctgtcgtgcacagggtgcagctttttatatttccccggtgatttcctttgcagcctctacaaattcaagcacatcatcgggagcttccttgctgtacaaaagcccgtaaggaatactgtaatcccagttgaccggtatcgtcacaagaccgggatgcacctcctgcagcactctatggtaagcagcacattgcctgtttccgcaccctcctctctttcaaatcgccaccatagcaaatttcatctttgccatctaaaataattacaccattcgacacag

SEQ ID NO: 1681 - DNA, 18960 bp, Unknown
  16S sequences of unknown bacteria
gaccgttcggtcgggcttaattcttttgttatcatatttttcttgaaagtatgaatgcgtaaatatccgctatcggcgcgataatgcaaaaaatctccgccgccttgtcggttctgtctgtgacggtatcagatattatgccgagcgattttgctatgacaatcctgtttgaaagtccgaatatcagacggaacaaaaaacatattcccgccgatacaagcactgctgtgacgcttgcggaaaattcgtaaccgccttttccgtacataacaaatgcaagaaccgcaagaattgcggcgcacaggtccgcgctgatatttcctacttgcagggtagagcagtattttgaatattccgtacaggacgttccgtgttttttctcatagagtttttcggcagtccgacaaagcaaaacatttcttgcataaggcagaaaactttttgcgccgtcgagcaatcccgcattttttgaaagtctctgcgtcgccgtgccgcgaaaacatatcgagaaaatattaaacgccgagagtataagcaagaaataaaaacagccgtaaattatatccgtgaacagttgtgattcgagaaaacggtaaaaatcccccatatcagttctctatctttctgataaatcttgcgggattgcccgccactatcgtattcggctcaacatcgtgcgtcacaacgcttcccgcacctattaccgcattgtcgcctatcgtgacaccgcccatgattatcgcgctgccgcctatccacacgccgttgcctatggttattggcgcgcccgttcctatattgtcaagcctgccttgcagttcaatggggtgtcctgccgtataaagagaaacgttgggcgcaaaaaggcagttatcgccgatttgaacttccgcaatgtcaagtatggtgcagttgtaattgcagaaaaagttttttccgataaaaatatgtgagccgaagtcacagtaaaagttcgggttcaggtccgaaccctctcctatcgctccgaaaagttcttccatgattgctcttttcgctttgtcgtcgttgacatcgaccgagttgagtttctgcacaagcccgcgggcgcgtttcaactcttttcgcatattttcgtctgtcaggtcgtatataaacgctttttcggaaagtttgtttgtcttcatcgttcagtcctccgcagcctttatcacgtctgtgggcgtatgcgcgaaatattcgcatttcccgacgtctttcatctgctcgtatgtacggaacccccaaagcacgcagcaggcgcggcagcccgaattattcgccgtcagcacgtcgttttcggaatctccgacatacattacttcgtcaacggtcagtcccatatcgtttatcattttgtaaacgaccgtcgggtcgggcttccgaggtattccgtcacgctgaccgtaaacgaaatcgaaaaattcatctccgaaatgcgtgtttaccataggcacggtatccgcgtgcggtttgtttgaaagcactccgagacggtatttgcctttgagcttttcaagcatttcgattatgcccgcataaggtgcggtcttgtcctcgcggtgcttgccgtaatattcgatatattcgtcaaaaacttctttgtacagtttttcgtcgttcgctttttctccgagtgccgacgttatcagtacctttgcgccgcttccgacaaacgttttgtattcttcgacggtatgcgttggcagtccgtgttttttgagaaccgcgtttacgctgtccgcaatatcgtcgatagtgttcagaagcgttccgtcaaggtcaaaaattataccttttatcattattcatcaccaacaacaagtatatcatattttcaaacattttgcaaggagacttgcaaaaaatttgccgtagtgatataatcaatctataatatccgagaggggaatgtttatgcggacttacggaaagaaagaatggctcatagccgattgtttttacgattcaaaatggaacggacaggtcagccacgaggctgtttgcgtgcttaatacgtcggaaaaagaagcgcatattgcttttacgctcttttttgaagacagcgaaccgataacgggcttttccgcaacgtgcggttcaatgagaacgcaccatatcagaatggataaaattctgaatgacaaaggcgaacatatccctgtcgatacgccctatgcactgcttgtggaaagcgacgttgaagtggtttgccaatattcgcgacttgacaccgcacaatccgaaatggcgcttatgacgaccattgcatattgaggcggactatgataaagatagaaaacaaagaacttctcggcgtcatctttgatatggacgggctgatgtttgacaccgaatccgtttatacgttgacttggcccattgccgcaaaagatttcggttacgatgtaacggaagatgttgtcgtcggcgcgataggtttgaatgcggaagacggctgcgctcatttcaaagcagtttacggacaggattttccgttttacgagatacgcgttcacagacttgacattgcgatgaattatataatcgagcatggcttgcaggtcaaaaaaggactttacgatcttctcgattatctgaaatcaaaaaatatcaaaatcgcggttgcgacttcttccgaacgcgcaagagccgacgcatatctgaaaatggcaaaattgaccgacactttcgattatgtcgtttgcggagacgaagtcaaactcggaaaaccgaatcccgatatttttctgaccgccgcatcaaaactcggcgttcccgcagaaaactgtataattctggaagattccgaaaacggtataaaagcggctcacgcatcgggtgcgtttccgataatggtgcctgacagaaaacagccgacccccgaattgcaaaaaatcgtttaccgtgtttatcccgacttgtcagaagtcgaaaaaatgctgaaagaacacgaaattcaataactgaaaagtcgtaaccgttcgtatatgcaaagttgaaaacggttgtaaataacagaataaaatatgggcgtaccgaaaaacggtacgccctcttttgttttgtgttactttggctctttaatcaacttccgtaacccgttcgtttcgaaacaacagggaaatggaccatattccgcccagtgctacaagcgtgtagatcactctcgtcacaacggacattgcaccgaacaaccatgcaacgaggtcaaaagagaatacgcctatcaatccccagttcaaagctccgataataacgagagccaaagcaatcttgtctataacagccatgacaaaactacctttcgtgatcattgtgccgaccacgatgataatttgcctcaaaacaatattgattatgctttatttttgctgtcaaatattgtttttttctttttttgaacgaattatgattataattgccgcagcagcaaagaccgcaaccgctataactatccaaagccaaagaagagaagatgtcttctctgcgggcgcattgtccgccgccgttgcggactgctgttcgcctacttttacaagtgcggaaatcgcatcgtcaagttgctttacaaggtcgtcaacatcggtctgaaccgcgtccgcttttccgtcgaagtcttttgctttgtcgtaaacttctttcagttttgcccacgattcagccgtgtagtcggcttcgttaagtctttctacctgtgctgttttttcttcaagctgcgtgaagtccgcctcggtcagttcctgatctgccggaacaagccctttgatagcggcattgagcgcttccgtcgcggcttcaatatcttctttcgaagatttttccgtcaacttctttgcgctgtccaacgcttttgcaaacgcttcccaagtctgcgcatgataatcttcttcgacaaactcgtttgccgcagttatcgccgcctgcaacgcttcaaacggtgtcatgtccgcgctctttttcagattcttgattgcatcgtcaagttttttgtatgcggcgtcaacggttgcctgtttgtcttccgtcttgattgcttttgcttcttttaatgcaagttcaaatgccgaatatgtagcttcgagatattctgctttgtttttctctatctcttccgcttttttgataagtttattgagttttgtcagatcggaatccgatttgtatcccggaggatataccgtttcgccgaacgttacctgattgtaaagtttgggaacgcccgcaatgtcaactatttttttgccattgccgaagtccgcaatgtcatagtaatatcttgcaccgacccagtccatgcagattatgcctatgcccattttcgctccgactttatggcggggaagtttgtcattgaggttaagaagcgaccacggaatgaatatttccattgtgtagccgtttttatctcttttcgccttgacctgatatttgaacattgtcaatggctttgatttaaactgatagtgctcaaatataagcgccgtcccctttttcgttgtctcgggcgagaaatcgaaaatgaaagcctttttgctgttgctcagacggtagttgaacgggtctatcgccaactggaagcagtcgcttgcattggatgcttcgccgtcgttgaatatcgttccgtatgttttatcctgcgcaaccacgcagatatacagaccgccttttttaatatcgagcagctttccgctttcattcgggtcgtcgtaccaatacatataaatgtcgaaacctttgcattggtttgccttgtcctcgacgtcgggactcgggttgtccgaatagtcgtagttgcctttttcgttgttcatgaacttatggtacgcgccgtaccattcgtttttggacatttttccgtcgattgtaggcggaaccgcgcattgcggaattgtgtatgcttcgcccgcgcttgaaacaagagtaaaagatgtcagcataagggcgatagccagtacagagagaaacagttttttcattgggattctccttttgcatgagtgaggtggtgtcttggcgcgctcaacgaaagcaagcgcaaccgttttcatatttttctctgcgtcggtccgattttatgcccgtcatcgacataaaagcatcccgccgcatatagaaaacaaatttattttctgataagaatatatatgagcgggagcgccacgaattgagcgccgctgagtaaaaatgtcgtaatcgaaagggcttttgacgtctttccgaaagattttactccgtaaaacacggaaatggcagtaagccccaaccaaacggcaacgggcataataaatgcccaaacgcccattttgaggcttgaaaacttttccatgtttatcagataaaacatcataacgatgcctgcgactgcggcaataacgctgaacgccagcgcttttttgcccatattgcgcagttctgcgcgatgtttctccgcctttttcttcttcaaagcgccgagttccgcgtagcaattcgaacagtactcctgtccgtcctccgcaacggttccgcactttttgcagatctgtgacatttttcttattccttatctcccgttattatatcgagcaactgccgatattgtctcggattgttttttttcatctcgaaaatcttttttgcgacatagcgatagaatgttctttcatcgggtatgcccgaatcgcctatcagttcgacaaaatcgagaccgtatgctttacatacgttgaaaactactcccgcagacggtgttacgggttttttacttctcggatcccgcccgttttcgagggcggaaagatatgtgtgactgatacctatcagcgcagacgcttcgcgaaggcttaatcctttttcgagccgcttcgcttttatcgtttgcgcaaacgtttcggtattattcttcatcccagttgtggtaaacgttctgaacgtcgtcgtcatattcaagcatatcaagaagacgttgcatcttgtcctttgcttcttcgctgtctatcgaagagtatgaagacggaacctgttcctcttccgcggaaatgaatgtatagtccttgtcgcggaggaagtctcttgttgttctgaaatcttcatcgggtgcggtatatatctcgtatacgctttcttccgtcacaaagtcctcgataggcgcttccataacggtttccataagacggtcttcgtcatactcttctttgtctataacaataacgccttttttggtgaacatccagcccaccgaaccgttctgaccgaggttgccgccgtttttatcaaagtagtggcggagattgcctgcggttctgtttctgttgtctgtcaggcattcaacgataacagctattccgcacggaccgtaaccctcgtaggttatctcttcaaaattgtcggagttttcggcacccgacgctttctttataacgcggtcgatattgtcgttgggaacgttgttgtctttcgcttttgcgataaggtctttgagtttcgagttcgacgcggggtcgggaccgccctctttaaccgcaagaattatctctcttccgattttggtgaagacttttgcgcgctggctgtcggtcttctcctttttgtgcatgatattcttccatttggaatgtccggacatatatgtttgcctccgtaaatatgattaaacttttatttcagaataaatccgaacgataacccgataacgggcagcgtccatataatattgaaaacaagaacccaaacaggggagagcaatgcgggcacggcaagcgccgctatcgcggtgagcgcaagccccgtgaaaacgcttatctgcttgattcgaacgcttgcggtcagcgcggacgaaagctgctgcgccatttctatgccggaaagcgttccgagcgcgctttttgtcgaaagcataacgggtcttgtttttttacctcttgtcagtctttttctgacggcgttcagttttcttgtctcttccgccgttgcaacggtcatcgttgcgtttgtcagactgtatctcttttgaaccgtcgcttccgtaacgagagggtcttcggtctggactattacggttatgtcgcgtccgactctctcaaccgcttttttcaatttcgggtcggctttgtattccgcaaacacaaccgcggaaacagttccgtcaataaccgtgtaagccgtgctgaaacctcttgaggtctgctccgcttctttttcctgcggaagcggctttatgccgtaggacaacagcagatttcttgttccgtaaagcacttcgtgcccgtcaatcgttgccgcaaagccgtgttcctgaaccgccttgaagttttccaccgagtgaagcgattcgtccgcacgaaaaatgtatctttccatcgacgcatacagcgggcttttgatttttctcaatatcaatgccaaatattcgaccgtttcggacatatattccgctttgatgaattttatgtcggatatcgcagcgcaatcgtcggggaagaggtctttatctttgactataagtgtccgaacgtctttgagacggtctatcgaaaacgctccgaaaatcatacagccgagttctttcaatcttttttgcgccgaattataggggagtacgaatgagacttctcccgtaaagcccgcgcatattcccagcgtcagaacaagcgttgaaaacagtgcgtttcttccgtgtatgagccccgccgcaacggaaacaaccgccgatacgagaatcacccaaggaacatacttgaagcccgcgctttcgcacgcgtcgttgcgaaaagtctttcccacaacattcggaatgcgtttcatgcggtatgttatgcacgctctgtctatatatcttttgtcaagcggcactcgggcgtcctcgacgcagtaaattttgtttttgcgtatggttttcaggttctgcggaatttcgagaacgtaaacgtatttcatcacggtcgaaactgtgcaggagatgaataccacccacgcataaagtttgcccgaagacggtacgaatatcgtaaaaatactttgtaaaagcgccgcaagcatggcatacgcgttcagcgtgtcgtttgtcggcagtcctccgaatacggagattatgccctcgtaaagttctttgtaacataccgcgcagacggcgaccgcaagcgccgtggttatttccgctttcagccgcatatccgtaggcagcagtacggtcgctatcgtcgccacggtggcaacaacgcagataattgtttttatcaaatactctttttgcagtttttgcgccttgtaatactgttcttgcaaagtatgacgtgggcgtggcatatatcagccctccgtcttttctttttcgagttttctgcgcacggcttcatacatcatcaccgcgcccgcaacggaaacgttcagagagtttatgtttccgaacatcggaatgcttataacgccgtcgcatctttgtctgacaaggcgggaaatgcctttgccctcgtctccgagaacaattgccgtcgaacccgtcagatcggtcgaatagaggtcgcagtctccgtctccgtccgccgcatacgtccaaacgccgcgctctttcagcgcacttatcgtttccgcaatatttgtgacttttgctatcttcatatattcgcaggcacccgccgccgctttgaacacggtcgttgtcagcccgcagcagccgcgtttcggaatgattatgccgtgaacgccgcagcattccgcagttctgattatcgcaccgagatttcgcgggtctgtcacgccgtcaagcaccacaatgaacggcttttcgcccttttcttccgcataagcgaaaatatcgtcgatgtcgcaatagtcgtaatccgttgcaaacgcaacaactccttggtggttcgatgttcccgcaatgctttcaagtttgtatttgtccgcctcgacaacgggaatgcccatatcacgcgcttccgcgataatttttacgatagagccctcgcgttcgccgtgtgcaacatagagtttgtcaaccgttctgccgcttctgagcagttccgaaacgggatttctgcccgcgaccacgttttcgctgtccacgccgttatcgggcgcgaatacggaccggggtcttttcggcatattctttttcgcggtaggcttctttttgccgacaggggagtaagacggttttttgccgccttttttagcgaaatctttttttccgttctttgcgtttttcatatttattttttccttttgagtgcggattacgcctcggattgttcttcttcctcgtcttcggaaacggtcacgtcttcgattatctgacgcagttgctcaacgcccgcttttgtctgtgctgaaaacattataggttccgcaccgaatttttcggcaagatattttcttcttttttctgtttcgtttttgttcaacttatcgcatttggttgcgactacgcagaacaaaaattccgtattcatcagataatcatacatcagcagatcgtcttttgtcgggtcgtgccgcgcgtccgtcagcatacatacaaggcgtatgtccctgttttcgagcgtcagataactttctatcagactgccccaattttgacgttgttctttcgaacgctgcgcatatccgtaacccggcaggtctgtaaggaacaccttgtcgtctattccgtagaaattgacgctgaccgtctttccgggcgtggacgatgttctcgccaacgcttttctgccgagaaccgcatttatcatagaggattttccgacgtttgaacgtccgacaaacactatctccggttttttcggaagtttcattttccgaacgtcgaaacaactgtcgagaaactctgctttctgaaaattgagagccatattcttacctcaaagccgcagcgaaaacgtcttttatcgagtccgcatatacgaacgcgacattatcgcgaacgacctgcgcgatttccgatatgtcgggtttgttgtctttcggtacgatgactgtttttactcccgctttgtatgccgccatggtcttttctttaagaccgcctatcgcaagcacatcgcctcggatagttatttctcccgtcattgcaacgtcgtttttaatcggctttgacgaaagttgactgtaaagggcggtcgccattgcgcagcccgcgctcggtccgtctttcggaaccgctccctcgggcgcgtgaatgtgtatatccttgtccttgtagaacgtcgggctgatgccgagagaggacgcattgctgcgtatataacttatcgccgctttcgcgctttctttcataacgtcgccgagagaacctgtcagctctatctttcccgtgccttccataacattgacttcaagcggcatgatttcaccgccgacggaggtgaacgcaagtcccgttacgacgcctattctgtcctttgctggaatcttgtcctgaataacttttctcggtccgaggtattcggcaatgtttttctttgaaataacaaccttgtcgcagttgtcttctagcatctttttggtcgcttttctgcaaagcgccgctatctgcttttcaagtccgcgcacgcccgcttcgcgagtgtagaacataattatttcgttgagcgcggatgcgtctattctgagttcggaagctttgagcccgtgtttcgcaaactgcttcggaacaagatgtttctttgcgatttgaagtttttcttcgtatgtataactcgtcagttcgataacgtccattctgtcaagcaacggggcgggaatctcggacgcgtcgtttgccgtggtgatgaagaacacttcggaaagatcgacgggcatatctatatagtgatctttgaatgtcttgttctgctcggggtcgagcacctcaagcaatgccgcagcaggatctccgcgtctgtccgaaccgagtttgtctatttcgtcaagcagcatcagcgggttcatcgttcccgcttcttttatgcctgcgattattttacccggcatggacgcaacgtaagtgcgtctgtgacctctgatttcattttcgtcgttgatgccgccgagtgaaattcggacaaactttctgtgaagcgcctttgcaacgctctgcgctatcgaggtcttgcccgtgcccggagggcctacaaggcaaagtatctgtcccttatggttgggaaatctttgtttgaccgcaatcgtttcaagtattctttccttgactttttcaagcccgtaatggtctttttcgagcacgtcgcgggctttttcgatgtctgccgattcctttgagtacacgccccacgggatttcgagacacgattctatatatgtgcggataaccgccgcttcctgagaacctatcggcgttttgtaatatttctttgtttcctttatcaggtaattgtagcattcgtcgggcattttcgacttgtcaagaagttcgtaaagatcatcgtcgtcatcttcgtaatactcctctgtatcgccgagttcttcttttatcgctttaagttgttccctcaaaaagaaatccgcctgattctttgctatgcgcgaatgcactttttgcatgatcgaggattgaatgtttttgatgtctatttgtctgacgagacattcaagcaatatttccgagcgcttgatgggatcaaccgcgtcaagcagcgcttgtttttcggaagccctgaacggataattcgccgcaatatagtccgcaacgacgccgagatccgtattcgttccgacaaagagttcgatctcgggtgagaggtctgtatcttcttcgctgatacggttgaaaacggttctgatctcttcaagtatcgccgccgcctcgttggattcgtattcgtccagttttttttcttctatcgggagcctttccgcaaacatggtctgaccggactctttcagttcttctccgagacgtcctctttctttgcagtcaaaagcgacgcgcagaacatctttgcccgtctttactatttgatttactgtcgccaaaacacccgtgtcaaaaagattgtctctttccacggtctccgccgcagcgtctttttgcgcgacaagcaaaatgtccgttccctcgttgaacgcatattttaccgcattgacggaaagttttctttcgatatccacatgaatgaccgcgttcggaaacgcaacgatgttgcggagcgcaacaacgggaattctgtcgaatttatattgagtttcttttgctgtcgaaactgttttttctgcttgaatttgagccatttttcctccgtgttcgtcatgggcgaactactgcctgtgtcaattcaatatattatagcataacaaagcgatttttgcaagacatttcttatttttgtccgatattcatcgcattttggttcaagttctcaaaaagtttcgaaaaatcacgaaaaagtcgtggttcacgtcttgcaaaaaaaatgattgtgttgtataatattaaagatgatttcggcttgaacgttttcatccgccgataggttcggcggaattcggataggagagttttcaatgacaaaggcaaggaaaaagttttcgaagatcctcgcttgcggtatgaccgccgcgatggttctttccgcaagtattcctttttttgcggatgcttcggacaaaaccgaggacagcaatattatatataacgacggcggagcggacagtacgaacccaaacttcttcgattatacaaatcttataacgaagacatacggcgatcgcggttacatcgactccgacgagggcaattttgtcgtaaaccttgacggaacaaaaagcgatatccgtcttttcggaataagatacgacatcgcaaaagagggtatccccaccggcgacgctttgaaaaacatggtcagcgacatggcggctcacggttacaacctcgttattgtcgatgatgtttattcggtattgaaaaactcttccaacttcacggctttcagtgatttcctcgcagaactttacaatgcaaatatgtatgcgggcatcggtcttttttcgacctcttcgcttgttgttaacaaaacaagcaaaggcgccgcaattttggacagggacacgattcgtcgcgctcaggcattcatcaaaagatttttcgcaaccaagaacgccgcaagaagcgatgaaaacataaccgttacttacggcgacgatacaactattgcatttgttacatactgctccgatctcgatgtcggcgcggatgcggtttgctattccgacctgcgttccgatttcaacgattggctgacggaacagtacggctccaccgacgttttgcgcggcgtatggctcgatgagacgggcgcttgcatcctcggcgaagacgaaaacgcaaaacgcggaacggttcgcgttcccaccgaacccgtcagcaccgtttattcggaagcaagcacgggtcgtcagcgcgaggcggatttcggcagattccttattacctatgtgaataaacagttctcggcgatgaaagatctcataagatcctgcggttacaattcgcccgttcttctttccgataacgattcaagcgcattcaatgtctgcataagcggtctcggagatgcttcaagaggcgattttgagttcactcccgatatgaccgtgaaagaagcagttgctcatgcggcgctcggaacggttgcggacaaaccttacatcgtttcgtggaacacttccgcagttgcggcaggtgaaaatgccgtcaaggcaaccgattccgaatttatatctgaattcatatctcttgtttcttacgcaagttatcagggctgggatgcttttgttgtcggagattattctttgacggacgcgacggcaaccaatcagaatgcggcactctggaacaacagcggcttgatggctactctttttcgccatatagcgatagccgcatcttacggctcgggcttcggtatcggatattcgggttatgacaccgtaatggatttcggcagatttaaaaattccacgcttgcttctgctcttcttgcaaaaacggaaaacgtgttctttgacacggaatatacggcaaattcaaaattcaaagtaatcatgtcttcgggcaacacttcgtccggctcttacgtcggcgcgaactcgaacaaagaaaacggtacaaaggctattatccaggctttctatccgtatcaaaatgcaacgtttgcccaagacttcatgaaaaagaaagcatggtacaacgaccagggacttgtaagcacccgtgacagagttatagaaaacattgacggggttgacgtctatttcggcgagggcaaggcaatcgtccccgacgggatgattgaaagttcctctcagttggcaacggcgcttgaccgtctcggatttacttcttacagaaatgcgaacgacgcttccgacctcggatgtatttcttccgacgggcttctgataacagataacggcagacttttctataacgaggaaagcgataccgtaataggcttcggaacacgttatttccttgcaaacggcgacctttccgatgcgactttgaatgccgcttacagcgcttatatcaacagatattattacggaagttcaacggaaagcgaatataagaatcttaaagtttcaatctccggcgcaagcggaaacggtacggttgccgtatacgctctcggttccggcacaaacaacgaaaccgcaacgcgctttatcgtctttgcgcagagcaatgacggaactccgttgacggcaaatcttaaaatcattcgcgaaaacaccgtatataaggcttacggtatcagacgggacggctttgtcggcacaaaaggcgcattgcttaatcccgacaacacggtttccgacagttcgggaaatatgacgatgtcgctcaacggcgagtacgattattatatagtaacgcttgaagagaccgaccttgacgcttctcttgaaggttatgacccgaacgattccatacccgaagcgcagaacctgttctggtatatcgttatccctgccgtattcttccttatagttgtttacagtgcaattcttatctccgataatctgaaagttaagagagaagaaagactcagaatagcaacaagaaaagttacgctcggaaaaaccggtaaatatgcgtccgcacttgacgtggcagacgatgaccttaattcgggcagaacaaagggcactcccggtgcggatattttcgaagaagacgaagaggaacgcagaagacgcgaaaatccgtgggagagagacgacggaacgatcgacttcacaaagatcgttcgctccgacgacgaagatgagaacgcttggtaattcattgcgcctgaacgtctctgcgtaaaaggaaatataacggggcgttcataggctttatgaacgcccttgattttttagaggttttgatatgccgaataacgatagtctttttgaaaatatttattcggctttcctgtccgccgttgaaaaatacaggcttgtcgaggcgggcgaccgtgttgcggtctgtgtttcgggcggcaaggattccatgcttgcgtctctgttttttaagagatatgcggcggagaatccgaatgtgactgttcgatatatctgcatggatcccggatacaatgcggaaaacagaaaaatgatagagtcgaacgccgaaaaactcggcatacctcttgatatttttgagacacaaatatttgattccgttgtccgaatagaaaagtctccgtgttatttgtgcgcgcgtatgcgcagggggtggctttaccgcaaagcaaaagaggcgggctgcaacaaaatcgcgctcgggcatcactttgacgatgtgacagaaaccgtgctaatgtcaacgctttacagcggacagtatcagacaatgcttcccgttattgattcaaccaactttgagggtatgcgccttatacgtcctttatatcttgtccgtgagcgggatataataagatggagagacgagaacggactttgctttttgagatgtgcctgccgctttacggaaaacgccgcggaggacgagcatctttcaaaacgtgcggaggtcaaaaaacttattgcacgtcttgaaaagattgattcgaaaattccttataacatattcaatagtacacacaatgcagtccttgatgaaattatgcttgcttccgaggagagttacaaatgaaaaaactgttttcaaaacttgattttctctatcttgtcccgcccgttctgacgcttcttatgtgctttcttgtatacataacaaaaagtcagggactcgccgttgtgaatatgtttattactgcggcaggctatgaaacggcgactttcataatcaagttttattcgccttacagattccgtgcgtttgaccttgtaaagattcttgtttcgatgattctcgtttacggtatatacatcggtcagtattttgtttcgggtgtggcggatgaagatatgtggcccattttgaaagtgatgatgaccgcaagccttgtggttcttgcggttgcgggtccgcttgttatgcttctgaaaaaacgcagggaaggagattgaacgtgaggtattttaccaaagaatggtatgctctctgcctgaaaacgtttcttgcggaattgcttgaagatgatgaacgcgccgcgacaaaagacgaagacttttacaatgaggttttgaaacagcgtctcggcgaaagtcttgccatgcaggacgagatagcaaaaatgtccgatgaagacgttgagattgatataggggaatacgaaacggactatttgagggcgcttgacgaacggataaaggaactttctgccattatccccaaggatattcttgcagaggttgcggatataagagtttttgcccttaataaggcaactcccgccgtgcataaaaaactgcgcatctattgcgacggcgcacagcggaaagtggacgaaacgctgaaagcatatgaggattattataactctgtcgatgttccgtccgaaatagacgacaatctcgcatttcatgatgcggttataacttccgcggaaatgaaagacggcaatttacggcttgatttcgatatttcgcagagtttcgcaacgaagtcgtcggttacatttgcggacgcaaaaatccttgaaaaggaaatcgaatttgagggctgtgtctggctttacgacgaactttattctgttgacggaggatatgaacttcatattcttgcgcaggcggcggatatggaacaccttgtttattttaccgttttttgcaaagatatattattctgattttcagtaaggagtatttgaatatatgaacaaaaaagttgtactcgtcgttatggacggcgtaggtatctcggacaaagaatacggcaatgccgttgccgcggcatataagccgacgttggattctctcatggcttcctatccgtggacaaagataaaggctcacggcacggcggtcggacttccgaccgatgacgatatgggaaacagcgaggtcggacataacgctctcggctgcggacaggtttattcgcagggcgcaaaacttgtaaacgaatccatcgaaagcggcagtatgtacacttccgatatctggaaaaaacttgttttgaactgcaaagaaaacaactcgactttccatttcctcggacttctcagcgacggcaacgttcactctcatataaagcatcttctttcgatgatagcccgtgcaaaacaggacggcgttaaaaaatgccgcattcacattctgcttgacggcagagacgttcccgcaacaagcggaatgacgtatatcaaagaacttgaagataaacttgcggagttgaatgacgccgatttcgacggtaaaatcgcttccggcggcggaagaatgaagataaccatggacagatacgaagccaactgggacatggtaaaactcggttgggaaacccatgttcttgggcagggcagacaattcgcatctgcggcggaagcctatgaaaccctgcgcacggaaacaggcgcgatagaccaggatctgcccccgttcgttattgcggaaaacggcaaacccgtaggcacggttgaggacggagattcggttgtattctttaatttcagaggcgaccgttcgatagaaataagccgtgcatttaccgagggggcggacttcgacaagtttgaccgcgttcgcgttcccaaaacactttatgcaggaatgcttcaatacgacggtgatttgaagatacccgaaaacttccttgttgcacctcccgcaatcaaaaatactcttaccgaggctctcgtaaaagcaggtatcaaagagtacgccgtttccgagacacagaagtacggtcatgttacctacttctggaacggaaacagaagtgaaaaattctccgaagaacttgaagattacgacgaagttgattccgatacagttccctttgaacagcgtccctggatgaaagccgcggaagttacggataaactcatagaagccatctattccggcaaatacggatttatccgctgcaactatccgaacggcgatatggttggtcatacaggcgtttttgccgccgcaaaaatcgcggttgaaacggttgacctttgccttgcaagagtgaagaaagccatagatgagacaggttctgtccttattgtaacagctgaccacggcaacgccgatgaaatgtatgaaaaagcaaaagagggacaggctccgaagccgaagacctctcatacgctcaatcccgttccgtttatagtttatgacccgactgtcgggcacgaactgaaagacggcaatttcggactttcaaatgtcgcagcaacggttactcaacttctcggcgtagaaaccccctccatgtgggatgaatcaatgctcaaattttgatagcatttaaaaagtgcggggatttgcatattgattgcaaagccccgctttttttaacttaaaaatacagaaaatattgttttttgcaagataaggcgcggactatttgtccgc

SEQ ID NO: 1682 - DNA, 3091 bp, Unknown
  16S sequences of unknown bacteria
gctactctcaataattttttgaagcacaatgtaacatatcattgacaaaccgacatttttcaaaaaaatctcgggcagcgaaatttcgcggacgaagtgcggctgccgaccgcggcttcatccgtttttcggcggtgctgcggaacggcacaggcgatcgccgtatacgcccgagcgcgataaccgaaactgccgcgcggtgcgcgggcggcgtatctttgtccgtgcccccgagcgtgccgcgcggcagacggcgcgcgggcttattttcccgccgccgctttgtatttttctatacatatgacaagattccgttcaaatctatccgcgtccgggcggtatttgagaaatccgtccatgtaccctttccacgaatccgggcactcgacgtcgagtgtgttttcgtccatcatcgaaaagtatccttcgctgtccgtcgccgtaaagaggtatccgccggattcggtcatctgtatctgcggcatatacgggttcaccgggatataataaactccgtcgtaggattcgatccgtttaagcgcaataagatacgttcttccgatacgcatgagctgcatatcatccctgcagtaattcggacgaccgttactttttttctcaaaaaggattatctttatcggcgaacatatcgtgtcgctgtaaagaagcctgtcaacatcggcggtatagacgagtctttcattgtagagatcgtaagcgtagtcccttaccgtcacgcggacaagcacatcggcatccgcaagcgatgcttcgcgcgactttgtgatgtcgtattttgatttttccggagaagcgcagggcgccccgtcggtgtccggcttaacaccgaagcttttcgaccagtcgaattccgggctcggggtgagtccgagattatccagattcgcgcaaagccgctgaggcggctcgtcgaaatgaggatcggaactgctttcgtcggagccggcggtgccgtccgtttcttcggattccgcttgaggcggctcggaagaggcggtatcggcggtggtcaccggctccgtcaccgtatcggattccgacggagaaaccggagacggcggtgcagcggtatcagccgtatccttcgtgtcgggctgcgttttcgtctgagattcatccccggtctgcggtgcgtccgccgtatcacgcgaggtatccggatcggcgggaacgctttccgtcacgggaggcgttacggtcgccgcgggagatgaggcggtctcgtttgcgaggatatcggacggagtatcgccgcctcctctgccgttcatcgtatatatgacaagggacacggaaagtacgagcaccgccgccgtcgccgcaaatgcggcatattttattttgaatccgcgcttgggtgcggcgggaaggacagcgcgatgtgcatcgccggcattctccgccgcttttcttctcagctcatccgcatcgagttccggaacgtcgagcgcgtccgtccttgcgcgatacagttcttcaaacttcaattttcactccctccttttccaaaatctttttgatgcgtcggcggctgcgcgcaagcgacgatctgacgcttccttcgccgatgccgacaacggaagctatctccgccgtgcggtagccttcgtaataatacaggtgaacgatctctctcgcctccggcttcagctcggcaagcgctctttcaagcgctccgaagtccggcgcgccgtcgtcccgacgttcggcaaagcgctcgagcgtctctccgttatcgtcggacgcggtgttctttctcacataagttttgaactgatccttcgcgcagttgaccgtcacgcggatgaaccacgcatgctcatgctcgggagattcaaattccggcgcgcttcttatgtatctgagaaagacctcctgaaggacatcctccgcatcctctctgttctgcaaacgtgaatatgcaagtcggtataccgcggctttctgccgttctataacttcttccggtgtctgttcggcgatcattcgcttacccctgttcaatatataatactgttttttcttcgattacgctgcacttttccgaaaaaatttttcaggaatattgtcacccgttccggctttcaacgaaaactccgatatcgcgcatgaaatcgcaaagagcctcctcgaaccgaacgccgaagcgcggcgcgcttcccgccgcggcggtaagacggatgctttttgtcgtaaagcgcaccgccgccgctgccgcgtcgctcatgctcatgccgcgcacatatgccgcgacgagtgcggaggcgaacacatcccccgtgccgtgataaaatccgggaattctctcgtcggcgaaatatccgtaatccccgccccgttcgagatacgccgcgcctatcttcccgtcctcgtacgatacacccgacagcatcgccgccttcggaccgagctcacacagcgcgccgagcgtttcttttatatattcctctccgtagcccgattcgcggtattctccgccgagcaggaacgccgcctcggtgagattcggagtgatcacgtccgcctccgcgcaaagcgagcgcatctcggagacgaacgccatatcgaaattcgcataaagccgtccggcatccgccatgacgggatcgacaaacacggttttcccctctccgccgaaggtatcgattatcgagcgaacgagcgatatctgctttgccgagccgaggtagcccgtgtatatcgcgtcgaacccgataccgaaactgcgccaatgcttgcatatcggctcgatatcgtcggtgagatcgcggaaggtgtacccggtaaactccccggtgtgcgtcgaaagcaccgccgtcgggataaccgcacattcaagctcggcggctgaaattatcgggatcgcaactgtcagcgagcactttccgatgcaggagatatcatgtattgcaaggacacgtttctgtctgttcattgaagagcctttctttgatgctttgattccttcaccgtcttgttatatatccaatgcgctttgcgctcgatcttctgaatataaagaatgatgaaagaagaagtacggcggagatcgccgcacacacgcccgcat

SEQ ID NO: 1683 - DNA, 32759 bp, Unknown
  16S sequences of unknown bacteria
cacgggtttctttccttgccgaccttcttccacgggtttctttccttgccgacctcctcccacgggtttctttccttgccgaccttcttccacgggtttctttccttgccgaccttcttccacgggtttcttttcttgccgaccttcttccacgggtttcttttcttgccgacctcctcccaaaatccaaaaatctcttacctaaaatttttaaggtaagagattttttatgccgactttcgccgtcgattcgtcacggcgattacgttccccacatccggacagcaagaaattcagttcaaaacgacgccttttttgattctttgaaaatgttttttctctcccccgataagagggagcgcacccgtcgccgcctctctctttcgggcttttttcgtgtttcttgtcgaatccgccccgcttttttctcctttcgccataattcctccccaccgcttcttttcttcgtttcttgcctttaagctcttcggtttcacgtgaaacgcgattttttgtatcggatataaaattatgaatgtatgcgcaaaaagcaatcgcggacttttttgaagttatccacgataatgtggataaaaagaggttgtccacatgaaaaattttgcttttgtggataactttttgttaaattgcacatactacgccgtttttgcccgaattttccctcaaaaagcctttaaaaagctttaaattgtggataacttacctaaaaagcctgctttttaattttaaaaatcttaaattttggtgtggataagtaaaaacggcgtaaaaaatcgcttctattttccctcaaacgacaacttttttgcccacgaacacctgttcggacacgtgtaaaagtagagttatccacagttatccacaaaggtataattgtaaataacgcataaaaaagacgaaaaaacgcgctagcgaaggtcgcttgttcaaaaagcaaaagcgttttgcggaaagagaaaagggccgcgacgcctttcggctatatttcaaaaggactgcggctcgcctttcccgaaactttgtcctcgtaaaatatccttttgaaaatagaaaatcccgaccaaataaaaaatcgccgcgtttctcttctgctttctgtccttggtttacccataaaatttatgcacctccaaaaatgtctgacttttccgatgcctatcaaatcccgggggacttttttcgcatacagtgtttcgccgcccgtcccggcgacgcaagttctcgcaacgccccgccgcccccttgctcttgccctcttgaagagggactttttaccaaaaaacgcccccgcgtagtacgggaggcgctttgtttttttgaaaatgtcgcggacagtaccgcgaaaatcggaaagaggaggatcaaaatttaataaacaaacccaaaagcatagtcagcggatttttgttgtaaatgtatttgagcaccagcgtcttatcgaagaaggaaacgatgccctcggagggaatgagggagagaatcgccaaaatcgcgcagatgataaacgcggcttttaaaagtcctatcgcaaagccgagcagaccgttgagcgcggacgcgaccgaccacgaacgcacgatttttgtgaggattttctccacgacgaggaggagaatctttgcgacgataaagataacgacgcccgaaataagcaatccgaggaactgcgcggcgacgggcgccaccacctgcgcgagcgtcgtgccgggcgcgagattgttgacttcggagatatttttggcgatgatgtctttaaggaagccgggcaaggaaacgctttccagcgcggcggtgatgccgcccgcggaaatgtccgcgtcgaatcccttgattttcaagaacgtcccctcgaatttgcccgcgaagaatccctcggagccgaacagcgagggaagccatcccgccaccgtcgacgcgagcgttatcgccaaaatcaacgccaccaaggtagagatgagtccgaaaaagcacttgacaaagccctttttcgcgcctcccgcggcgaatataagtaatatcaacgcgcagacaatatccgcaacataagcgatctgaaaagaagcaagcaaatcagtcatccgttttgccctcccgcaatttgttttttgccgttgcggaaagtttttatccgtacggcttgttatttattgtaacatattttttcacgaatttcaagtctttgaggcagggtgaggaaaaaatccttgcggggcgtatatccgcgcgcaaaaaggcaataatctttccgattacccacgcatacaaaaaggagccgaattatggaatactgcttcaatctcttcaataaactcgccgcggacggcacggcgatggccgtcgataaatttttgcgcgccgaaacgcccggcggaggaaaagcgcggacgagggaggaaaaaatctccgcgcagcgtcaggcggccctgcccgtgcggggggaggagcttcccgtcgtgctttgtatcggcagcgatctcgccatcggggacagcctcggtcccatcgtcggctcgatgctgaaatataagacgcagggactcaacatctttttatacggcacgctttccgcgcccgtaacggcgaaagagatcaaatatatgcgcacctttttgagagaaacgcaccgcggcagaaaagtgattgccatcgacgccgccgtggggagcgaaggggatattggtcttgtaaaaataaacgacgcgcccctgtttccgggcgcgggcgccaataaaaaattaggcagtatcggcgacgtttccatcatgggcatcgtcgcggaaaagtcggtgatgaattacgggcttttgaataccacgcggctcaatctcgtttattccatggcggagatcatttcggacgggctttcctccctgctctgggaactgcacggaagggcaaagtcgcggacggtggtataataaaaaaacgctcttttcagcaagaacaggcgtttccccgttcgggaaaacaagcgtatctaaaaattctcttttcccgaacagacgaagggaacttttcctatcgccgataaagggcgtctttcgaatccccctccgcgcttgcggcgcggcgaagaatgccgcttgatatatctgcgcgctttttcccaaggaaacgctgtttcgttcccattttagctctttatcctcctctacatcatccgtctttaccctgcgtccgcttttagctaaatcccattccacagaacgataaataacacaaaatagccgcggcgcggaataaaaaagcgtttgacagagaaacggggactatgatataatatgcttcacggaaggttttcggagaacacttccgaataaaaaaaccgaggtactatttttcatgaaaggctttttcactgccaaacggctgtgccgcgcgggcatcatcgccgcgctgtacgtcgcgctcacctattccttcggggcaatcgcctataacggatttttgcagattcgtcccgccgaagcgctgtgcattcttccccttttctttcccgaggcggtgcctgcgctctacatcgggtgtatgctttccaatcttggctccccgtttttggtatacgacgtgtttataggttccctcgccacgctattcgcggcgctcggcacttacctggtaggtcgattttttaaaaagcacgctttaaaactctttttgggcggactctttcccgtccttttgaacgcttttgtcattcccgtcgtcatcgtctttttatgcggcgatctgtcttacgggacaaaagccgccacttattggacgttcgcagggtcgctcgccgccacagaagcggtctgggtatatgcgctgggcgcgcccctgtatttctttatagagcgtatgcgcaaaaagaacgtgtccgccttctcggacaaaaattctctgtacgccgcgggcaaatccgaacggcaaacgacaaaatagctcccttttacaaagcaaaataaaaaaaactcccccgacacgctccgaaaacgtcgggggagttttttgtcttttcaaacgattgtcccaaacggcaaaactacgttatttactcattctccgcacgtaagacacgggaacgtccatacgctcggcggcttcttcctccgtcatcccgccgtcgaggaatctgcggcataccgttttcatgctttcccccacctctatcacgtgtcggtcgggatcgaaaaaccgcaccacgcgctgtccccagcggtgctcgaaaacggggcgaacgtactctattttcattttactcagctcggtcaaaaacgcgtcgaaattttcctcctcgaaatacagttccgcgtcctttcccccgtaggaaatctcctcgtttgcgataaactccttccaggtttcttctgtttgcagacaaaccccgcccgtcaaggtgacgttcgcgccgaaatccgcgatgatatgcagtcccaatacgttgccgtaaaaagctttcgacatagccaggtctttgaccaccagcatgggatttttaaatttcattttttctcctttcgttttcttttttcaaagactcaaaaaccgcgcggcgaccgccgcgttacgccttgcaatcctttccaaaaaattttgattcccgcctttgtatcgcccgccttttttcccgacgatttttctgaaaaaatttaccgtttcaaaggcagaccgtgaaagtttatatcaaatcaaagaggtcggaatcggtttttgcactagtcagaccgcccactttcaggcaaaaatccgcatcggcgagctttctgcgcttctgcccctccgcgacggcaaaaatatgttttccgttcgtatagacgatctctttgcttccgttttcttcgacgatacaaaaatccgccgcgcccgcggcaatttccgtttctccttttccgtcctttccgagccgcacgatcttccagctagcaggaatgaagccgtaatcctcctgttttttgttctttttcagttctttgtccacattcaggagattgttgttgataaatatttttttggcgtccgccttgccgtttttcgcggcgcctccgcccgcgtccaccgagcgtcccgactgccccgaaacgagcggcttgcccgtaaagcacatgacgaacatcgatacgaatcccgccagcgcctgcacgattctcacggggatgagcaggatctccaaaagcggatttcctcccgtcttttccgttccgggcttcttgatgcagtagagattcccctcggaatcagtgaggggctttatgtaggaaaatttgggatcggacgcaagcgtttccacttccatggtggacaaattcagccggcaaatttccgaagggacgtattcgataaagttgttgttctcatccctgcccaccccataggagttaaagaggatggcttttccctccgcgtcgaaggagggattctcgtccagagaatctccccccgtcaggcatttatagtcgccgctgtcttttggaaagagggcgatctgcgaagtaacggaatcggtctgcacggcggcgagcatccgtccgtcggcattagaggaaacggacataaattcctcctcgttagaagaaacgatatgcgcctccgtcttgatttcgtcgtctaagagcttggaatagatccccgaagtattgttgacggaaaaggcgtaaacgatcttgttttcctcccccgtgagcgcgacgccgtgcacggcagcttccacccgcgtttcgtcttctccctcgaaatagtaatcctcggacatcatccgcgcggcctttccctgccgtttccattccttgctcttggcgtcgcgcgtcgccgtttctctataatgcacgatataattgctgtcaaacttttttatcgctccgtccgaatagacgccgagcttctctccgtcgctgaatacaaaacgcatgattcttaccttttcttttccatttttttcttcccgggcacaggcggcttttttaatctcttccgctttcccgcgaacgcgaaagcgggcgcacgcaaagttctcccgtccatccgtcggctctccaagcgccgctttgtcgcctttctctcatcgcctgctcggaggggcctccttaccgctacggcgcacttcctcgttcttccgcctgctcggagggcgttctcgccgttctccgtttttttgcggcggcaacgcccgccccgcgcgccgcgattttcggttttcgaagccgcttgcagcggatgcttccattatacacgcccgcggggaaaaaatcaacgacttgcgccctctttttaaaaggaaggcgcaacgatttgaaaaagaggagcttatctccccttttccctttcggctccgccctttcaaagatcgtttcgaaacgacgaggtctgttttgaacagtttatttttcttcttttcccgcgcgatttggcgcatttttcataaaggatcgggacagcagacgaccgctgtatcccgttctccctctttgacggcgaaacggcaggcgacgacaagttcgccccttaaaaaggcggaggcgagaatatcgatctgttcctcggtatatacggcggcggtcatggcttcgcgggaattttgcgtgacgagataataaaaaatcaacccgtatgcttccgaaggaagacttctgaaagagttatccgaatcgtaaggggcgggcgtccgctccaccttctttttaatcgcgtacggcttgatcaaaaaaaattccgaggtgtgattgaggtagtcgctttttttggaactgcctatataaaagagcaacacggaaaagatgacaaaggcgataaacatccaggcattttgcaggatagcgaagaaaacaaaactcaaaaccgcgaaaatcgcgccgaacgcgacaaataggggcttcccgttgtttttgatacgccctatggctttgttgtccttaaaattctcggcgatgtattgatggggattggaaatccgatccgattgaaaagagggaggaggatcgggcagatacacctttccgtccgagctcgccaatttttctatcttttcgacggggaccgctctgccgggcgaagctttcgccgcccccgagggcgacgcgttcccgcttgccgcctttccgtccccgctgcccgacgcctgcccgtttaaggctttccgcatcccgctttcttttttcgaagaaactttcccctccttttgggagttcttttcctctttggaaggaaaggtatgcgcgtgtttcgcgtgctcttccagcatgatatgcgcacggtgttctattttaggctcctcccaattttcccccaccccttttaaggggtctttttctcctgttccctgccgataccacgaatctcccgtatcctcgtaccaggcttttccctcctcgttctcctttttttccgggaaagagtccgaatcgggcgaaagttccaagagagagtcaaaattctttttttcctcttgcagggagcttccgaaagcatcctcggcaaagttttttccaaagccttttttgtcctcttgcggagcgtcgccgaaatcttttccaaagccctcttccccgtccttcttttcccgtccgaatccttccccgaatccgtcgctttcccctccgaacgtttccttttcctgtccgaaaccgagttttccgaatcccgacccggaggaaaatcccgacggctcttttttattctctttatcaaaattttctttcatttttctgtttccttttccgaaacgccccctgaaaacgggtatgttcgcgccaactttgtcgttctgcggtgaaacctcgcacccgacttttttcttcccgttcggcgccgtcaaaacctttttttcaaagacacgcttcgattctctcttttctccgtttcttagagcaaagacgaaaacttccgctttccatttttttcatacattctcttccgcggacttttttctttatgtcagcacggggacgatcggctcgcaaacgacggctttgtccgacacaagcccacgtttttttcggcaggcaacgacaagctctcccctcaaaaaagcctccatgatcgtttgtatctgttcttcggtataaatcttttcggtgacggcttcgcggcgctgttcgccgctcttataatagagtttcaaagcgcaatcggcaaggcggatctcttccccgtcatatctgtcctcgtcgtacttttcccattctatgcgcacctcgtcccggctcgatcccgcgttgtgaatcaccgcggcgccgtcaaaaccgtgcaataccccgtataccgctttgacggcatacggcttgacgagaaaaaatttccccgaatcggcataggcgctctttttcagcgccatgacgagcagggcgatcaggaggaacaaaaacgcggcggcgatccccgccagtcccgcgaggaaaaagggtccgccctcctcgatgcacgtgtaagaaagaaacagcagggacacacagacgcccagcacgatcaatttttgcttttttctgcttttgcgaaaaatttttacggagggatttctctcaaaattgtccctcagataatcggcgggattttcgattttgtccgtttccgactccccgagatgggaaggcagatacacccgattgtcctttttttcttcgctttcctccacgcggtcgcccaccgctttcgcggctctgtcttttcccttcttttttgccgtcggcttatccctgcccccttcgaatacgtcgttaaggttttcaaactccctcttgcgagcttcctttttcgactgcggaagcgaggggacgggattttcccgttttcccccgtttttttgcgggaacaagtcggcgccggaaggcttttttacgtccgctttataccacgcgtcttctcccgcgctcttttcataccacgcgggtccttctttctcttcggagagtgattcgccgaaagaaaactcgctcttttgcccgccttcccgttcatcttttttttcttcaaaagcgtctttcattttttatccgtccgccctttttcgttttctccccttcggtgttgcctttgccgtggaaaatttcctcttcttcctattttttccgcgtcttttctcgcccgtcgtccctgtccttgtatactctcgtttttcttctcccttttctgaaagtacgacaaggcggaacggcagatagtttgccgttccgcttccgtcgcactaaacggtcaaaaaacccgcttacttattttttttaggctctgcctcggtcttttcttcgtttttgccttcggcgctctcgtcttccgccttttgaggcgcgacgatcttaggcagggaaagccccgccatattatacacctcttcgaggggaggcagacttttgagcattccggaaaggaaattcgccgtggacgtcttgccgtccttgttgtcgccgttgtcccaaacggtgactttgtctatcttcaaattggaaatggctttcacctgttcggcgacgatgtcttccagtttttcggtgatcatgaggcgcacggcttcgtccgcagaccccgccgctttgacgatattcgaaagaccttccgcctgacgggagagcttttcctgcaaaccgcgggcttccgcttccatttttgcataaatggcgtccgcttcgccctttgccttgcggcgcatctgttcggcttccgcttcggcgtcgatctctttctttttcttctcgatctcggcggcgacgatgatatccgcttcgcgggtagcctgttctctcgcggcacgcgcgtgctctgcctgttgctgcgcggcgtacgattcctgcaaagctttcgcctcctgaatcttttccgcggaaacggcgattttcagggactccgcttccttttcacgcaagagcgctttcgactgcgcgatgtccgcttttgctttgttctcgcccgtgattgccgcggattcggcttcggcgacggaaattctctcctgcatcttcgcgttcgcctgaccgatggaacctttcttgtcctcttcggcgacggaaattctcgcctcgttgatggctttggcggcggcttccttgccgagcgcgatgatatagcccgattcgtcggaaatatccgtgacgttgacgttgatgagtttcagaccaatctttttgagttcgccttccacgttgcgggaaatggcgtcgaggaacttatcgcggtcggtattgatttcttcgatctccatcgtcgcaatgacaaggcggagctgaccgaaaataatgtctttggcgaggtcggaaatattttgaagggtaagccccaaaagtctttccgcggcgttctgcataatcgcgggatcggtggaaataccgaccgtgaagatggagggaacgtcgatacggatattctgtttggaaagagcgctcttcaaatcgacgctcatggacaggggggtgagatcgagataggtgaatttctgcacgaagggcgcgacgaacgcgataccgccgtggatacacttggaactcttatacgtcccgtccttgttcttcttgtttttaccgtagaccaccaataccttatcgggcgggcaggtcttgattctcgtcatgatcatcaaaagcagcatgacgacaatgagaacgacgacgacggtcacgacgataccgaccgcaccgctgttcgcaagcaatacattcttcaacattttttcttttctccttattttttatttatctttaaaccgaactccgttttcgctctttcaaaaacgcggttcgagtttttataatgtttctgatttttcaatcccggctcttttcgttttcttcacaaagatattctaaatttgcattgacgaaaatcaatcctatctttccgatctccccgcttgccctttcgcagagcgcgagaagaaaggagtccctgtcttcttttacgcattcgatcttcgtttccgccgcggccagccggatctgaccgcgaaggatctccgacgcaagctctcttatccgctcgcgcggcaaaagcagcagcctttccgcggcaattttcattttttcgggttcgacggagatcgccacagtaaaaacgaaggacatatccgccgtcctatcgtccgaaaagacgactttcttgatttccacgggacagacgaggggattcagatcgagataataatgcttttgcagcaaaggaacgacgaacaccgcgccgccgtgcacgcatatcgaggtttgcggacagccgtttgcgtcttttggcaatttgccgatcacgacgagaatcttgtcggaaggacactttttaagtcccgtcaggagccaaagcgccgcaaagacaaaaagcaggacgacgatcagcgccgcgccgagggcggcgtctttcggggacgcgagtaagccgtttccaatcatcttttctcctttactctttccacattcttattttcacatcttcttttctctctttaaaaagctttcgcctcaaccctgtccgcttcttcggcatcggaacggggaaatttagagaactcttatttttttaaacgtcctcttccgccccgccgcgccttcccgtttcgagaacgacggctttttcctccccgttcagggcgacgagaagttcccctctttgaaaagccccgcagaaaagatctttttcctcttcttcgtaaaggcggaactcgtccgtcgtcgcttcgttttcgcagtcgttttcgtcacggaaacaaaagcccagcaaatatagattgcaggtctgcatttcgggaccgacatacgttccggcgacgtaaacgttgagggcaaacggcctgatcaaacggtgccctttggcggaatttctcattttcttttccgtgcaggcgagcttcatggcgacaaaaaacacacccatcgccgctccgccgaaaaagagcaggagcaggaaaactttacttttaaatcggtagaagccgctgccgatcacacccgcggcaaagatcagggcgcccgcggcgcagcagattttgtccctcgcgatggacgcatccctttccctgataaatttctcgtcttcctctttgaaaaaatccctcaggtatgcttcctcgtcctcgatttcttccgctcgggtatgttgtggcggataaaacgtttgagccgccctttcgatctcttcttcttccataaaactccccccattggaatattcttacgttgcgatgaaacgaccttttcctcccgcgcccgcggcttccgacgcggaaaaaaactcctttgaaaagagagcgcctccctctttttatcgggaaagaaaccctttttcccgatccgggaaaaggcgcgggccaaagctcttttttgaatcccggaattttacttttcgaaaaggaacgcaaatccatagtctgaaaaacggaaacgtccgcctttctcttttccgggaaaatcggaaaactgctcccacgaaagggattctttcggaggtcttaaaacatatttacgtaaaacttttttcttttccgtcctctcgttttaaaaatcgggcagaaggacggaatcttttcccccatcggaaaaataacataccctcaattttttttcgcgaaaagcgttcatgacgaaagcttcttcttttttggcgtagcagtttctcgtcttttctctgactatcgcccccgagggcgtccgaaaagtgatttcaaaaccgatgcccagggaaaaaaagggattgccgcttacatggcgatacgttctctccacggtgatttccaaaggctccgcgaagacgtatttgcccgcgttttttctaagattttttctttttctgttccgaaggatccaaaagacggcggcgaagatcaaaaaaaacgcgcccatccccgcatacatccatcgatggggttcgtcatcggacaatagctccatcactacggctaccgcgattcccaaaagcgacactttcaccaatcgtccgtaaaatttgcctatccttttaaaatacggggaacggggaatatatttttccgaatcggaaagggaaaaatcgtcgcggtaaggtttgtcaaaaaaataatctttttcttccattttctattcgtcttacccctgcccgccgctttttattcgctatctttcccgtccgaagaggaaagggcggcttgcgaggaagcgtcttccgccttgactctcttcaccaccatataatcgacgcctatttcggtgatgacgactctctcgtccacggcaaggcgttcggtttcgtcggtgatggcgtcgagttcggtatacgcgccctgcgccgtcagcgtaattttgcctctgcccgtacgggcgggcgcaatggatacgtacacggtggcctcttttcctatcaatttatccttgtcgagattgcccgcgcactgcatcttggaaattcctttcatggcgagcgccaccagcaccatggcaaagagtccgcacaccagggcgagaatgatggagagaaggatattttcgggattgatttgcaggatgagcagacctatccagccgccgatggcgaggaaggacgtaatacctttcagcgtgaacagggagatgcccagatccccgtcgggcgaatcgaactgaccgtcgccgccgaaatcggtatccgcatccgcgtccgcgcctcccccgaaggaaaaaagcatcatcacgatctgaatgacgagaagcgctgtcccgacaatcgctatatagaaataaattttttcgggcgtcgtcaaagaattataccaattcataataaaacactccttttgcctctttttgcttgcaagccgaaaccgaacgtaaagccgctgacgtttttctccgttttgaagttcccttccttcggcgttttcccgccgaagtttttttcgtccgtttttcccgtgtctgtattctctcgctaaggaatgaaaaaagatttttcggataaaacgggtggcgacagacgcggaaggaacgttttttttctgaaaaattccttgcggggaagaaacgggacaagccgcccctttaccgaaaaagacccatacattgtatgtttccatacagtgcatgagtctcattttttaaaagccatccgaacggaaaagcaatttccgttagctgtcggatttcgttacgcagagattctctgatggaacagtgcgcaaattactccctcaacttgcagtatcgtcagtctgtcaagctttcttgttcagtttgaatatattatatcatattttcggaaaatgtcaaggggtttttcgaaaattttttgcaaaatcgcacggatttcgcttttctccctctaaaaagaacttttttccgcttttttcctgttattttttaactttttcaaagacaaaactattttttcacacttgaaacacgggcttgttcctgcggagaaagcatttcacggtatacgcggttcctcccgtttccctgcggcagtaggcgatcagggcgtcggcgcgctccgccatatagtcgtttcttttgagcatacatcccctgtaatatttatccgcaaggatgacttttacgtcgcaggcgtccaaaagccgaaaatattttttcttttcgctctcgctgtaatttttctcctgccccacgcagggaatgcaccccaccagacgcagggaagggtattcccttttcagctttgcgacgcattcggcggcatacagatcgaatccctcggccatgccgcagtaaaacgttctcgtttcctctcttgcgagcgcgcgcaccgcctcttccagctttttctcgtcaaaatcctcccccgtcaaacggtgtcccgaaaaggcgcagctttttatttttctgccgtatccttcgatatagagttgttctcccgtttgtcccgtcattttcttcgctccgcgcggctttttggtccgccgaaaaaaagccgccttattttatagtgcctctttccgttattttttttgtcaaggctctctttcaaaaaaccgactgattttcagctcgtcctcttgctttttgaaaaactccgtcgagcctcctttgctctcctttacagcggaaattttctttcttttccgtttccgcgcggatattttttcggcgtcgttctgactttttcgatcaccgccagcgtcctgtccccgtacccttcgggcagggaataggcatagacggcggattttctgccgccgagttcccgataggcgttctccgcctccccgatctctccgacgtccccgctcttataggcgataaacgccccgccgatcttcacgagcggcagacagtattcgctcagcgtgttcatcctcgccacggcgcgcgccacgcagtaatcgaatttttcccggtacttttcctcccgcgccgcatcctccgcgcgaatattcacaatattcattccttccaaacaaaggttatccacaacgacgcgcagaaaatcgcactttttccccacgctttccatcaaagtaaaggacaaatcctccctcagaattttcaatacgacggagggaaaccccgcccccgagccgacttccgccacgcgcgcgttctccttaaaaagaaacgccgccgcgctgctgtcgagaaagtgcttgtaaaagacttccttttcctccgtgatggacgtgaggttgtacttctgattgtattccagcaaaagagcacgaaatttctcgaatttctcgcgtttttcgcccttaatcaacgtttcgttgtcttttaaaatgttttccgtatccatactcctcgtataatataattacttgtttttttgaaggaaccgagtaagaaacctttatatcgacagcttagccgcggtataatgtgtttggtacagagagaggctcgtagttaccctccataagagttccttcttcttcaaaagaattacgcctctgtcttttccttagttctgtctttctcccttgcaatcgacgcgaaaaccgcgctgccttccctttttccccgcgttttcctgccgccgcagagcgcacggcgttgaaacggcggagatttcgttgcgcagacatagggcttctcttttgagattcccgttcccgacgccgcttcggaacggggagagatcccgtacatactcctctttttctcttctataaatacagcatccttaacgtcgtatttgtaagacgaaagaaaacagaagcaaagactccgcgcttacctacgctctcttcaccgcagcgccgacgtcctgtttgaatcgggcgaaaaaatgccgataaatgctccgcgctttcgcatttttgcttctattatagcatagaaaaaataaaaattcaagccttctcttccccttcttttttctctcttctcctttttttcgtttttcgcaaacggtttgtccaccgtctgtcgataacgttatccacaatgttcatagcttttgtggataactttcgactcatttatttttattcattcttatataatttttattcaccatctttctcatgtcccctccgggttttccacttatacacattttttccacaaacttgtccaccaaaaagaaaaaagttatccacaaattttttacaaaaaaatagtctttgagcgtcgtttttctctccgaaaagggcagatttcccgaaaaagccgaaagttatccacaattccaccgtccctattactattattaataatactttttattacttgaaattaaccttgggacaaggtcctctccccgcggcgccgaaaaacgaaaaaaaaaaacgacgcttgaaaaaacgctgcgcaagagttttttttcccgaaaaaaggaaggaaacgggagagaggggcgaaactcaaaaaatttattttccgaatttcaattcgaaaaagatttttgcttgccaaaaacggacggatatggtaaaatgactttgaatcccaaaaaagacggacgttgattttttatcaacgaaaaggagtggaaaaacatgaaattcacgtgtgacggattggttctttccgacgcggcggtgacagtgagcaaggcgtgctccgccaaaaccacgatgcccgttctcgaatgcatcaaaatcagcgccaaaaacgacgtattgacgttgctcgcttacgacggagaaatttccatcgaaaagaaaataaaggcggacgtgctggaagagggggaaatctgcgtcaacggcagattcttttccgacttcatcggcaaagtcgcgggcatgaacgtcgtcataggaacgggggacaaggggctggaaatccgctatgaggattccgagtccttcatgcaggctctccccgcggaggattttcccgcggtcaggagcgaaacgggcgacgactatttcgaagtgaaggaatcggcgcttaaaaatctcattgcaaagacggtgttctgctgcgcgacggacgaaagcagacccattttgaagggctgccttttggaagcgtccgagggcaagctgtacgcgacggctctcgacggctaccgcatggcgacgtccgaatgcgggatcgaagggagcacgggcagcatgaaaatcgtctgtcccgcccgcacgctgacggaaatttcgcggatgctggaaggaggggacaagccactgaaaatccgcgtcgccaaaaatatgctgtcggtgggcgtggacgacaccgttctcacctcccgcctctatacgggcgaattcgtcaacaggaacaacattttcccgcccgcgttttccaccgagctttgcgcttcccgcgccgaactcatcgagagcgtggagcgcgcgtccgtgctcatccgcggggataagaacaatctcatcctcttcgacatcaagggcgggaacatcctgatcacggcgaactcggagatcggcaacgtttccgaatgcgtcaaggcggagatgacggggaaagaactcaaaatcgccatgaacggcaaattcatgctcgacgcgctcaaagcgctcgacgaggaaacggtgaaattgtctttcaatacccccatcgcgccctttacgctggaaaacaaggaaaataaagagagttcctatttgattttgcccgtcagaaccaccgcataatcgcttgacgagcgcataaaagttgcgctataatgataagagagtttttaaagagccacgtttgcggatttttttaaacccggcgaatttctccctccccttgcttcgtcaggggaacaaagaagcgattaaagtccctttcgggagggattttaaaaataaaatcaagaaaaaacggtagataaaaggagtaataagaaatgaaaagaacgtatcagcccaaaaagagaacgagaaacaaagtgcacggtttcagaaagagaatggcctccacggcggggagaaaggtcctcaaaaagagaagagataagggcagaaaaagactgacctattgacaaaaagccgtccccgagcgcggggaagccgcagtacagctcctgtaaatgcggcttattcgttattatcggatttttgaaaagcgctttcctattttttttcctccatcggccgacagcgcgctctatgccgcgcggcggcccgtcagaggatagcggctttaagagattcggactgttttgtgaaaaaataaaggcaaggccgcttagcgctgtcgggcgggaatcgtccgtattgttgcggataaaaaggcggctttttgcggcagggttcctatggcaaggaaagacgccgtcggacgcaaaacagacagagtaacggcgcgggcgccgtttgtgcggcgtcgtcttcttgaaacggcgcttcggcaaaatttcgcggcgcgcttaaaaaagcgccttttgccgggaaaaaaggtcggtttcccgcaaaaagacagaagacgaacttggaacgcgcggaacatcccgctttttccttgccgacagcgcaaaaaagagcggtccctctccttcgtttcgccgcccgaaaaagcgggtaagaatgagggacggaaaaagaaaacgaggaagtcctgctttcggcggataaaaaatgaattatttaagactgaaaaaacaatcggactttcaaaaacttttttccaagggcaggcgggcgttttccccgtcgcttaccatgatctatgttcccgcgaaggaaacgcgcatggggatctcggtgggcaagcggcacggcaaaagcgtcatgcgcaaccgcatcaagcgcctgcttcgggaagctttccgctcttgcaaagaagagatgcggggcgagtacagcatcgtgctcgttcccaaggtcagggaggaatattctctgcgcacgttcgaaaaacacttgaaatgtatgataaaaaaggaaaaactttgacgctgcgtttttcctccctttggagagaaaacgcaaaatatcttcggaaaagggtgttcaagccctatttgaagatgttttgtatgcgcctgattctcctttatcagaaatatctttccaaacatacctgcctctatacgcccacctgctcccaatatacgctggaatgcatcaacaatcacggcgtccttttggggatactcctgggagcctggcggattttgagatgcaatcccttttcccggggcggctacgatcccgcgcccgaaaaatttttcaaaaagcgctgggtcctttgaaaaacggcggcaagatcaagcatcgggcatttttcgacatacgtttgtcaaagagttcttaaaagagaggaatcaaaggggtttagtttctttgttcgccctttctttttctccgccgcggcgagaaaaaaacttcccgaaaaaaactcccgcgcagggagaggcgggataaaaggcgtcgaaagacggcgaaagccgagtttgaatcttcgcagagttcatgggacagaccgcgccgaaaaggaaggaacagtttgtccttcgaaaaggggaggcgcaaaaaagcaaacggcgtaaaagacctctggataaggacggagcaaaaagtcctgccgggaagaaaaaaatacggacagagcacccgataaggggtgaggcaaagctttgaatcacatcgaaaaaggttaacttcgtaaaaacatcgcaatgggaatttttaatttattggcttcggcggatcccgtcatcccctttttgggagaaacgttcaacatctcgctgaactggatcggcaaactcatcaactcgctgataggcgcggtcggcatcgtcggcgtcggcatcatcgtgttttccctcattctcaaagtcatcgttctgcccttcgacgtctatcaaagggtgtcgatgagaaagcagaatatcaagatgaaggagaacaaggaaaagctggaaaaactgcaaaagcagtatgccaacgacaaaaaaatgtatagtcagaagatgatggaaatgcagaaggaaaacggtatttccatgctttcgtcctgtctgccgatgattttgtccctcgtaatcttcttcgtcgccatcggcgcgttcaacgactattccgcctatgcaaaccttcaaaactacaatctgatggtgaacgcttacaacgactccctctccccctactgcgcggagctttccgaggacaatcttacctctttcgagcttacgctgacggacgacgagggcaaagaaacgtcccagctcttcttaaaggtgaaggacgaggacggcacgggcgaggacggcgagaaaaagtatatctattacaccctgctcgcccccgcggattacgaggaaaagaagggcgatttcgaatatctcagcggctatatcggcggctacatcgacaaaaactactacatcgacgtcgagaggacttacgcggctttcggggcggaaatagacgccctcgtggaagcggggaaggacgaggaaaatcccgaaaattcgctgaccaaggaaactgcctgccacgatttcttcgtttccaaagcgcaggacaacgtggtgaagacctaccaaacggaagtcaccgaccgcatgagcttcggctggatcaagaatatctgggtcacggacgcttcctataagcatcccgtgctcgattacagcggcttcaagggaggcgtttcgaacgaaaaactcaacgtcgacggtaagaaggtgaaattcaattccatcggcagctacacggacgcttataacgatacgagctataacgtggtcacggcaaagctgggcgctcagaagaaacaggcgaacggctactatgtcctcatcgctctctcgataggcaccattttgttgcagcagttcatttccatgcgttcgcagaaggaacagacgcagttctcgtccgtggacggacagggtaagaccacgcagaaaatgaccctcgtcatcatgacggtgatgttcgccatcttcgcgtttatgtacagcgccgccttctccatctacatgatcaccagcaatatcctatccctgatcacgacgctggtcatcaacaaagtcgtggacgtcgtgatgagcaagaaggaggaaaaagcgcttcaagaacagtataacaagcgcttccccggccgcgtttacgtgcccgaaaaggaaagaaataaaaaagacaaaaagaccgatttcaaaatcggcgatcataaaaaaggcgggaaaaaagactgacggaaaagggtaaaactataatttcggattcgtcaaaaggagtttatcatggaacactatacggaatttacgggaaagaccagcgaagaggcgattgaagaaggtcttaaagagcttggtcttaaaagggaagaggcggatatccgcatcctggaagaaggaaagaaaaaattattcggtttcacaaaggcccgggtggagattgcccccaaatcctctttaaacgcatttgaaggggacttggaagaggaatcccctacccccttgacatcttatgcggatgcggataaaaacgccgcagaggacgaattagaggataaaacggaaagacagtcggaaattcacgtggacgcttcggggcgtacggacggcgagagagccgtggaatttttggaggggcttttcgacattctcaaaatcacggcggtgacggagcttaaaaaggaagcggagaagatcgagatcaacgtgacggcggcgaacaccacggcggtgatcggcaagcgcggcgcgatgctggacgcgattcagacgatcgcgggcgccgtggcgaacacgggcagagcggattataagcgggtggtggtagactgcgagaactaccgcgaaaacagggaagccaccttgcagagcctggcgaagaggcttgcggagaaggcgatccgattcgaaaagaagctgaaattggagccgatgaatccgtacgaaaggcggattatccacgccgcgctgtccgactatcccgacgtgacgactcagagcgagggcaaagagccctatcgttacgtcgtcatcgtccccgcgaatgtgcgctatcccgacagacccgcctcccccgtccgtcccgaacgcccgccgcggggcggctataacgaccgcggcaatgaccgcggcgggtacagaaagtcctacaaccgggagtacggcgaccgcgacgggtacaggaaaccgtacaaccgcgacgggaactccgcgcagggcggtggcggttacaaaaagccgtataatcgggataatcagagcggcgacggatataagaagccgtacaatcgcgagggcgggtataaccgcgaccgctacaattccggacgcggctacgaccgccgcggggaaaacggggaaggcggcaccgatttgagcggcgagcgcagagattcgggcaggagctacgataaaccccgcacttcctataaaaagcccacttccgatttcttcggcacctatctgggcaacagcaaagacaacaaggacgacgaataacgaacgtttttagcgatccgcctctccgcgccgattttttttccgggcgggaaaggcggacgtttttttcgacggtgcacagtaagagtgcgtatcgttttttccaaagggaatttcataaaatttcgacgggcgccgtttatgagaataaagcgcccgtatttttttgtggagggaaagcggaaaaaaatttgatgcaaagccgctttttatgggcaaagagaatcaggaagaaaggtggtttgtacggataaagcctctttaggatttttcaacggaagagggaaagcagactcctttctttgtttacgccgataaagagtcttattttctttttattgcaaacgcgattcgggaaggctttttaggggcttttgtcgttttggcgatcaaaaaaagtcgtcggaggaagcgggcggcattctcctcggacgacgcgccgcggcgaagaggcgtttcttttaaaaaaggagaggtcccccctcttttcacggaaaagagttcccgcgtttgataagccctcctcccaaaaatgaaaaatttttttactcatacgaaaaaaggaagcgcgggcggcatattcccgtacttcctttttatggttcctcaggtttgataaaaacactatctctgcctgccttaccttttcgttaggagtgatataaagaaactttatcttggagtgatttactttgttatcgggtcgataaaaaatcttttccctgtccgcagagaaaaagtgtacggcgacgtcgaaaaaggcagagccggcgcgctgcttaaaaaagatcccgctgtgccggggaaaacggcgttaaaaaatcaggaggcggactcgtcgcggcgctgaggcgtttcgtcttgccgggcgtctaatttttctttgagttcccgaagttccttttccgtgcgttcgtacttttctttcagcttcatcatgccgtaggcgagcagaaaacagccgaaaaagaagaccgccgccagcgcataccccaaaattccgccgaggcttcctcccacgccgaccaccacggcttccaccgcgcaaaggacgcttgcgatcaggcaaagcgtcataaaaataagacaaaatacagccatgacaagtcctccttttttttcgcggcggcgttacagagaaaattcgtcctccccgctctctttttccgtgtcgggctgattgcctttgcggaaacggatttcctccgcgggaaagtccttgaatatcaaaccgccgttcctatcgtcgatcttcaccttcacgagcattttcagcatattcaccgaaaccaccgtgcccttcccttcgggcgtgcctacctccgagcctactttcggcacttttttgtaagcttccgcataatagtcgctttcatagcttaaacagcacatcaacctgccgcaaagaccgctgattttgccgggattcagggaaagaccctgcgtttttgccattttgatgctcacctttttaaactcgggcatattgcccgcgcagcagcacactctgccgcagggagcgatgccgccgagatacttcgtttcgtccctggtgcccacctgcctcagttcgatgcggatatggaacgcggaggcgaggtctttgacgagctcccgaaagtccacccgacccgccgaagtgaaataaaagacgatcttggagccgtcgaacgtgtactcgcagtcgatgagcttcatgtcaagtccatgtttttgtatcttttctttacagatctgcatcgcctggggctttttcgcctcgcaagcctcgtaaaattccctgtcccgcggcgtggcgatgcggatcacgggctttaagggctgaacgacttcgctgtcctccacttccttttccggatacgctacccatgcgtattccagtccgcgcgccgtttccaccacgacgggcatattccgttcgtacgtttcgtccgggcgcggggaaaaataatacagcttgccgccgtttttgaatttaatcgctactacttttgtcatatatttatccttatactttgaacacaaagaacgaattttccggcttcggatcttcaccgaaaaaacgtccttcgcttcaaaggattacacggtattaaagattttttcaaaaccttttgatttttcgatttaaaatattttttcgcttgcccgcgctgtaaaaaaaggaaagtttctccttcccggcgggcgtcgaaaaggaaaaagaagggggcagggcagagatcacttattgttttgctccatgatcttcgccatgcagatttcaaggcactgcgggaaaacgccgttgaagcggatttgtttttccgcgtccgaaagcgcctcctgcgcgtaaataagcgcgcccaattggtaatattcgctgatgttatacagccgctgggtttccgagcggagcatgagatatttttccgcgcggctcctgcccgtttttccgggttgtcccacgccgtttatttttgccgttttgagaatgagcgcgtcccgaaagatcaggcgcagaagagaaacgagttcctttttgtacttcgtttcgcccgctcgtcggacgatggcgggcagacggaagggatcgctcgtcgtcagttcgaacgcgctttcgacgaggtctttataatatcctccctcgaaaatattttgcgccgtgccgaccacgccgcccgacgccgccgcgtaaagacccgtatccgccgcgtgcgggtagagccgtttcagacattccgtcacctcttttatggaaaagggagggatttccaattgctgcgcgcgcgaaagcaccgtcgagagcacggggaacgtcaccgtcgctcccaagagaaaatgcacgtctttcggaggctcttcgagaagctttaaaagcttgttctgcgcctgcacggtcgcttccgcgaaatcgcctatgacgaacagctttttatccccttccacgggctttaaggcgctctcttcgcggattttttccgcatcctccacggaaaattttttcccgtcttcgggaagaattatacagtccgcaaagctctcttcgtcgatgagagcgtcgattcgctccgtccgcgcgtgggaggaaaagctgcggtgcgccccgcccgcttctgccgccgcttcttcgggcgtgagaaaaaagagtttggcaaattctttgagcgcagacctcagattgcgcgcgtcgtcgaatactaacaaataggtatgattcagacgattttccgcgcgctccgctttcaaaaggcggtaagcgtgggtggattgtatgagttgacgcatatccaaacctctccgcgcggattttttcggatcgccgagccgcgcggaactgtcgtaaaggaaagactttttgacataaaaatcccgcttttgtggcaatttataccgaaaatccaccctttcgtctttattatatcataaataatcaaaaagcgcaagcgtgtaaggagattttttctttgcctttaaaagcggaacaaacggcgccgaccttcccccggaaagagattcctgccgcgttgcggaaagttgaaaagaaaattcgcgtttccatcgtttttaaaataggttgttttcctcttccttttccttcggtgcgggaaaaattcgggcgtttttgcggaaaagatcgcgcggagaaggtttattctcatgcgcttttcgggtacgtttcaggtgtttaccaaagcaaggacaacggcaagagatttgacataaaaatttcgcttttgaggcgtcttcgagaggcggaccttgccgtgcgttgcgcccgctttgcgtcgaaagggtaaagaagtactccgcacgatccgacggcaatcccggtaaaaattacaggcagcggcgttcgcgaagcgcccgaaggatattgtcaaagataccctgcggcgtgtttctgccgtctatcgtgacgatgcgcgcgggattttccgacgccagcgttttataagaggcgtataccctgcggtgaaactccatgcccgcctgttccagtctgtcgtttttgtccgcgccgtgtttgcggcaaaacgcttcctcgggactcagatcgataaagatcgtcgcgtcgggaagatactgttcgagcgcgtaagaattgatgttttttacgaacgcttcgtctatgccgcgcccgcccgcctgataggcgagcgaagaatccacgtagcgatcgcagatgaccaatttgcccgcctgcaaagcgggcgccacgcggtcggcaaggtgttgtacgcgcgccgccgcgtacaacagcgcttcacattcgtccgtcatttcgctgttttttccgtcgagcagcacgcggcggatggcttcggagatctttcctccgcctggttcgcgcgtgaaaatatgcggcagagcgtttttcaacaaatagtcgctgagaagtttgagctgcgtgctcttgccgcagccgtcgcagccttcgaaggtaatgaattttccgcgtgtttcgttcatgagaatgtcctttgaaatgttttacaatttgtccgcctctttgcgggaaggcgaaaggcggacggctttccgttttttaaacgacggcaggagagaaagctctgcttgaaaagagcgggaaagagagggaaagagcgagaggggtttgtattctcgccttgcggctttattcgcccgcagttccctatctccaagcatggacaaaaggattttttaattgccgtttttccgttaccctgtcgaaagagcgtatgagatgtttcggctacgcttgacaggaagaaaaataatctgttggtttcttctatatcaaaagcgtattgacgaaaaaaatcatggaaaagacggacagaggttcgtcggaaaagaaggggagagaatatggggacctatgcggccgacgagcgaggacgaagcgggaaaaacccgccaaaagaccttgttgcgcctcggcttacgctctctaattttccgcgcccccgaacggaaggctctcgttgtcctttaataaacaaatttatcggaatacgcagagccgcccgtcgtctaccccgaaacaatggtccgcccgtctgagaagcctgattttttcttccgtgatccgttcgcccgcctggattaaaggcgtacagggagggaacagtccgcaggttttggcggcgatccgtcccgccgcgtccgtaaaggaaacccattccgtttgctctttggaaaaatcttccccttttttttccccgtccgaaagaggagaaaaaacgttttgcgccgcgtcttctttttcttctccttcgcagtcggactcggcttcctcccgttgcagaaggcgggcgaggcgttgtatgtctttcggggcttgtccgaaagcggcgctcccgccgtcggagagtatagaagcggcggacagcaacggaaggagttgcttttttaattttgtaaaattctttaatgtggtggcgggggaaagatagaacataagaatattcccgtcgcaaaactccgcgtaaacgccctttttttccaatcgtttttgcgcggtaaaggcgtaagggccgaatatcgcgcacagcttcgtccaatcgcctccgaaatgaaactgcgcgggataagcggcgacgagcttgcaaaccgcctcttccaaagcttcgtttctcggatattttacggcgtattccacggacgccatgatcgggtaggaggggctggtggtgcgaaagacgtcaaccgcctctttgagcttgcgcgcgagagcgggcgtcctcgccgaaacgaccgccccctgcgtcagcgcgggcaggctcttatgtaccccgtccacccaaagatccgcataagcgcccgcatagtgttccttatcggaatgcagatgtcctccgtgcgcgccgtcgatgagtaaaagtttgccttcgatttcgcaaagcgcccgcgcttcctttaaatttacgagattgccgtaatagtccggggaggtcagcagcagggcgtccgcctgcttcaatttttcgttcagctctgccctgggtggctgtaacgggatttttttgaccatgggagtttcgataaagacgattttgacgccgagcaggcggcaggcgttgaatacgcttttatgggagaggcggggcactgcgagccgctttacgccgctggctttgagcatggaaaatatgcccgcggtgctgccgtcggtgaggataaagcttgcggcggagcctaagacgtccgcaatctctcgttccgcgtcccgaaggacgccgtgcggacaggaaaggttgtccgaaaaggacaattccgtgatgtcccatccgcccgctttgtgtccgggcgtatgaaaggaaagatgcttcttttttgcgttttcttggagcatcgagtaaattttacaggattttaaggtctttttgtcgcagtaaaaacagttcatcttgatacctgtcgcgccttttcagcggagagttgccgcggaaacgagaaatcgcggcgctaacgattttgcatcgggaaaggcgaaaacaaaaaagtcgataaagcgatggagggaaaaaggaagaaagggcgtgtgtagcgggaaaaaacgcgggctcgcaaagggataaaaacgtccgaaagacgtaaaaggtcgaaaaattcataaaaagccaccgattgacggtggcttctggcgttgtttatgcgtttaagtccgaacagtgcgtttcgacgagatagttgacaaaggaaagcccttcgaaacggctgtacgaatatttttcctccgcgagatccatcagcaccaaacacacattttccgccgaagcaatttttttctctccgtcttcgtccgtgattgtcttatagtagcaaacgtcttttttcagatcttccattttttcattcgggcaaagattgatgctgtaataatccgtcctggtgaggggcttgccgtttaaatcctgcaaatacagcgtcgtttcctgcaaggcgacgtaccctttttcgagataggaaaggaaagacgtgagcgacgttttatagctttcgatgcgctgtatttcctgtttgagtccctcgcggatctgcgactcctttttaaaacgtttgtcgttgaggcgcttgatgcggacgcggaaatccgtttccactttttgttcatctatcgtatgcgttttatagtcgccctgataatagccgttcagataatccgccatctggtcgagatagccgccctcgccgaacgtcgccgcggcagtgtgatagccgtaaaggaattgttcgagataggtgggcgcaaactcgtttccttggtcgtccttatatttcgtcgtcacgccctcgttgatattcgccgcgaacagcgcgtcgccctcgcccgtcgacacgcgcgtctgcaacagcgtttcgctgtactgctcgcccgtcgtgatgtccgtactcgaaatttccaaaatgtcgtaggaaaagacgttcttttcgcgcaggagagttgagtacgaattgaagcgcgaagtgcccttcgttcccgtgtaattgaaaatggtgaagttctgcgcctgcgtgacgcgcgtcgccgccgtggtgaagataagactccacaccaatatggcggcaaccgccgcgagaagaatctttatccaatcataggataaaaagatattcaggcgcttttttgtgattttcgcatccatagacatcctttgtttcggctctgccgccgatcttgtgtttaacgggcttttaaactctcgctcccccgcgaaaaggcgaacgttttattcgcttcttccattttataaaagctttgtgtccgcttaatgtccgttttgtgtaaaggcgctaaactctgcattccttccgtttgaatactatgtgaataaatgtaataaaaacacaattatctcttacctgtctgtttgatttttgctaaatattgggaataaatctatatttgttttttctccaaaggaaagaaaacgggaaaatcaaacgaaaggagagattattttttcggcttcatggtggggaagagaatgacgtcgcggatcgtggaactgtcggtgaggagcatgacgaatctgtccagacccatgcccaggccgcccgtggggggaagcccgtattcgagggcgtttaggaaatcctcgtccacctgcgcgtccgtatttcccgccgcgcgtttcgcctgcacctgcgagagcatacgctgtttttgatcgatgggatcgttgagttccgagaaggcgtttccgtattcgtgtccgcagatgaaatactcgaagcgttcggtgaaagcgggatcggaagccttgcgcttggcgagcggggaattttccacgggatagtcgtaaatgacggtgggctgcaccagcttgtcctcgacgaaggcgtcgaaaaagtcgaggaggacgtgccctttcgtcgaagcgtcgccgtgggaaagctccacgcccttatctttcgccgccgcgcgcgcctcttcgtccgtagaccaatcgttataatccacgcccgcgtattttttcaccgattccgccatcgtcatgcgcgtccatgcgcccatgtggatcggcgtgccctgataggtgatgtccagcgtgccgcagaccttttgcgtgaccgttttatagagatcctcgatgagatccatcatgccgaaataatcggtgtacgcctgatacatttcgatggaagtaaattcgggattatggaaggcgtccatgccctcgttgcggaaaatcctgcccacttcgtatactctgtccatgccgccgacgatcaggcgctttaaatagagctccgtttcgatgcgcatatacatatcgatgtccagcgcgttgtggtgggtcttgaacgggcgggcgtccgcgccgatttccagcgtcaaaagcacgggcgtatccacttcgaggtaccccctgccgtcgagataagcgcggatctctttgagaatcttcgagcgcgccacaaacgtgtctttcacctctctgttcatgatgaggtcgagatggcgcaggcgatatttcatgtcctgattttgcagtccgttgtatttttcgggcaagggcaggagcgccttggagagcatggtaagctctgtgacgtgaacggtgatttcgcccgtctgcgtcttgaaaacaaagcccttaaagcccacgatgtcgccgatgtcatagtcttttttataggacagatagttctcctcgccgatatcctggcgggtgacgtaaatctgaatggagccgctcttgtcaaaaatatgcgaaaaggaggccttgcccatgatgcggcgggacatcattctgcccgccagggacaccgtttttccttcgtacgcttcaaaattcttcttgatgccctccgagtccgcgttcacttcgtatttgactttttcataggggttcttgccctccgcctgcaatttttgcagcttttcgcggcggatctttgcttgctcgatgagcgcttcctcctcgttttcggacgggactgccggctgagagattttcttttcttccataatgatgaatccttccaaaagtaatgtatgaataataagtttttcttatatctataaaacaggcttattgtaagaacaatgtaagagcaatttaggaacaatcgaaaacctttttgcgcgtatcgcaattttcaaagcgtttccgaattttttaaggggagcgggcgccttcgaaaagttgttggcggcaagacgggggactcaaaaacggaccttttaaaattcccgagaaattcgttttttcaagcggagcggacaaagtctgtcaaaattgtttttgtaaagccgccgcggctcctatgcgcctgacttacacgaaagatagttttgcggcgtactctaaaaaacgctcgtcccgtttttccctctcgcaaaagaggatggccgaaacgcctcgaagggcgttttccgtgtctttaccgtttcacaaagacgtttgtattcccgaccataaagacgcccgacatttttttgcgaaagggggaaaggcgctttaaaaaggcgttcgtcacgattttccctgcgcgtaaaggattttttgcggcgaaccgtgaaaaaactcgccgtatatttttattgtttgcaaagg

SEQ ID NO: 1684 - DNA, 17892 bp, Unknown
  16S sequences of unknown bacteria
aaatgcccttgcaagcaagcatttttgcttcatggtataataggacacggtataccgttggtctgtaactgcacgtttacttaccgtgtccgcgagaatgacgcaaagcgtcattctccgacgtgcgcccgaggtcaaacacacggtataacattaatccgtaattgtaagtttacttaccttatcccttgagccccccgttatccgatgcgagtacggtctcgtttttacatcaaagctatgcgccgcttcccgtcggaacggtgtccgtcgggcaggctttcccgcacatccgataagcggccttggcagacaaacatttttacaaaggcggaatttcaatgaagatatcaaaatacagacacgacagcgattattcgtatacgcttggagccacgcttacaatcgagcttctgaaatgcattcccgaggcggtcgaagaggttttcataaacagcaaaaccgaaaacaacgacactctgaacgctctctgcgagaagttcaacataaagatgacggtgagcgacaaggtgttcaacatactttcgcccaaaggaaactgctttgtcataggtgttttcagaaagttcgagcatcacataaccgaggggaatcatgtcgtcctggtgaatccgtcggatgcgggaaacgtcggcacgattataaggactgcggtcggatttcacatcaacaatatcgccgttgtctctccggcggtcgatatattcgatccgaaggttgtacgggcatcgatgggcgccgtatttcatctgaattttacatattacgaaagctacgaaaaatattcggcggagttttgccgaaacaatatgtattccttcatgcttcgccgcagcgatccgataaacggcaccgtattcaagaaaccgtattcccttgttttcggaaacgaggcgaccgggctgcccgacagctttgccgattttacaaatccggtcagaatcatgcatacgtccgacattgacagtcttaatcttcccattgccgcggcaatcgggatgttttcggcgacgaaggaagagtttgaagtgtaaaatcgcatcagccgaaaacgaagattttacattccgcaaattctccgttttttgcttgttgcatttaccttcgccgagtgatataatagataagcttgcgggcggagggatccgttcgtttttcggataaaagaaaggaagcttttgaaagcaaaagctgaaggatgacatggaagcgtcacagtataaaactctgatgacagagggggcggtatggaagaagatcgtctttttcgctcttccgctttttctcggaaatctttttcagcagctttacaacaccgccgattcgctgatcgtcggaaattttctcggtgaaaatgcgcttgccgcggtaagctcatccggaaatctgatatttctcatggtaggattcttcagcgggatagcgatcggcgccggcgttgtaatcgcctgttatttcggtgcgaagaactacgcgcttgtggaaaaagccgtacatacgactgtcgcgttcggccttgcggcaagcgccgttcttacagcactcggcgtatggctcactccgcagattctcgtatggatggcaactccggagaatgtgctgtccgaatccatactttacctgcgcacttacttcatgggatcggcggggcttataatgtacaacatctccgccggaatcctgcaggctgtcggagattcgcgccatccgctgtattatctgataatctcatcctttgtaaacatcattctcgatatcgttttcataaccgtattcggaatgggggttgaaggcgcggcgcttgccacgatactctcgcagttcatcagtgcgattatctgtctcacgcatcttatgcgctcgaaggacgtataccgcctgtccccgaaaaagatacgctttgatcttccgatgctgaaaattatcgtgcagaacggattgcccgccggatttcagaactcgattatcggaattgcaaacgtagtcgttcagtcaaatataaattccttcggcagcatggcaatggcgggctgcggcgcttactccaagatagagggctttgccttcctgccgatcacaagcttcacaatggcactgacaacctttgtcgggcagaacatcggcgctaaggagtatgcccgtgtaagacgcggagcacgcttcggcatcatctgctcgatgacgatagccgagcttatcggccttgtgacgttcgtgtgggcgccccagcttatcgcggcattcaatgacaagccggaggtcatagcctacggcaccgaccgcgctcacatcgcagcgttcttcttctgcctgctcgcgtactcgcactgcatatcgtccgtgctccgcggcgcaggaaaatcgacggtgccgatgctcgtcatgcttgcctgctggtgtgtgatccgcgtgaccattctttccgttttcgttccgatgacgggctcgatcgccgttgtatattgggtttatccgatcacatggtccctcagctcgatcgtatttctgatctactactacaccgtcgattggatccacaacttcgaccgtgcaaaataaagtccgaacatacaaaaagctcccgcccgatgtggcgggagctttttgcgcggggaggcttatcaaggtcttatcggagcggtgatagcggtcggaaattacgcagggcaatttcagcagactgcttatctgtattataggtaatcgcccggagcttttgaaaatacttattgtgaaacggtatagagtgaatagaaataaccttttttctccaacagcttctcaaaggtgccgcattcctcaaccttaccgttatgcagcgcaataattctgtcgtaccgtttaagcacattctcatccaatttatgcgttacgacaatgcttgtcagatcttcaacggacagaattgaagacatgatttcatttgcggtaatttcgtccaacgcagctgtcgcctcatccataagcaagacctttgttttgcggagtaatgcccgtgcaatcgagatacgctgtttttctccgccggataatgcactgccgttttctccgcaaacataatctttaccgtggctgcgcacaaattcactcagtcctgcctgctccatagccgacataacgtcctgctccggaaaatgcttgtataatgtaatgttgttgtacacggtatcattgaaaacaaagacattctgctgaaccaatgatactgcccgtaacaaggaatcagacgatatcctttttagttcaacaccgtcatactgtatgctcccgccgtaattttcgtaggtctgcatcagcaaattcagaagcgtagttttaccggagcctgatcttccgacaacaacgtatttttttccggcttcaaactgtacgctgatacctttcagaacaggcttgccttcatcataaccaaaggtaacatcgttgacacaaatctgttttgtcattgtgcagcggagtttaccgacggattccccggagtcctcggacaaggtatctgccagcttatcaataatggcgacagccgcttttctgttagcaagaattttgggtattctctcaatcggataaataacataatttaaaagctgcaggaatactaaaacaatgcccggagttacacctgtcccggatactgccatccatgcaccgatgatgaacacacccaatctcatgatcacgccggcggcagtagaaagcagatgtatgttttcttctgcatatctgcgttcatactttgcagcttcaacgctttcgttatcgctttcaaatctctttaatatttctttttctgttctaaagctcttaattactgcaaatccggaaagaatatccttgatgatgcctacatagctttcgtttttgtcagacagttttttctctttggcagccaattttttgcactcggaacggaaacggcaataggcaaaacggataacaggagagatacaacagttaggatggggttataccacagcattaaggccaatgcaccgacaaatcccactcccatatcaatgaccgctaaaatacagtcaagataataatcctctacgggacgcatgtcgtttgtcagcgcagaaatgatttttccgctgttctcttttgaaattgagctgatacgcttgtcaagtatcctgccgaagacatacgacttgtactgcagcatggcggatttaatataacggggtctggcagtacggtagatagcataagcagccataaatactgcagacgaaacagaggataccgcaatcacgtcggtaagcggcgttgaatccgtccccgccgcgatgtcgattattttctgcagcagccaagagacaataatgttatagacacttaaaatgatgattgttgctatagctacggaaagccagcccttgctgtgcaggaacagttgttttctcaattgtttattttctttcatataaacctccgtatattgggaaagttaaggcttttcgtccttgtgatatgggattctccgccggagaaagcgttatctgataatcacggctttccacctccgattcaatagattttgttgatcttcggcagaataaaacagagccgcaggaaggcatcttcctgcggctcataaacgacaaaccaagccccgcccaacggagctatgcaatatgtttatgagtagaaaatttaaccttcttgcaatgggcagagttatcccgtaaatgaaaacgagtcactctgcatatcccgattttatctgcaagaaaagttaataatcatttctactcctcatattttttattctgtaaatattatactcccggctgtgcagtttgtcaaccccacataggcaattaccccaatagaatacataagaaactgactgccggatgagtaaagctcccggcagccatacaaaatctcagatatccaaaggcactgtattcggttacgacaacagtgttattaaagcattacggtttcggtgatattttattcgcctctcaaagcccgcaaagcgaatactgttcgacgcaaatatcgctgcggagcagtaaggctcgcctttaatgttccggcatataccgcacccaaacgtcaccgtgcgccctgtgcgttcgcgccgagaaacgtgaccgtaaacgtacttccctctccgaacgtgctttcaagattgatgcttccgcccatgtccatgacggcgtgcttgacgatcgacagtccgagaccggtgccgccgacctccttcgaacggctcttatccacgcggtagaagcgctcgaaaactctctgccgatcctcgggcgcgatgccgattccggtgtcggaaacggtcagcaccgctccgtcgtccgaagccttcacatctacgctgacgcttccgccgtcgcggttatactttattgcgttgtcgcacagattgaacacgatctcgtgaagcaggcggctgacgccgttcacgatcgcaacctcaccggtcagattcagcttaacgtttttcttttcggcttcgtcacgcaggcgcgaaacctcctcctctgcgatctcgtaaagatccgccgtctccttcggcatctcgcctccctcgtcaagctgcgacagtcttatgatatcgtcgatcagtgaaacgaggcgggctgcctcggcgcgaatgcgtccgacgaagcgcggcacatccgcatcggcgaccatgccgttttcaagaagctccgcgcttcccattatcgaatgaagcggtgtcttcagctcatgagaaacattcgcggtgaactcgcggcggtttctctcggcaaatacccgatcggtgacatcaaaaataagcagtgcaagtccgaccgcgccctctccggaatcgatcctgcttatgttcaggcggtattctcttccgtctctgccgagggaaagctccgtatgtccggattccgacgcgaggtcaatcgcgcgttcgatatcgcgtcccctctcaatctcgatgaagttgcatccgacgcatgagccgtccgttccgaaaaatttttcggctgcgggatttatgctgagcacggtctttttcgtgctgaggagcacaagcccttcgctcatgttttctatgaccgcgtagaactcgcgccgtctgttttcaagctccgccttctgcgaatttatcttcttctgctggcgctcgatatgcgtgagcagcggcgaaagctcatcatatacgttgttttcaagcgggcggtcgaggtcgatagaattgagcggcgcgaccgcctttgcggatacgcggcgcgcgaggacccacgaaaggatcagcgcgaagataaagatcagcgcaaggggctgaagcatccccgcgatcagaagcggaacggtcgttctgctcaccgacgcacggagcacggtgccgtccgacaggcggtgggcaaggtatatccgcttctcggtcatggtggaggagaagcgttcgctctcgccgtcgccgtattcaaaagcggcttttatttccggcgccccggcatgattctgcatttccgaggcatcgttcatcgaatcgagcagcaccgttccgtcacggtccacaagcgtaaggcggcaatccgtcgtgccgatcgagccgaggtaatcctttccgcctttctcggttcccgccgacgcaaggacaagctcgctcttcaggcggcttttctgcattgaatcgaaatatccgtaaagcacgcctatgatcagcacaaggcttgcaagaagcacggaagcagatgccaaaaatacggatcggaatatttttttcgtcatttccacaaccatcgccttcggcatgcgaaggcttcctttcccaacggatcagtctccgaagcgacgccgcacacgcggcatttcagggtctcacactcatccggtatccgacattccggacggtctcgatcatcgctccgctttcgccgagcttctgtctgagcgtccggatatgcatatccaccgttctcgtttccccgacaaaatcctcaccccaaacctcgctgaaaaggcggtctctcgtaaagaccgtgccgggatgctccatgaagagcttcagcacctcgaattccttataggtgagtctgacctcttcgccgtccgcggtaacggtgcgctgatccgtattcaggcacacgttccctgcgtaaagcacggtatcggaacgcgccttctgacatctgcgcagcaccgccctcacccgcgacaccatctccatcattccgaacggctttacgagatagtcatccgcaccgagatcgaggcactgtattttatcgtactccatgccgcgcgcggtagccattatcaccgggatatcactccacggggcgtttgagtgcagcttttcgagcacggcgacgccgtcctctccaggcagcatcacgtcaagaatgacaagatcgggcacatccttccgaagcgcgtcaaaaaaagcctcgccgtcgggaaacccgcgggcttcaaagcccgttgagcaaagggtatacacctcaatatcacgaatgccgccgtcatcctcaacacaccatatcttcatacggttccttccttgtgggagcctgtcacggagaacaccacccattcggcgatgtttaccgcgtggtctccgatcctctcgaaatattttgcgatcataagaagatcaagcgcatactcgccgtcgtccggcttatccgcaatcatctttatgagcgatgattttacctttttgaaatagtcgtccacgatatcgtcatgccgtatcgccgtgttggcaagctcgaggtcgcgctttacgaaagcgtccacgctttccgtgaccatctttatcgcggattttgccataaggcttatgtactcgcattcgccgccgcttctgccgccgagaaacgtaattatctccgcgatatccgccgcctgatcacctatacgctccatatcggttatcattttgagcgcggcggagatctgcctcagatcgcgtgcgaccggctgctgctgaagaagaagcctcaggcagagcgattctatcgtatgctccatccggtcgatctcggcgtcgatcggcgcgaccttttttgccgcctccgcgtctccttctccgagcgcacggtccgcaagagatatgacctcctcgcagagtgcgcccattcgtgtaagctcctcattcagcgttgaaagctgttcgtcaaaacggcttctcattatccgaacctccctgtgatataatcttcggtgcgtttgtcctccggctgctcgaacattttttccgtgcttccgtattctatgagatctccgaggaggaaaaacgccgtattgtccgagatgcggaccgcctgctgcatgttgtgagtcactatgactatagtatacctgtttttcagttcgattgcaagttcttctatcttggaagttgaaatcgggtcgagcgcgctggtcggctcatccatgagcaacacatccggctcgacggcaagagcgcgtgcgatgcacagtctctgctgctgtccgccggaaagtccgagtgcggatttcttcagtctgtccttgacctcatcccatatcgccgcgccgcggagagaattctcgacgatctcgtcaagcttcgcgcgattgcggattccgtgtgtgcgcggaccgtatgcgatgttgtcgtatatgctcatcggaaacggattcggcttctgaaataccatgccgatctccctgcgcagttcgtttacgtccgtcgccgggtcaaagatatcctttccgcggtagcggatgtctccggttatcttcactccggggataagatcgttcatgcggttgagcgttttgagaaatgtcgattttccgcagccggacggccctatcagcgcagttatcgcattctcctcgatgtctatgcttacgtttttcagcgcctgcgcggtcttgttgtaccacaggcacagatcctttaccgaaataacactgttcatttattttaccgccgctttcggattgcgaaagcttcctttccgattaccgaccggacttgtccgatcagaggttctttttccttgtgaagtattttccgacaagcgatgcggacagatttatgataacggtgagtatcataagtatcgccgcgattgcgaaggcgacgccgaattcgccgtcctcctttgcgtacacataaagcgcgaccgtgagcgtcgctccggcgctcgtaagtccttcccagattccgttcagcgcatgggcaaatccggcggtaaacagaagcgccgcggattccccgagaattcttccgacggagaggatgcagcccgtcacgataccgtcaacgcatccgggaagtacgaccgtgcggatcatgcgccacttgcccgcgccgagtccgaaagcgccctctcggtagctctgcggcacggtcttcaggctctcctgggtcgtgcgcatcacggtgggaagattcattatgacaagcgtgagcgcgcccgccatgagcgatgttttcatgccgaagaactgacagaagaacagcattccgacaagtccgtaaattatcgacggtatgccggacagcgtttccgccgcgtattcgacggcggcgacgatccttttgcttttcgcgtattcggtgaggtatatcgccgcacccactccgagcggtatcacgacggcaagcgtcgccgcgacgatatacagcgtattgagtatatcgggaagtatgcctatattaccgtagagcgcgctcggctttgtggaaacgagcttccatgtgatgttcggtatgcccctgtacattatgtagccgatcataaacaggacgagcgcgacggtgagcaacgtgcacagcagcatcagcgtgcgcatgatcccgacataggcttttcttcccgcaggtaacggtttgtttttcacactcatctctccttgcttcttttaaggaaaaagttcagcgccgcgtttatcatcatgatgaataagaacagcacaagcgcgattgagaagagcgcctgctgctgcaggcttccgtctgcggcgtatgacatttcgcttgcgactgcggtcgtgagaaagcgcacgctttcgaaaagcgacggtatattcggcgcgtttccggcgaccatcatgaccgccattgcttcgccgatcgcccttccgacgccgaggacgaccgatgccgcgatgccgcttttcgcagccggcaccgatactctgaaaaatgtttcgatatccgtcgcgccgagcgcaagcgaagcgtcctcgtactccttcgggactgcctcaagcgcggtgaccgacaccttgattatcgaaggaagtatcatcacgcagaggacgatgatcgcgcagagcaggctcgcgccgtcgggcacgtcaaacagtttgcgtattcccggaacgagcaccatcattccgacaagtccgtacacgacggacggtatcccggcaagcagaccgacggcggagccgactgcagccttcaccttgggaggagcgaccttcgcaagatacactgcggtcatgaagccgatcggcactccaacggcgatcgcacccgccgttccgtaaatgctcgtgaggataaacggaagaattccgtattccggctcggcggcggtcgaagcccacttcgtgccgaacaggaatttcatgattccgatctttctaatcgcagggattcccgatataacaaggtaaacggtgatcaggagaacgcatgccacggtcacaagaccgaggataaggaatattccgtgtattatgttttcggcgagattctttttgtttttcatcgtttttccgcctttcatccgcagaaagcggcgccttccgtatttcaaacggaagagtgccgtacattctgccgggttattctcagtttgcggggactgcgcctgcatcgctgattatctttgaagcgtctgcggaggttacgaagtcgaagaacttctgtgccgcatccgaaagcttggtatccttctttgtcacaaggacgaacggacgctgtaccgggtaggttgcatccttgacggtcgcctcgctcggagcaactccgccgatcgtaagagccttgacgctttccttgactgcggcgagtgaagcatatccgatcgcgttggggtttccggctaccgtggtaataacatctccggtggaggtgagctcctgacggtacctgcacttgctttccgtctttgtgatggattcgaagccgtctctcgtgccgcttcccgcctcgcgtccgatgaggacgatctcggcgtcgtttccgccgacatccttccagttcgtgatctcgccggtgaagatcgatgcgacggtttcaaggtcaagtccgctcaccgggttctcgggattcacgatgatcgcgatgccgtcgtaggcaagcacggtcccctcaagtccctttgccttttcttcatccttgagcgcgcggctcgaaagtccgatgtcgcagcgtccctcggatactgcggttatgccggagcccgatccggttgcgttgtatgtaaatgcgattccgttcttttcctgaaatgcttcaccgagagcgctgatcacctttgacattgaggtggagccgtcggtcgaaacggatgatgtctccttctttccgcaggaggcgaacgcggtcagtgcaagcactgccgcaagtgcgataacgataatttttttcatatgaacgatctccttttcatttcttctttatttctttttcatgctgcaaatacatgataaatcttcagtgtaaaatgaaaaagattcgttttgtcaaatctgtgtaaaatcgaaaaaatcatgaaaatgcccccgacacgggatatcccgcatcgggggctgcgccgcttttactccggcacactgcattttataattttttcgccgcgcggcgcatcagtcggcagtttcggtcacggtattcgccgaatacgtccaatcgaccctttttccgttttcggtgagaaacacttcgctgccgtcgatcccgatcccgagcacgcgagcctcgccgcttccgtcctgcgctttcgctctgacagtcggctcgccttttccatcggcaccgaagctgataacataattagaggcggggcagaaaaatccttccgcgcggcatttgaatccgtcatacaccgacacggtgaatgaaaatactcccgatgtcatacccatgccgaggcagagcttttcctctctgccgtcaccgtccgtatcgtaaaataccgttccgtatgcggactttatgtaataatcgtccggcacctgaaagctgagcgccgaggtgcagtttgcgtaaatgccgtcgtcctctcccggaatgacagtcgaggaaaggtatcggcccaggtagccgtttccggtcacgtccgtactgtccgcaagcagatacatatcggagctcacatcccgtatgctgtatgcggagcggacaaggtatttatattcgttttcactcagaaactgcttctttccgtaatcgggactgtttatatcggtctcccatttccaatcccaaaagcggaatatgtatttcccgttttcatgccgcagctccttcacgaaatactcgtctccctgatccgtgtactcctgatatatccgcaccgccgcgtcctgtccgtcggcggagcgattcacgaaatccacccaatatttttcaccggaaacaaggcggcttccgtccatgacgacgcatccgtcgcgctttgcctcgctgaccgtgtagccctccctgatatcctcaagggacttccacatgttctcgggcgtggggtcggtgatttccgaatctgcgggatcggtcgtgtcggagggctgaccgggctgcgtatccgccgcatttcccgaagaatcggacggtggacggacggggtcggtaagcgtacacgcggagagcagcacgcatacggtaagcgcggcgacgacaaggcgcgccgacggttttttatagccgagtaccctctttattcgccgtctgacgcaatttgagccgaacgcaagcgggcatgccgcggtataggtgcgcggcgcgctgcacgaaagcatcgcctgagaataatccgccttctcctgcgggctgagcgatctcaccacccgttcgtcgcaggcaaactcgatatcgcggcacatgagtatgtacgctgcccatatgacgggattgaaccaatacaccgagagcagaaggaacgacgcgggctttatgatattgtcgcggcgggcgatgtgcgccttttcgtgcgcgatcatgtatcccgcctcacgctcgccgacgccgaacgggagaaatatctccggtcggaatattccgaaggtgaacggtgcgctcacgcgctcactctgcctgatgttatcccgcagaaggaccgccgtgcgcgtccttcttctgagcattgcgcagctcaccgacgcgtaggcgatcatggagcacactccgccgagccacacggcggatgcggcaccgagcggcgtgaagtgtgaagctttcgcattcggtgatgctccgtcatatgaggggggtgcactccggtttttgttcccttcgagcatatcgaatttgccggcatatgcagcatcgtatgaaggctccgatttttgatcctgcgcgggagagtcagacgaatcggtgattacttcttgcccgccggataagggagtatatgccccggacgcaaaagtgccggaggaattcgattcttcggaagcaaagcccgaggcggaattcagaacttcgatccccgtgcggaaaacgatctgcgacggatacgcgcccgccgtgccgaagctctcggtcgtcgggatcatgctgagcgggctttcaacggaaaacggaatcacaagtctgagcgcaaccgttccccacattacaaggctgatccaccgcggtgcttttctgaacagtgctcggaatacgatcactgcaagcacgacccacgacgcggcgatgctcatgttaagaagcttgagaaaaacgtcagtcatcattttcagcctcctctctgaatcggtcgatcatgtcctgtatttcgtcaatctgcgcgcggctcagccgtcgctccttggtgaaagcggcgatgaacgccgggagcgatccgccgaatctcttctcgacaagctcgtctatctccgccgcgccgacctcgtcctttgacacgagcgaggtgaccaacgtatcctcgtttttgaggacgccgcgctccgaaagccgctttatcacggtatacaccgtcgtcggcttccagccgagctcctcgccgcagagctttacaagctcgctgctcttaatcggttcgtgctcccagaggataagacagaagcggtattcgctttcaaatatcttcggggtgtccatgctttttctcctttcacactttcgccgcggtacggtccgcaccgtccgcagccctttactctaacgcgttagactttatctgattcaagtctaacacattagagtgaaattgtcaagcggaaaaacaaaaaaatattcatcggatgaaatcacggggaatgcgggcttgacgcccggcgcttcccgtgatatcatgaaaccgaagaatgcggatgttaaaatggaaaaaacgcccgcacacggaggaaggaagcatggatcctaaagagatttgcgagagaatcgatcttgcgtccgagatacaaagcgaggtgctcggcgctgatcttcggatacccgacgaacttgcggcgcggatgatctcgacagataccgccgatgaagcatacggcgagatcgaaaagctgtgcgatccggaaaagcacggcttcgacatgcttgcatgtatgcttataatcgtctgtcttgaggatcggaattccgtcaatttccgcggcgcatgaatgtatatcgccgcagtttttctgatcctttattgcctcgtatggatacgttatttcaccggcggacgcaaagtatccctgttcaaaaaagcattcctgttcgtgcccatgccgcttgccgtttttctcacgctttactatctgtgcggtgctatccggcttcgattcgatcctgctgattgcaaacagcatcggcgcatactttgcgatgagctctctctccgcactccacattgaccgtgcgctgttcatttcacccgttgcagatatggaaaagctgatctgcgatatgatgaatcgggcgaatgtcacggaggacgagctgcgcgcccgcggggagatcccgaccgaattcggcgaaacgctgtcatgggattaccgttgctgtttgcgcgctcatccgatcaaatggagcgttccgagccgcattttatacggcgagcacgacaatctgacctccttagaaaagatctcctttttttgcgcagcgcatcggagcaccgctcacagtcatgaagggcggcgagcattggtttcacacggaggagcaaatggaattcgcgggcagacggcttgaaggatcgctccgttgagatgccaaaccgcacgcggagcgtcctgaaccgaggatgcaccgcgcgttttcatttttccggaattgaacgcttacgaggttgacacccggtatctgatgtggtaaactgtatgcaagacagttaaataatcatacgccgtcagcatcggactttttccgagcggtacaactgaaaggatttcgaaaagatgaaacttattctcggcaaaccgattgtcgtcgggcagggtcccactctcgaggaagccgattggggaccgtggcaattcccccagcttttgaaaagagaagacggcacgctttttgcaagcgtaaatctcggaccggacaactgggcgtcaaacggcgatacacagtggttcaagtcatcggactgcggtcgaacctggacggaaagcaccccgacagaagccgcgacagcatatccgaaagcaaaaaacggtgacagctttacggcaaaggacagaggcaccgtagatattgatatgaagcttcttgaaggaatcgagccgaaatacattctcaatcttgatggaaagccctttttcgactattacctttactccgatctgagaccgggaaccattgattcttctgtaatgttcatacggctgaaaaaaggcgaaaccgagccgaaacaattcttcccgaaaatcacggacaatcccggactttgcatcgtccgcccgtcgggaacaaataagcttctttcgaacaagctgttcggtcgtctgagagtcgctcccgacggcagtctctggcagacgcattacgacagaggatttatcgacggcaagttctgtgacacgttcattgcatactattaccgctccgatgacaacggtgaaacatggtcgctcgtttccgctcttgatccgcgcggcaatcccggcgcatgctactactgtgagcaagacattgcgtggatcgacaacaggcacgcaatcacaatgctccgtgcaaacggactgtatactgcgatgtccgacgacggaggttacacctggacaacaccgaaaaagatagaggatttcggcgttgatcccgctgtgtgcgttctcggatgcggtgcgattctcacgacctacggcagaccgggctttctcgtccgtccgtgctttgacggacggggagaaaaatgggaggaccccatcgagataatttcaaccggaaacaactcctacaaaatgaacgatccgtcaaaagcgggcaatgccgccgaatgggggacatgctcttattccgatattgtccctctctcggacaacgaggcgcttatcgtatataccgacttctttgttccggatgagaacggcataaagagaaagtctcttatggtaataaaagcaaccgttacggattgaccgatgcgcgccttcggttttggtaaaccgtatgaacggttatgaggactgtcacgatcggcgccgtgctgctctgaacacggtgctttccgcgttatatgcctcgatgtgcagattattacacaaaaacctcctttgcgatatcattgtaccgcagaggaggttttttaatgccgccgaccgactgattatttattctgctctttttcctattcttcaaatttctctctgtttttcgggtcctcataaaatttctttatcctcggaaggagcatttcggcaagcgagtcgaaccgtctttttgcggctctgattgtaaaatgcgatattcccgagaaaaatttcaattgccctttgagagaaaatctcattaataccgagacattctatagaatacccatctatcagttcgggattctcaactgcggtaacaccgatctcatgcttgcgaaatgagttccttaaggaaggatgatgttgtataacaaagagcttctcccatggattctccgcatcctacgttcaaatcgttgtattgaagtgtgccggaaaccgggcaaaccaacacaactttaactaagttcttgcttaagccactgtccggaatcgaatcaaaaaaagaatactgtggtttttctttaacattgtagcctacccctaacgcagttggagcaatttggaaagctaacggacgtatcgcataatgtgtatcatcgacaaattttaaatagttcttcttaaatattgtccccaccaattttattgaatacacagcctccgtggtttcaatgtaaaaatcactctgctttcgattaaaaccggaaaaaagaaatccatggttgattatgtgcaatgaatactgtttcttttcgcaaagctttttgatctcaaaaaacatagcaattcttttacaaagaaaacgttcgaaaggatacagaagcaaaaccacgataaaaatcaacagcaaaccaaacatttacattttacctcataacatatcaaaatatcatcaatagtaacatttttcaccgtgttctgtacgattacaatagatatgttacagtatcaaaaaaagagtagcaattgagagccgaatgtgttacagttaagctaccacaccaaaagcaacaaaggagg

SEQ ID NO: 1685 - DNA, 13453 bp, Unknown
  16S sequences of unknown bacteria
tgtagtgttcggtctccttgtgagctgcggcggcttccttatcgcgatagacttcgtagaggatgtacttgttcgggtcgttgttgtcgtggaggacgtcgaagcgaacatttccctcttctttgcgcgagtttatgtggttatattcggttatcttctcaaattcagcggtgaactcggggataacgttgacaaacacaagtgtagctatcatgtttttctcccgaattactcagcgcttacgaccttgaagaactcaatctcttcgccggaaggaccgtaaacaaatccgcagttgagagtgagcttaacgggtgcggaatcgagcggaactaccttcggagcggatttttcgcgtgcgccgtattcaagtgctctcttgtaagccgcgtcaacatcgtcaaccttgagtgcgaagtggatgtagcctgcgtttccgcccttacattcttctccgcccgcgaacagctcgagtattccgccgtcgccgaggtcgagcatagctatcttgccgtttccttcgccccatgaggtgtaaaacttcattccgagaccttccgtgtagaacttgaaggaagcgtcaaaatcaaccgccttgagcgcaacgtgatggaatcccattccttttacgattttgtttttgctgactttctccacggttacgcttgtgtttcctacgataattgccatagtaaaaattcctttctaatgtatattttaggcttagtgatagaaccttatgcttgtgatgacctttccgagtatcataaggctgtttacgataatcggaagcattgttttgttctccggctggagtctgaagtgaccgtcctctttgtagaacgtctttaccgtagcttcgtcgtcgataagcgcaacaacgatgtccccgttttcggcaatggaagtcttctctacgataacaatgtctccgtcgagtattcccgcctctatcatgcttgttccgctgaccttgagagcaaacatttcgttgtcggggagcggataaagtcccttcggatagtggatgaagccctcgtagttttccacggcaagaatcggctgacccgctgttaccttaccgaggagcggaacgttgcagtagtcctttgcgtctccgttgtcgtcatacgagatgccttcgatacggagagtacggctttttccgttttccttctggatatagccttttttctcaagtctttcaaggcaggtgtgtactgtggatgtgctttttatatcaagagcggtgcagatatctcttatcgacggagagtagccgttctttctgatattttctcttatataatcaaaaactaattgttcttttggttcaagactgatcatgctgacctcacttttgcaatatatctttccaaatatattataacatacctgtcgattcgtgtaaacaattgttctgaattttattattaatttttattcttctttttgtgaacaattatccgtcggcagagtcgcaaaaaactcggcgcaatttcgttttttatgttaccaaaatgtaaaaaagtaaaaatcggttccgcgaaggttgaaaaagaggttttgttagtgtataatgtatcgtagcggactagggacaaatttctaccgcgttatctctcgctaaaatttatcttaaatataaaggagtcaattatggttacaactaataagcacatacttaattgggttgacgaaatggctgctctttgcacaccggacaagatcgtatggatcgacggcagcgaagaacaggctgaggctctccgtgcagaagcttgctctacaggcgaaatgatcaagctcaatcccgaaaagctccccggatgctacctccaccgcacagcagtaaacgacgttgcacgtgttgaaggcagaacattcatctgcacatccaagaaggaagacgccggcaacatcaacaactggatggatcccaaggaatgctacgaaaagctcacaaagctctatcgcggctccatgaagggcagaacaatgtacgttatcccttactccatgggtatcgtaggctccgacttcgctaagtacggcatcgagctcacagactccatttacgttgtactcaacatgctcatcatgacaagagtcggtacaaacgtactcgaagctatcggcgacagcgctgactacatcaagggtctccactccaaggctaacctcgacgaagaaaaccgctacatctgccacttcccggaagacaacaccatctggtctatcaactccggttacggcggaaacgttcttctcggcaagaagtgctttgctctccgtatcgcgtcctacctcggcagaaaagaaggctggatggctgagcatatgcttatcctcggcatcgaatatccgaacggcgaagttaagtatgttacagcagcattcccgtccgcttgcggtaagaccaacctcgctatgctcattcctccggaaatcttccgtaagcagggctacaaggcatggtgcgtaggcgacgatatcgcatggctcagaatcggtcccgacggtcgtctgtgggctgttaaccccgaaaacggattcttcggcgttgctcccggcacaaacgaaaagtccaacccgaacgctctccacacctgccagaaggatacaatcttcacaaacgtttgccagaacctcgacgacaacactgtttggtgggaaggtctcgacaacaacccgccgaagaacgctctcaactggcgcggcgaaaagtgggattacacaaagtacgacaagaacgacaaggtcaagactgccggcgctcatccgaactcaagattcaccgcaaagtcctccaactgcccctgcctctccaaggaattctacaatcccgcaggtgttccgatttccgcaattatctttggcggacgtcgtgctaagaccgctcccctggtttaccagtcaacatcatggcagcacggcacattcgtcggctccatcatggcttccgaaacaacagctgctgcttccggtgctgtcggcgtagttcgacgtgacccgatggctatgcgtccgttcgcaggctacaacatgggtgactacttcgctcactggctcgaaatgggcaagatgattcctcacgctccgaagatcttccacgttaactggttcagaaccgacgacaacggcaacttcatttggcccggattcggcgataacatgagagttgttctctggatcctcgctcgctgcgaagacaaggttgacgccgaccttacacctatcggatatgttccgaagccggaagacatcaacattgaaggtcttgacggtgttacggttgacactatccgcgatcttctctccgttgacgttgaaagctggaaggctgactgcgaaaacatcaaggcattctacgaacagatcggcgacagagttcccgctgaacttcacgaagaactcaacgccctcattgctcgtctcggctaattatatagcataactgaaatcctcataggttcgccctgtggggattttttatgcgcaaaaaaactccgcgtaatctttttttagttggatttacacggagttttcgtttattttcagattaaattacagtgcctacaagctctttcagcatcgcgtcggcttttgagattatctcaggcagcgtctttccggctttgaacagctcgtagagtgccatgacggtgtcgtagtattccccgccctcaacgccggtaagctcacggaacgcttcgtctgctttctcgggagcatagtggtaaagcgcggctgccgctcctactgcgatgtatgtgggatgtccgccggcttcgataaccgaaagtgacgcgcccgtaagtctgtcggatttcgcgagttttctcggtatgtcagcccctactctttcgcaggtgtcgccgagagcggtattgccgaatcgtctgataaggtcgtcagtgtgtagtatcagctccgctgcggattttccgtatctctcggacagtgcaagcgcggattcggtcatagcctcgcggactatcacgcgtatttccgggtcggatatagcttcgcagatgtacttatatcccttgtacattccgagatatgcgcagacggcgtgacccatgttgtgaatgtacagctttctctcgatgataaatctgaacggagataccggaatcacgttctttatctcgggaacttctcccttgaacgcgtctctgtcacacgggagcacgggatatgcttctgcgcggactataagcgggtctatctcaagcagcgccttatccggaagaggaaccatgcgtccgacagaggtttcgacaagccctaccgtttcaagctcttcggcagtcagctcaggctcaaggagagagtgaatgtatttgtccgcgtccatgaggttttcgcagatgagcaggtttatcggaccttttccctccttgaatctcagttttacgccgagcacaaagttggggattatgtattttatagccttagctccaacgcaggtcacacagatatcgcagtcggcaatagctctcgcggcggcgtcatggtcgtttccgttcactgccgacacattttttatagtctccttatcagagccgccggagtaaactatctcgagggggtattcgccgcgtctgttcagctcgtccacaacgggtgcggaaacgtcgacatagcagacattatatccgccctcgtacataatctgacctatgaatccgcgtcctatatttccggcgccgattattacagcattcttagccatatcaaaatcattccttttatataattatttactaagctttacaggctcaaatccaagctcggagcatatgcgcatggtttcttctatcgtctccatagcttcggttgctcccggagagcgcagggacacggttgcggcggcgtttccgagctttactgcgtcaaggagagaaagtccgcgatgtgcagcactgagaactcccgcacagaaagcgtctcccgcaccgaccttgcctttgatgaatccggaaggagtatacacaagaccgcactcggcgtagtctccgtctttgtccataccgaatccgccctcgggagagtgaattacagcccattcggacacgccaagctcaaacagcttcgagagtacctttttgacgttttcgtagatgagagcaccgtcctcggctctgagctggattcccgtggagcggcttgcttcgatttcgtttataatgcagtagtcggtgtatctcagcgcggggggaacaagtctgccgaatctctcgccggtttcgcttaccacgtcgattgaggttttgattcctctctccttagcgtgagcaagaaggcgcgccatttttgtaccgtattcacggtcttccttgtcaagctcatcgagaaggaggatgtacgcgatgtggatgaggtcgcagtctatgtcgtcccagttaaacgaatcctcggagaagtgagcgtttgcgcctctgtactgaaagaatgtgcgctcgcgggatattttatcgctcatgacgtatgtaaacgaagtcgcgcctttctttcctacaagagaagtgttcactccctcgtcttccatcacggaaagagcgtatcttccgctgtcgtcgtctcccacaagaccgagcgcgcatatctccgtgtcaggcataagtctctttaagtcaatgccgacgttgcacaccgctccgccaacgctttttccgcatccgtcctcgatggtggtcagttgtcctctttcggggtatcctgttatggggtagaggtaatcgacgattatgttgccggctaccatgattttgttcttcataccgtatcctttcgactttgtcatatagtcatgcacttgacataagtctctcaataatttataatatctgtgtaattattatatcacgccgaattacattagtcaatacggattttgtgacgcattaacacaaatgtagtcggtatgagaacgtaattatcattattgtgattataaaagtgtgaattatgttaggatgtgtgaagtatgacttggaatgagctgtatgaacagtgccgtatatgcgacaaatgtcctctcggcaaaactaaaacaaacacggttttcggatgcggaaatcaaaacgcgcggctgatgttcgtgggagaagcacccggtgagcaggaggacaagcaaggcattccgtttgtcggcgcggcgggaaaactgcttgacaaataccttgacgccgtcgggattctgcgtgacgaggtctacatcgcgaacatattgaaatgccgtcctccgcacaaccgcgatcctctgccggaagaaggagacgcgtgcatcggatttttgcgtgaacaggtgaagctgatacgaccggagattatagtctgtctcggaagaatatcggcaatgcgtcttatcaaacccgacttcaagataacgcgtgagcatggcgttatagtaaaaaaaggagcgttcgcaatgacggctgtttaccatcccgcggcgctcctgagagatccctcgaaaaaagaggatatgtatcgtgatatgaagaagattaaggcttatcttgacagcactgccgtctgagtattgttccacgcccattttttctcgtctatgccctctcctccgtgtgtcagggatttatattcgtcaatgcatatctccgcggcgcaggaaatatactcgtcagccatagcggatgtgaaaaagaacgtctcgcccgctgcatcttcattaaaatataactcaaactcccgcatgaaatcggtcacattcatgggaaaagcgcggcaaagctcctcctctgcgatatcatgcggtatttttatgtcgttttttaggttgtacttttcttttacgtatttgtttagcagtctgtagtcgttgtgcagtccgtcgaccttcttttgtgacagcctgccgttttccatcggactccacttgtacctgttgtatatgaagtcgcggtagactaaatcctggacgaggtgaatatagtaccccatgtaaagcgtatcgcacagcatttttccgccgaatctttgtctgaacgcggacaagtcgtatgtcgtgccttccgatatctttatcttgatgtgtccgacaggggaagaaagacacgcgtcaggcaaaattgagccgagcctgagcctgtttatgccgtcaagtgatatctcatccgcaataatgttcgtgaccgcgagatgcatgaatgacgacgccattattcctccgtgaacgatatctgctcgtttatctcttcacgctcgacctgctttgaatacggtatgccgaggtgctcatatcccagctgagttaccattctgccgcgtagtgttctcgcaaggaatccaatctggagaaggtacggctcgcacacgtcctcgagagttgtcgcttcctcgcctatagtcgccgcgagagcttcaagtccgacaggtccgccgttgtagaatctgattattgtttcaagcaggtgtcggtcggtcttgtcaagtccaagctcgtctatctcaagcatatcgagtgcctgccgagctatatcgaggttaattctgccgtcgctcattacctgtgaatagtcgcgcactcttttgagcagtcggttcgctatacggggagttcctcttgagcgggaagctatctccatcgcgccgtcctcgtctatcggaacgtcaagtattccggcggaacgttttacaatagtcgcaagttcggcaggcttatacagctccagtctcatctgaatgccgaagcggtctctcagcggtgtggaaagctgacctgcgcgtgtggtggctccgataagcgtaaaatgcgcgagtgaaaggtgtacgcttcttgccgccggacctttgccaatgattatgtcaatagcgtagtcctccatcgcggggtagagtatttcctccatagtcctcggcaggcggtgtatctcgtcgatgaacagcacgtccccctcctgaagtcccgcaagcagagcgacaaggtctccctttttctcgatggcaggaccggaggttattctgagattcactcccatttcggcggctatgatagcggaaagcgtggtcttgccgagtccgggaggtccgtagagaagcacgtggtctatctgctcccctctcagctttgccgcttccatgattattttcaggttggctttggctttttcctgtccgatgtactcgtcaagtgtctgcgggcgaagcgtgttttcgttctcggtctcctgcgggtcatagcttgacgacattattcggttctcaaagtcaaattcgttttcgtccatatcgttttccttccattatcagttcttcatcagagcggagagcgcgtttttgattatatcttcgagcggaagcgtgaggtcaatgtttttcatagccgccgcaatctcggagcgtgaatatccgagcaccgtaagagcgtcccgtgcgtcctcgagctttccaccgcctgatactccctgaacctctccctcgatatccttctctcccgatgaagcagaggcgtattcagggaagttcttttttatcttgtctttcagctccagcgtaactcttgccgccgtctttgctcccactccgggcgcgcgtgatattccctttacgtcgtcggcgagaacagcagctgcaagtccgcgcggtgtgaagagggagaggattgacatagcggctttcggtcctattcccgacacggagataagcaggcggaacatggctagctcctcgcgtgagaagaagccgtaaagctccaccccgtcctctctcactgccatatgtgtaaatattctgacgctgtctccgatgcactgtgccccgtcaggcgaaagcttgggcgaggggaggtgggagagtgtgttcgcggttacggtaacatgatatcccactccgccgcattcgattatcacggtgcaggaggtcgcgttcatttcaaatattctgccgtacagtgtctctatcattctgttttgtcctcgtttccctcatcattgttatcttccgcgcgtaattcatcaagctccccgaaaacttcctcgtcgggtatcacttctacgtcttcttcgattatctcacgagacgcgcgttttttctttaatacgtactctcccacgcacaaaacagcaaatatcacaagtccgctgaccgagaggatgagtccgtacttcacgcagtcgggtctgtactcgaacacaagctcatgctcgcccggagtgacgtcgaatgctatcagcgactcgttcagcactgcctttttctcgacctcttccccgtcaacatagaccttccatccgtcgtcgcagggtatcgttgtgaataccgcaccgtctccctcgggtactgtgatttttccgtagattctgtcgtcttttttggagtgcgcgtccattgtgccgtccttcagttcggatattgcactcacaaacgcgtcctcgtcaaagttccagaagtacgagcagcccgagcggatatacatctgtttttccttcatcacaagctcgaccttttcttcttcgccgatgtagaacttgccaagctcgcggattgagaagtcctcgccgtcgaaataggtacacagcttcttgccgttgagtttaagctccgcgtcacgtggatattccgacgggaagtacgcgtaaaccgccttgtcggagtcaatgtcgaggatgtatgtcaccttagcagtgccgtctccgtccttttcaaagcctctgtggccggtagcaaacgttacgctgcatccggtttcggtggtttctttgacgttcactttggaccatacagtcacgtcgtgtcccaccatcttcgagagcagctcattcatgtaagtgaacgggtcaacatagccgtcgtctacgtacatctcgcctttgggtttgtcgtagtcgagggcgtccgcgttcaccgaatatgcaatggacagggcgtagggattttcgtatatgtctatgtcgtcgtcagtggagtcgtaaagctcgtacaggtcgtggatatagttcatcacaggcttgtcgtcggtctcatccgccatgacgtattttatatcgaaaagcgcgtcagtgacagccgtagctcccgcgtacatcgaccaatgcgacattgaagcgtagccaaactgactgagcagctttattgtgcgtgcgttcagcgtggaggttgagtttgacatacccctgattccgagcgcgaaattgtcgtttttcttgcggtgaacgagcttttccgcacggtagaactcgtctccggtattatcgaggaaggtatcggcggcgttttcgtaggtgtctaccatctgtctgtacgagctgcgccttgaatacgacacgtcctcatcgagagcgtacagcatgacaacgccgtttccgagagcctccgccaaaacgattccgcacagcactcccgccgaggttttcttcacactgtcggagtcaagcgagcggatatacgacggcattacggcagagaacagtacgaacagcagtattcccgcccacacgcaccgaaaatcgggcaggttgtcgtagcctatcttcgcgagaatcacaaggagagcgcaccacgccacagctgagcaggtaaacgccttcgctccgatgcttttgatattattgaacacatccgccgccataagaaccatgagagcggtgaacatataagcaaagcgcgcgttgagccagttcggtctctgcattccgtgccagattatgtcaagcacgctgaaattgaagcttgcgacaaggacgagcataatgacagccataccgactttctttcgcgtaggtatcttgtcgcagaagaaatacagcggggctaaaatcagcgagagcgtaccgcagtagtagaatggcattccgctcggtctgacagaatcgtatgagccgaagaacgcttttgtgagaagatccgcgaagtcaaacagctgcttcggagtaaagttaggcgtggaaaactcgagcttgccgaatccgagcgaatagtacaccggaaggatgattatcgcggatatcatgacggcaagaagagagaacagccctattctgacaagcgatttaagaaagtgcagttttatatttttgggatttctctcttcttgggagagcatgaagtatctcacaaagaaccatatgaaaatgaacaggcaggtcatgtatccgaggtagaagttcgacatcacggagtacacgagcgcgataacgtacagattgaacttcccctttgagataagctcgtccacggcaaggagcaggagcgggaacactatcacgttgtccatccacataacattatgctgcaaaaccacaacatacgacgaaagagcgtacattgtcgagaacataacacgcggaattattcccatatcacgcttttttgtcagcagatatgagaacgaaagtcccgcgcatcccgttttcagcacaaggataaagagcatcgcttccgtaatggactgcttcggaaagagtgcgacaaggagcgaaaacgggcttgagaggtagtacgcgaacatacccatgaactctccgccggcggcacgctcaaaggtgtaaataatgctttttccctcggtaagtatgcttctcagctgctcaaaatagtagatatactgcgcgttgaggtcgagcacgaggacggaattatttcccgccggatacactccgaggaagcagtagataaagaacatacccgcaagaggcgcgagaaatgagaagtacagcgcttttctgtccctgaattttttatcctcgtcaagctcgggcagttttatggctttagcgtcagtcattgttgttttcctctgtttgaataaccttttttatggctttttccagtttttctctcggtagggtcatgtctctgccgcatccgtcgcatattattctgacgtcgctgccgcttctcactaccgtaaacaaattagagccgcaggggtgcttttttttcagctcaagccggtctcccgcggaaaatttcggaatattcatctcgttctccgataaggttattaattagctgagtatattatatcatgtatttcttcttttgtaaatagaagttccgccatggcgcgaaaatttgtttcattacatttaattacgacataattagctcttgatttttctaaagttttatgttaaaatattaaaaatagtagtttttaacagtgaggtgttattatggcattacaggaatcgggtgaaatgtacctcgaaacgatatatattctcagcaaacaaagctccggcgtgcgctcaattgacgtaagcgagtacatgaacttttcaaagcccagggtaagccgcgctatcggtcttttgaaggaaggcggatacatcactgttgacaaggacggattcatcacgctgaccgacgcgggacttgacatttcgtcgaagatatacgagcgtcacaaggttctgactgaatgcctgacaaagctcggtgttgagcctgacattgccgcacacgacgcctgcaagatagagcacatcataagcgacgagacgttcaacgcgataaaaatgcatatgcacaggaagtaagctaaaaaacaaaatccgtatgcactgtttaaggcaaatgccgcagcacatacggatattttttattgatttgatagacggaaatcttcttataagcccgcgcaagtgtttataaaacctcgcgaaaatggcttaaaatcaaggttttctgcatatcgtcatttatcttgccatatctccgtataagatgattttgtaagaccgggcaccattttggcaccacaaattataggaggacgacatgaaaaacgtacttttagacaagggtattatactcccgtccggcgaaatcagcaaggataaggtaaaccttgtaaccggagcaatcacgcagccattcgcagaaatggtatgggtaacgacaggcggcgacatggaaaccgtaaaccgcttgaccgacgtacttgttaccatgaacacccccgccgaccgggggaagctgttcaaaatcataaaaatgctctacgggcttatgggcttgcccttttccgaagaagccgagcctatggacgcagaccccgccgttttggaatacttcattttttcctttacggcagactttggcgaagtcatacaagacctcatagccgaagaagcagaataacgcaccgcacaggcggcgtttctcacttcccacaaggaagaacaggaacgccgcttttttcatgccctttgttacgcagtaggcaggaaaaagcccttgatttatgcggctttgcgggcgcggttttcagcggataagggattgatacctaaaccctcaaaatcgcgtttctattgcgtaacaggtatgcagcaaaggagtgatgaagctatggcagttttcagagtggagcgcaacaagggctatacggttatgagcaaccaccacttacgcaataaggagctatccctaaaggcaaaagggctgttatcgcaaatgctgtccttgccggaggattggg

SEQ ID NO: 1686 - DNA, 17603 bp, Unknown
  16S sequences of unknown bacteria
aggaattatgggttcttgaactcacttcctgttgctcttagtttgacaattcacctgggcaggattacgacagggacgccccataaaagagctccccggccgctgttgcagccgaggagctgtgtacgggaattaccggcggcagccgcagccacgaggaggcatgggggcggggtcgcagggcagaggcgcgggcgcgccgcagccgcagtcgttctcgttctcgtccgcttcacgactgtcctgtccccagttctggagcagcagaataaagacgataatgacgatcgcgaagaagaagccgttccgatggaacatatcgccgcagccgctgttgcaatggcacatggatttcaccaacccttccggcaatggtgcgccgcctggcggcgcgggggaggacgagcgtcctctctccttaccagcatatgcgcggggtgccggtttggctcatgcgttatcgggatcctaggtaagcgatgaggaaatcccgccaagccgtcgggcgtgatttattcatcacgcacccaggtgccgcggacggttccgtcgttgatgtacagcctcaggtcgttccagtccgcgtcggcggcggacacggccggcacggcgtagcggaacacgtcctcgtgcgccccggccgccacgtacaggatatagaccggcaggcgcacggcctgatccgcctgctcccagtattccagacgcacccggagcacccgcgcccgctcccgcggcggctcctccatataggcgggcggatacatgtgcagataggtgccctgctcccaaagggaaaccgcctcgtccggggtgagggcggcggcctgccggatttgcccgtgcgcgtatcccgcgggcagcgtgatcgcgcttagcgagccgtctgcctcgatatccaggcgcatgccggccagccccgccgcccccagcgcctgcaggggagcggcggttttggggtacaccgtgacgtggtaaacgggggagaccaccggatccgccgccccttccggataggacagatacccttccgtccaggcctctacggcgacctcgtccatggggcacagggcgcggaaccgctcgtagtaggagcgggccagcttggtcagcgcccccggcgcggccatgtcggtgccctccggcgggaggatgggccggctgaacccgccgacgctgcctagaccgggctggctgacccccacgctgatgctgccggacggggtgacgctcagctgggaaattgccagcgggttgtccgccaccctcgccagaatgtaccggagatcctctcccatgctaacgcatacgggagaggtggtttcctcgagaatggtcaggccctgctcccggcagaagtcctggagccggccgcgcatctcctccatggtcagcagcggccgctccgccaccggcagggtgtcgcccgtctcaggcagagcggcctgggtggggggcagcatggcggcgagcatccgctgccagtcgtcggaggaggaggggctgctcgcctcctcgctgacggcgctggtcgggcccaggatggcgggggactggcgggaggcccaaagccccacccccgcaatgcccgccaccaacagcaggcaggcggcggccagggcgatccggtgcagcaggacaccctgcttgggaggagctgccagctccccggtcagctgctccaccagggactcgtccagcagttcccggatggacacgctcggtttggtcatacggcatcgtcctttccatgcgtcaggcttcccagccggtgatcccctgccggcgcaggaggcggatgagcttggcccgcaggcggcagacccgggtgtgcgccgcgccctccgcgacgcccagctccccggcgatttccgcccccgagtattcgtacacgtatttcagcgtgaacagccgcctctccgccgggcttagggccagcacggcggcccgtaccccgtcccgcgtcagggcgtcgtccggcccgccgctttccaccaggatgtcctcctccagggggaggcaggcccggcgggtcagagcccggcgccggttgagcgcccggctgcgggccagcacgcacacataggtggaaagcccgccccgcccgccgtcgtatttttcgggatgggccagcagctccagcatcacgtcgtcggccacctcttccgcgtcctcgtcactgcctgtcccctggaggaagcgggccgcggtggcgcgggccaggggaaaataccgggcgtacaggtcttccgcgttttccggctgcttgcgcgtcatggaatcccctccttctctggctgccctctcatccattatacaacggaacccgccggtatcttacaataaagttgacaaacccgctcggcaaggaatagacgggcgaaaaacgacaaaaatgatgcaaattcgcggcgccggcgggaaaaggccttgaaaagcgtgaaaaagtacgctataatgaatgaatacagaaccgctggacagaagagggcggaggcctttttcaacacgtcctcgtgagtgcgaaaggatgggtcattctaatgggctatgcaaacagagcggccgcgtaccgcgaggagccggccgtccgtcaagagacggaggaattccagctggtgttggcgaatccggaacggtatgaggacgcgggcggcatcgcccggcatttcgacgcccgccatccggtggtgctcaacctggagggcgtgaccaaggacgcggccctgcgcctggtggatttcctgggcggcgtggcgtacgccaagggcggcgagctggtccgcatcgccaaaaacgcgtttttgctggttccgaatacggcgacggtggagagcaccgtgctggatgaatgggacgagattgggaaatactgagttgctacccggccgctttttgcgtcgatcgtatggctaatcaaccattttccggatgctgggaaattagcgattgacaccttccaccgctcatgctattctaaaaaacaagcggaggggaagccctcaagcggataccggacggtgcagtcgttccggcctaccattctgaaggaggaaaacagatgagcggaagaatacgatggaggctccgccagcctgggcgaagggcgttggcgctgctgacggccgccatggtgctggcgggaagcagcttgctgggcgggagctcctccctgctgcgggtaaaaggggaaggacagcagccccagacgctcggttcagccgcattgcaagccggcgcgggcgtcgttctggacgtgacggacgagtctgccgttttgcacaatgctttggtgcgggtggcctttgacctgaaaaagggacgttactcggcttatgaccaggtatccggcaagccctatatcctgggcgcctacgtcaaggtcaatggagcgagcagcctggacggctacgcttttacggcggagaacgccaccgccgacggctttgcgggcaagtcgatgcggctgaccggcaccaaggcgggaagcgatttcgatatggtgctggatattactcttcgggacaaaacgggagagattgagcttgcctgcggtttgatcaaccgcaccgccgcgtctctccagcttaaggaaatgcagccgctgacggcggatgcccagcattcctccggtgtgttcgtggggccgaatcccgcgaagaatcatgcggtgctgaccggcgagggaaactggggaacgcccgacgtgtcgtccaatgtatcggttacctccaagaacaatctgctgatctcttatcgcaacaagccggacatggaaagcctggtgctaggcggtctgacctgctatgagttccagagcgaagtgataaccaagtataacgaggtgaccagcctcgtcaactccgatcgccgcagcatcgatgcgcttatccgtgtgttcgattacaccggcaagcgggtggacgcgggcaagctggccatgggcgacgccgccttggtgaatttcacccagaagaacccgtacaccgcgctggaggaatacgccgagctccaggccggggccatgaaggtggatttggggacgacggatccctatctctaccaaagcctgtggtatgtggagggctacgcctacaacgagaaggccaacacggcggatttcgccctggaggaggccaaacgggcgaaggcgcggggcctgaccaactatgtcccgctgaacatccggctggagccggacacctatacggatcccaacgagcagctgtggtgggacgacgcgcactggaaatccttcggccatttgaccgacacgttccccaccattaaatcctggtccgacgccctgaaatccctgggggtcacgaccgctctgtatatgcagcccaccttccgcaactcggactacgcctcccagtatccggggcacatgatcggcaacaatgcgaaggagacggcggattacaccgatccggatttcctggctcacatggcggaggtctaccgcaatatcaagaacgcggacatcaagctgatgatgtacgactacaccaacatgaacaaggcggcgggcggctacaccatcaagcgcaccggcggctttgcggatccttatgccacagcagtttccgcctaccggaacatgttcgccatcgccaagcagggagtgggtaaggacttccgggtgatggagaacgcctggacctgggccggcgaggacgtggctatcggcgtcatcgatttccagcgcaccggcaccgacacagttcgcctgacgccgaatatcgcgcgcaacggcctgtatcagtggtaccgcaaccgcaccaccaaaatcctctatcccgatgtgcagattttcgaggaagaggatttggatttgcgccgggcgcagatcaccggcgcgggcgtcatgttcggcaatctgtctctgggcgagagcctgcttcagatatcggacagcaagctccatgatatcacccgggtgacccccatgcctatcgacggggcctccccgcggccggtggggttgttcgagcatgaggacgacatgccggaggtatacgattacaaatacgccggagacaacggggatcacctgctgctgctctggaactaccaggatgacgataaggatatgaccgtcaagctgggagaggacagcgcctttggaggcatcggcctggatccggacaaaacctatgagatttgggatttctgggactggcgttatgtgggacggttccagggctccgacaccctcgtgcagcgggtgcgccgcaacgagatgaagaccctggctgtccgcgaagtaaaggacaccccttatcttctctccaccgaccggcatgtgctccagggaaccctggatgcccatgacgtcaccgcgcagggcaacacggttaccggcgccttcgacgtggtcgcgggagacccctacaaggcggtcattgctttggggaataaccgtttgaaggtaaaatctctgcgcacggatccgcagatcaaggcggattacgtgctggacaccttccacaacgtggtagaaatcaccctgcagtcggacaaaaatgtcaccgcctccgttaccctcactttggaggaacgggaggcgggaacggacacacaggcgcccggcgcaccttccgcgctgctgaccgcggcggatgagcatggaaacgtgactttgtcctggcagccggcttttgacgatagcggctatgtggaatacgagattttccggggaagcacatctgactttgctccttccgccgttaacaagctgacccagaccggccatctgagctatctggatcgggaggtacccgccggcgtccagtactacaaggtgagggcgcttgacgcggcgggaaacgccggaaagattatgtgcgtcaaggcggaggttctgacggcgactatcccggtgagcaagctgacggctaccgccggctcctacgaggtcagcggccactatgacggaccggagcaggtgctggacggggatcctaggactctgtggcacacggcttggggcggcagcgcccagaaagaccggtggatcaacctgcatctcagtgagcccatggaggtctgccagctgcagtacctcccccggcaggatttggacaacggggtcattaccagctacgaagtgcagatcagcagcgacggaggaaaaaccttccggagcgtggccgagggcgtttgggaaataacggcggactggaaaacggccgatttctcggcggagaaggttaccgacgtgcggctgtacgccaaggcatcgaaaaacggatttgcctcggcagcggaaatccggctttacaacgagccggtgctgaacgggctttccctgtcagacaccgccgtgaccatctacccggggcagccgtaccatctggcggccaacctgtacccatcgatcttcaccggctccgacgtggtttggagcagcagcgacgaggccgtggccaaggtggttccgggcgaggatcccgcccgggcggtggtgacgggcgtggccgtggggaaagccgagattacggtgaaaaccgcggacggggccttcagcggcgtctgcacggtcacggtaaccaacggcgggagcgacgtcccgccgccggaggaaccctccaagccaggcggggaggaaagcagcggctcctccgcggccaccggagagacggggacggccgcggcagcgttgcccctggccggtacggcggcgctgcttttgacagctgccaaaaagagaaaaacgcctctgcgataatcggcagacagggaaacgccggcaggccccgccaaggggatgccggcgttttctacgtttggagcggtattttcccgcggatttctcgctggacgggataactgggtcttgccgggcggcggggattatggtacactggtgtacaagttgaaaagaaggatggtcgcacatggcacagagaaaagaactggcgaagacctacgagccgcaggaggtggaggaccgcatctaccgcttctgggaggagggcgggtatttccacgccgaggcgcatcccgataagaaaccctataccatcgtcatgccgccccccaacatcacggggcagctgcacatgggccacgccctggacgagacgctgcaggacatcctcatccgctggcggcggatgcagggctatgaagcgctgtgggtgcccggtaccgaccatgcctccatcgccaccgaggcgaaaatcgtggaggccatggccaaggaagggctgaccaaggaggatctgggccgggaggggttccttgagagggcctgggcctggaaggagacctatgccgggcggattgagcagcagctcaaaaagctgggctcctcctgcgactgggagcgggagcgcttcaccctggacgagggctgctcgaaggcggtgcgggaggtgttcgtccgcctgtacgagaaggggctgatttaccggggagagcggatcatcaactggtgcccccactgcaagacctccatttccgacgcggaggtggagttcgaggaaaaggacgcgttcttctaccatctgcggtaccccatcgagggcaccggggagtatctggagctggccaccacccggccggagaccatgctgggcgacacggcggtggccgtccatccggacgacgagcggtacaaggccctggtgggcaaaaacgtcattctgcccctggtgaacaaggccatcccggtggtggccgatacctatgtggaaatggattttggcaccggcgtggtgaaaatcacccccgcccacgaccccaacgacttcgaggtggggctgcggcacggcctgccggtcatcaccgtcaccaccgaggacggccatatgaacgagctggccggcaagtacgcgggcatgaccctcatgaattgccgcaaggcggtagtgaaggacctggaggatgggggctacctggtcaagaccgagcccctcaggcacaacgtgggcagctgctaccgctgccgcacggtcattgagccgcgggtgtcccagcagtggttcgtcaagatgaagccgctggccgagccggccatcgaggcggtgcgctccggacggacgaaattcgtgcccgagcggttcgacaaggtgtattacaactggatggagaatatccgggactggtgtatttcccgccagctgtggtgggggcaccggattccggcgtggtactgccccgattgcggggaaatcgtggtcagccgggaggatcccgccgcctgcccgaagtgcggctgcaccgccctgaagcaggacgaggacaccctggacacctggttctcctcggcgctgtggcccttctccaccctgggctggccggacaagacgccggagctgtcgtatttttacccgaccagcaccctggtgacggggtacgacatcatcttcttctgggtggcgcggatgattttctccggcgtggagcacatgggggaggcccccttcgacacggtgctcatccacgggctcatccgggacgcgcaggggcgcaaaatgtccaaatccctgggcaacggggtggatcccctggaggttatcgcccagtatggggccgacgcgctgcgcttcatgctggccaccggcaacagcccgggcaacgatatgcgcttcaccaccgaaaaggtggaatcctcccggaatttcgccaacaagctgtggaacgcggccaggtttatcctcatgaacctgggagacggcgacatcgagccggggctgcctgacacgctgaccctcgaggacaagtggattctctcgaagttcaacagcctggcccgggcggtgaccgacaatctggagaagttcgagctggggctggcggtgcagaagctgtacgatttcatctgggatcagttctgcgactggtatatcgagctgtgcaaggcccggctccagggggagaaagcggccgacgcgaggcgggtgctggtgtttgtcatgacccggacgctcagcctgctgcatcccttcatgcccttcgtcaccgaggaaatctggcagtccctgccccatgaaggggaggcgctcatccgcgcgccctggccggtgtacgacgaggcgctggctttcccggcggaggagaaggagatggagcgggtgatggatgccatccgcgccatccgcaaccgccgcgccgagatgaacgtgccgccctcccgcaaggcggaggtgtatgtggagaccgccttcgcggataccttccacaccggtgcgcccttcatccagcggctggcttcggcctcggccgtgcgggtgggggagagcttcgaggtgccgggtgcggtgaaaatcgtcaccgccgacgccaccatccaaatccccatggacgagctggtggacagggcggcggaactcgcccgcctgagcaaggagcgggagtcggtgcaaaagcagctggacggcgcgcaggcccggctgaacaacccggccttcaccagcaaagcgccggaggccgtggtggccaccgcccgcgagaacgcggagcggctggcggaaaagctggccctcctggaccagactatcgagagctatcggtgaaaatggaacacccgccccaagccggctttggcttagggcgggtgttgttacatggctggggctatccaaatacgggaggaagtgtatccggagttgactttctcgaagcgccacaggccatatcggttattgttatgatcataaagcgcatcgatttcatccagtccgtccccgtcaaaatccccggataccactcggccggtgatgcgggagactgaatattggtcggaggagacgacttttcctgcggtaatattggcagttgaaccattgaacttccacagtgacattacactgccaccatagtcataaaaggccccaatatcgcattttccgtctccatcataatcaccagcggttacacgataagttatgccgttcaccggatactgatcggattcacaaactttatatgcggtaaactttgatacagcgtcgtaagacattttccacaaggccatcttaccacttccgtagtcgaaaaaagccccgatattgcatttcccgtctccgtcgaagtcaccagcgactacgcgacctgtaatacgagaggcgtcatagtccgcaaatatatttgttctggtagcaagaaactgactgttgttgacataataaaacatccaaacgcctgtcctgttgttagccagctcaaagaagacaacaatttcgtctcggccgttactgtcgaaatcaccagcaacgacccgtccggtaatacaagcggcatcatattccgtggaatcacatacttttcggactgaaaaatagttgtcgttgacataaataaaccgccacaaccccatatgattgttgccataatcataaaaagcgcatatttcatctttgccgtcaccatcaaaatctccagctactactttatttttaatagggtctgtagaaaattgatcggaggagcacacgatgcggcccttagtcatgtcaaaagaacgattgtaatcatcccacacaaccaaatccatccgatttcccatgccataaaatgctgcgatctctaggcgaccgtcgccgttgaaatccccgctgacaaaggacccgtctaccattttatattggcttttagcggcgtttaccgctttgtaggcgttcagccgtccgccggttacacatttaccggtaagggcattgacgggatcgacagtgtcgagtatgcaggtcttgatttgctcagcggtaaggctgggattcaccgatttaatcagcgccgccacgccggccacttgtggggaggccatggaggtgccggacttgtagtcataagaaccgccgggaattgtgctgtaaatgttgcttcccggggcaccgagatccacggtagtcgcgccataattggaggtggaggctaattggtctgaggacgttgtgttggccacggaaatgatgttgtcattggggtagcaggcgggataaaattttaaggagtctgtgtccatgtcaacaggaatgttcggggttttatcgttgttgtcatgatcttttccgttgccggcggaacagactaataaacctggatagttggaaatggcatccgataaatcatcattgacgcctgttccgctaccactaaaatttaaaatgggaatttggtgattaatggcataattaattgcgtcagctacccattctaagtagccggttcctttaatatttccattttcgtcatatgtccgcttaaacacgcgaatggaaaccaattttacattccaacagacgccggcgatgcctctgttgttgttccccaccgcgccgataatgccggccacatgggtgccatggccaaccggatcggtccaggcggccagtccatcatccgtataattctgtcctaacgaggtgttgagattggccttcaaatcctcgtgattgggatcgatgccggaatcgaggacgcctacggttaccgccggactgccggtggtgaggttccaagcctgcggcaattgcatcttattcaaaacatattgggtagtgttgggatctgacgacgtggcgctgggaatggtttcttcttccccagattcatctgatggtatttcttccagctccgcgctatcctcctccggcaggccttcgtcaagcgtaaaaatatagtttggagtggcgcgaagtacatcgttccgtttctccagtttttttatcgcatccaatacggcgcttttgcttttatcctttagttccagtttaagtatttgatgataattgtccttgtcaatccagttcatagcttcctcgttttcgatgcacgagagatccgtaaccgaatcgacacgaacccccttgaacgcggaggggggatgctttttattgatgacagtacttttctttttgagagtgacaagaacgacgccagcttcgaagttctcatcttcagtagcctgcgatataaccgttgtttcggtgtcccgttcggatacttgaggggctgacaaagaatccgcttggatgctcaccacgagagaaaagaacataatacacgtcattaacggtccaatgattcgttccacgtcactggctcctttattttattattcggttgtacacacagaatcaaaagaagctaattcgattagcggattgttcaaaagcgtatccacagcttttcttacttccgcttcaccagctttgtttaaagtaatataaccactttgcgaatgcgttttttcataattccttatctttatttttttaacatccactcctggaaagtcctttgccgtatattgtttatcaaaatctacatattcatcctttatcgtgatgacaacagtatcaattgaatactgttcgttaaaggatttggtacgggtggtaggcgtgctggttgattccggctttttagtggtggttgtcggtgcttttgtctttaccgtcgttttcttgctggcagtggttgttgtttcttttctctggggagtcgttccttcttccaaagacgcctcggtttctggtgtggtcgttgtttctgcaatggtagtgtttgtggtcgaagctgttccagacgactgcggcttcccctcttccggcgcctggcaggaggcgagaaggacggcgcataggatgctggtcaagattagcgatgtacatattcgtttcataaatatttcctccaatatttagaaactatatctaatatccatatctttttatctcagtcagtcgtacatatagaatcaaaagtggctgattcaataatggggttttttgataaaatttctatggctttacggacttcggtttccccagacttatttaaataaatacaaagaccttgagaatgggttttatcgaaattatatattttgatttccttaatatctagtcctggaaaatcctttgccgtatattgtttatcaaaatcgacatattcatcctttatcgtgataacgacactattgtcggaataccgttcattaaagggtatagtataggtggtaggcgtgctggtcgattccggctttttagtggtggttgtcggcgcttttgtctttactgtcgttttcttgctggcagtggttgttgtttcttttctctggggagtcgttccttcttccaaagacgcctcggtttctggtgtggtcgttgtttctgcaatggtagtgtttgtggtcgaagctgttccagacgactgcggcttcccctcttccggcgcctggcaggaggcgagaaggacggcgcataggatgctggtcaagattagcgatgaacgtattcgtttcataaatatttcctccagtatttagaaactatatctaatgtttaagaactgccggcaattatagtatatgccaaatcttggaaaaagtcaactatgtagtccattattatccaaaaagttaaggaaatatgaaagattagattgaaaatagcaaatcctcaagcaaagggaataaaaaccatagtatggcgattttcaaccttacatatagtatatatcaaaaaataaaaacagcaataaaatccagggaaatattaggagaattgaatatgtttcacacgatatgttgcggttaatacgtgtgaacaataaagaagaggaggggatttcccctcctcctttacatggtggcgttgtggcctaggtctcttaccagctgctccatttcctttttggaatggacgctgtgggttttctcgatgaccgcggctttcccctccgggggcagggcggtgaaggcgttcatggcctccaggttcttggctagagccatggacaggcccatgggcacctcgtcgctggccagcaggtttttatccatgaggcggcgctcctttcgcttgcgtataatataggtatatatatagaataccccgtggcggggcgcgtattcatccgaacagggcccgcaggaccggcagctgccgccgtgtggcttcatagcccgcctccatgcaggcaggcatctcccggaaggtcaacagtcccgcttcctcaggcagggcgggatggagcaggaagcgttctccggtggccatatgctccttcaggcgggtgctcatgatggtcagggaatgggaggcgatttcaatgaggttgtcgtgctccggtgggtggtacgcctccgccacgtccacggccagcacccgccgctccccggccgccaggaggagatccaccggcagattgtcggcgacgccgccgtcggtcaggcagagcgatccccgccgaacggggaagaacaccgccgggaaggcggcgctcgcccgcgccgcctcgcacaccgggccgtcggcccgccaggtgacgtggggcaggggacgcagaccggccagggtgttggtataggccacggtgcctccggtgcgcaggtcgacggacggaaggatcagccgccgcttcacgtcccgcagggccatgccgccggtctcccggcgcagcagccgctccagccggccgcctttaatgagaccgggcagggtgacgtgacggcgggtcagcagctgaaaggcggcccgcacaatccccagaaaggccgggtcgaccaggcagatccggccccgggcgatatcctccaccagccgccgcagccgctcggcgccgaggccgcaggcgtacagcccggccaccacggcccccgcgctcgtgcccgccagcgccccgggaggcaaaccggcctcctccagcgccagcagcacccccacatgggccgcaccccgcgcgcccccgcccgacagggccatcgcgtatctcatcatccgccgcctccccgtatatggaatgcttctcttttccagtatatgggccgcggcggcgatttaggtaagggataatgaaatccagtgatgggggccaccaagcaaccgcagagctgctgatggtttacctagagcagggaggcacggcgctcagccgcggcggccggacacctgccgggcggcggcttcgggggaatgaccgccctcccggataccctcgccggtgaccacgcagcgcagggtctccagcacgatgcgcccatccagccccagtgacatccggcgtgcatagtacgcatcgtagcgcgccttatgttggatggacacggtgtcccggccccgcacctgggcgaggccggtgatgccgggacgcaccagatccgcccccaggcggcgccgccgggccagcagctcggtttcggtcagcaccacgggacgggggccgataaagctcatgtcccctttgaggatgttccacagctggggcagctcgtccaggctggtccggcgcagaaaacggcccaccggggtgatgtaccgcccggcgtcggccagatcgttggtggccacgtccggcggggcggcggcccgcatggagcggaatttcagcatggtgaagggacggctgtataatcctgcgcgtttttgcataaaaattatatcccccggcgaatccaccgcgatcgccagcataatcagaagaaaaagcggcaataacaatagaaacagcgccagcgaaatcagtatatcgagcagccgtttcacgattcgatacagcagatggtcgtccccctttagatacgaaaaataacaacgagattagtatatcccccgttcaaaaatataacaagcggaataatggataatcggcaaaagtttctcgttaatcaataagtccaaaagaaaaaaagcgcttttttgaggcgaaaaagataaaatattatatacactgaacaaaatgtctccacgtgttaagatgacgttaaacggaatgccaatattgattttgattacaaaaatgaaacttgatttttgacgaatgggatagtataatacgataagcgcaagggacgtcctgcgctggtggaaaaaagacttgccttcgtgtgggaatacgatgccgctgccggacaggtcattggaagaagccggcgcttgaaggaggtaaattttatgcagaagattctgcttttagatcgttcgtatacagaacgcggacgccgcagaatggggtttctgctcgtgaagaggacttttgacgttcttgcatctttttgcatgctgctggtgttgctgcccctcgggctgctggtggcgctgatttgcgcactggacaccaagagctcgccgattttttcgcaggagcgtatggggcggggggacaaacccttccgcatttataaattccgcaccatgagcccccggaccccggccgacgtggccacccaccagctggtgggtgcggagaattacatttcccgcaccggccgtgtgctgcgtaagctcagcctggacgaactgccccagctgtggaacatcctcaagggggacatgagcttcgtggggccgcgccccgtggtgctgaccgaaaccgatctgcttcgcctgcgcagccgcaacggcgcttcctctgtccgtccgggcctgaccgggctggcccaggtgagcggccgtgactgcgtgaccgtgccggaaaaggcgcggctggacgggcagtatgcccggtgccagagcgcggcgctcgactgccggatcctccttaagacggtgggttacgtcttgcattcgagcggcgtggtggaaggcgccaacccggcgatcacccactgcaaaaaggaacgctcggcctgaagggcggggaagccctgaaattcatctgaaaacagcctgcatggaacggcaggctgttttttcgcgcagtgatcttacaagagaaaggatacgattttcttatgagcgaaacctgcaatcacgactgcgaaagctgccaggcggggtgcccctcggccggagagccgcaggatccgcatgccgctctcaacgagtacagcgcggtgaaaaaggtggtggcggtcagcagcggcaagggcggcgtgggcaaatcctccgtcacggccatgctggcggtgctgatggcccgccggggctacaaggtgggggtgctggacgccgacatcaccggcccctccattcccaaggccttcggcattacccgcaaggccaagggcacggccatgggcatcatgccggaagaaacccacatgggcattaaggtcatgtccatcaacctgctgctggagcatgaggatcagccggtggtctggcgcggtccggtgctttccggagcggtgacccagttctggaccgacgtggcctggggcgagctggatgtgctgttcatcgacatgccgccgggaaccggcgatgtgccgctgacggtgtaccagtccatcccgctggacgggacggtcatcgtctccaccccccagtccctggtgcagatggtggtgggcaaggcccacaagatggcgggaatgctgaacatcccggtgctgggcctggtggagaacatgagctacgcgctctgccccgactgcgggaagaagatcccgctgttcggcgaagggctggacgaggcggcggcccagatgggcgtgccggtgctggccaagctgccgctgaacgcggacatcgcccggctgtgcgacagcggggagatcgagcgggtggtctgcgaggaaatggacggcgcggccgacgcggtggaagcgctgctgaaataatcggaacaggaaaaatccccccgccctagctggacagaaccagaaaaactggacaatagacaaaatcccccctgatgtaggataa

SEQ ID NO: 1687 - DNA, 1572 bp, Unknown
  16S sequences of unknown bacteria
cgggccgatccgcccgccctacgccgtctatttccagggcggcctgacctggtatcacgccaagacgggcatcctgatgagcctgcagaagatggtagacgccgggctggtcaccttaaaataaacgtaagaatatacagagaggaaagagaaaaaatgtggttttggttgtctctggccgcgctgctgttttggagcgggtcggatctgttttcaaaaatcggctgccgcagccaatcggatcggtacagccatctgaagatggtcatggccgtcggcgttgtgatggggctgcatgcggcgtatgaaattttcgtcggcggagtggagatcaatttccagattatcctgacctatctgccggtgtcggcgctgtacattctctccatggccatggggtacctggggctgcggtttatcgagctgtccatctcctcgcctatctgcaattcctccggcgcgctggtggcggtgctgtgcctgctgaccggcgggctggatgcggagatccaggggctgagccggatgctggttctggcggcggtggccttggtgtgcgtgggtgtcgttggcctgggagtcgtcgaatcccgggaggatgacgcgttgcgccatgcccggcaggaaaagtccaattatttttataccaaatcctgggttgcgattctgctgccggttatttactgcctgctggatgcactgggtacctttgctgatagccgcgtcctggaggtcctcaatgaggactctgccaatgtggcgtatgagctgacgttcctgtttgtcggtattctgtgtgccatttatgtcctgggaatcaagcggcagaagctgctgccccgggaggaagcgccaaaatataccggcgccgtctgcgagaccatcggccagtttgcgtatatctacgccattgcagacagccggcacgtcatgtttgccgcgccgatcatctcggcttactgcgtcctgtctgtcgtgtggagccggattttcctgaaagagcggctctcctggaagcactatagcatgatcgcctgcgtcgtcgtcggcatcgtgctgttgggaatctttgatatttaaattaaaattttcaatccacggacctgcaaccccccgccgggcattgcccggcggggggttgcgctctattccaaaactattccaacgtcgtcgaggcacggagtgcggcgatgctgctttgcagctgccggtttgctgagagcagctggcgaatttgcggataaaggcggcggccctgcgccgtcagccggacgccgcggtggtcgcgcaggaggagggaaaagccgatctcctgctccagggcgttcatcatgtgggtcaggcccgattggctgtagcccagctgctgggcggccttcgtaaagctgcccaactccaccgccgcaaccagcgcttccaatttccgcagatccataccgcaccgccctttttacgcagaagataattattattatacctgccccgggggaaaattacaaggcaattatcctccaatggggccacggctcaggcgcacggcggcgtcttggatggcttcgacgagctgttcgt

SEQ ID NO: 1688 - DNA, 2840 bp, Unknown
  16S sequences of unknown bacteria
tggcgtacctgtattttccttccgtgtgcgacttctctggtatcatattccatgattttccgttccctttttgcaaatgacggttttatcaacacactgttaagaaacgtcggactgagtccggtcatgtggtttgcaaatgcatggaccgcacgttttgtcattattatcgcactgatctggagatggaccggctacaatatggtgttctacctctccggactgcagaacattgattactctgtatatgaggcagctcgtatcgatggagcaacgccgcgccagacactgttcaagatcacgattccgcttctgaagccgacgattcttctgacgacgattacctccaccaatggtaccttgcagctcttcgacgagtccctgaacctgaccaacggaggaccgggtaagtccacgatgacgatgtctcactatatttacaatacgtcctttgtacagagcccgaattttggctatgcggctgcgatgtcaattgtcattcttgtaatggtggcaatccttgccgtgattcagatgaaagtaggtgatgagcgatgagcaaaggaaaaaagatcggtatgtatttgttcctgattattttctcactgctgtccatcttcccgctgtactacatggtatgcgcagcgacgaatatgagcgtggatgtaatcagaggaaaattgattccgggcacgtatcttctggaaaattataaatcactgattgccaatcagaatctgtaccgcgcgctctggaattcgttccggaactctgcagtgcttacggttctctgcctgctcatctgttccctcgcaggctacggctttgagatttatcatacaaaggcaaaggatattgtgttcacaattcttctgaccgcgatgatggttccgtttgcagcgatcatgatcccgatgttccggatgttctccagactaaagctggtcaacacgatggcggcattcatgcttccgtctatctcgactccgtttatgattatgatgttccgtcaggcatcccgttccttcccgaaggatattatcgaggcggcccggatggacggactgagtgagatcggaatctttttcaggatgtttatcccaacgatgaagtctacctattctgcagcactgatcattacgttcatgaatgcatggaacaactacatgtggccgaagatcatcctgcagacgaacgaatccatcactatgccgatgcttgtgtcaaacctgctgagcggctataccgttgattatggtatgctgatgctgggcgtactgatctgtacggttccgactgcgatcgtattcttcttcttccagaagagctttacggaaggtatcaccggagccgtgaaatagtaattacaaagtaaaacaaatatgatacaatcagggctgtcgcaaaacaggttttgcgatgaccctgttttaaggaggaaaggatatgaacgtatttgattatgagaaggtaaaagatccgctgtattttgcggatggctgtgtggaagcgcattccgatcaccggtattatggatcagtagcagagctagcagatggtgaagagcgttttaaggagagcctgaacgggctctggaagttccactatgcaaagaattatcagagcacggttccgggctttgagaagccggagtatgactgtggttcctgggatgatatccgggtaccggcgcacatccagatggaaggctatgacgtcccgcagtatgcgaatgtacagtatccgtgggaaggaagagaagaggtaaagcctggtgagatcccgactcgtttcaatccggtagccagttatgtcaaatattttgaagtgccggagcgcatgaagggaaaacggctttttgtatccttccagggagcagagagcgggctggctctgtggctgaatggcagctatattggctacagcgaggattcctttacgccgtcggagttcgaactgacaccgtatctgaaagaaggaaaaaataagcttgccgcacaggtgtttaaatggacggcaggcagctggtgcgaggatcaggacttttaccggttctccggcatttaccgggacgtatatctgtatacaattccggaagtacatatctgggatctgaaggtgcagacattactggatgaaacctgccgccatgcggagctgacggtcgatctgaaggcgtctgcaaagggacaggtacgcctgacgcttgcaaaggatggtgaggtgcttcagacgcttgcacaggagcttgcagaagagacggcctgccgtatgcaggtagaggctccggcactgtggagtgcagaggtgccggctttatatgatctgcagattgaggtgtcggatgccgccgggaatgtgactgaggtgatcccgcagcgcgtgggcttccgccgctttgagatgaaaaatgcaatcatgacgttgaatggcaagcggattgtctttaagggtgtgaaccgccatgagttcagctcgaagaccggaagatgcgtatcccgcgaggagctgattcaggatctgacgacgatgaagcgcaacaacattaatgcgatccgtacctgccattatccggatgcatccgcgatttatgagctctgtgatgagtacggtatttacctgatcgcagaaaacaatatggagacgcatggcacctgggatacgtttcctgttaccggcgattatgcgcaggcgattccgggagaccatatggagtggcagccgcttttgttgaaccgggtcaattccatgtatcagagagataagaatcatccggcgattctgatctggtcgtgtggaaatgaatcgtttggcggaccggtcgtttatgagatgtccca

SEQ ID NO: 1689 - DNA, 32759 bp, Unknown
  16S sequences of unknown bacteria
cgccgcgcggtcggggaattatcccttccggcgcggcggcgcgtgagatcaacaaaaaaaggagagctgcctctcctttttttcgaattttcgggtattacccgttatttgcttctgtttccgcagtgcgggcacggaaacgacgggatcattctccgcatttgcaaacctgtcagttcatcggaaactgaggattctcttcctcggattccgcaccgagcggtgcggcagccatgttctccgttcccgatgcgcttttgcgatcccccgcattattcgcggatgagatctcatacagtgccagatccgagcttattctcgtgctctgcactatacttgccaaagccccgataagcagggcagaaagataacatgacaaccatatcaaaaacgcccgccatgttatacgtatcagtgccgaaatctcgtaattgaaaccgaatattggtttcgaattcgaaaactctacgttcgcgccgtttctgtatgcagcagcgacagcccatgcaaatgcgatcgccgatacaacgacaaaaataagcggcaaaatgtaagcaagcgactcaaggatattgcaccacgaccacagtctgcttgacacggcatcttcacggacacattcttcgaatcttttcgggatagttcttcttttgcttgctgtgaatactgttttcattctgcattcccccataaaaatataaataaaaaagtgcgcagccgaaactacgcaccgaaaaacgcatagttcccgcttgcgccacacaagttttgatgatcggcagaagagccgcgtcaaaaaagggaacgcgtttttgccaaagcaaaaagcacgaactccgtccgccttaaaaaatcatcatattaacttgtgtggcatatcaattatatcacaccgccgtccgaatgtaaatgaaaactttatcaaaatgcagaatattttccgataaacgaaaaacaatgccgccgcgcggtcggggaattatcccttccggcgcggcggcgcgtgaagttattttattttgccgtcggtgtgctttcgcaccgttcgtgcgcgtatcatgcggcgcggtcagtgcaggcacattattccgcggcggattcggtatcggggcttgcctcggtatcggatgcggtcgtatctggagtatattcgagataagccattatcttgtcgcagtcggtcttctccatacggtaaacgatcgtcgaatcggtgatcgtataataaacgcacgggatcttttcgccgttttcgccgtccttctcgcactcgccgccgaacatcacctcatacgatgcgggcacgcgcgtcgtcgtggcatttccgtcggaatccgttgcggcgaccgcgctcttgtaattcactataagccgtgccgaagaatccgtgatgccgtaatccgcaagctcgtcggcggtgacggcgtactgcacccaatcctcgcagtcaaccgttttgttatgagtcgagagaagatcgtccattccgtttccgtcggtgatggtgttctcggctccgtccgcgtttctgacggtcatcgaaacgaggtagttgttgtcgatgtctccgccgggctcgtcgagcacgatgagatcgcggaaggtatagttgaagcttgaggtcagcttatccgtgaagagatacaccttcgaattctgaagcatgagataggtggaggaattgaaggaattcacattgccgagcttgaccgtgtattcggtcgagtcggaatacttcacgaccaccgtgagcgacggcgcgtcaaagccgtactctccgctgtctccgtcaagctcccggcttgcgaccacggaggaaacggcggacaccatcgagcttatcttcgtctgatcgagcggaaaatcgcggtcggcgtcgtagtaccacgttcccgattcgcaggtgaaggaaagctcggaatcgtttccttttatataagcaagctcgaccgcatcggatgcgtttttatcgataacggtgatcttcggagtttcctcgagcggctcatccttattgaggtccatccgggaaagtatgacatatgctccggcaagcacgccgagcacaagcgcaagggcgataagcggcagaatctttttcttcttttttacagccatgacgtaaaccgcgttctccgctacggcggagatttcctttcagccaaataatgttcggggatcgcccgccggaaaaatacggtgagcgatcccgcgtttctttttcgggcatctgcgccgatgcggcgctgccttaaaataatcgtgctctgcctgtcacttgcggcggcggacaccccaaactgcaaatccggcaactatcaggatacccggaacaacgatgcaaagagtccatttccaagcggaagccgtctgcgatgtaacggtgaggtaagtggttgacacgttctttccgattatcgagatcgactcggtctttgacgacatccaatggagcgttgcgataaagagctgcgaattgcccttcgtcatctgatccacggaatcgccgatcacggagatgctcgagtaccagaccatacgtccgccgtcggcgttttccgcatcgtcggaataggtcgatgccgcggcgaccataaactgtccttcgatatcgccgtcagccttcgccaccgtggtattctcatcgacggtctttttgagatacgcggacgttgtggtggagagaacgggagtcaccgtaactccttcggctccctcgatcgcgctaatgccgtgtgaatacggcatgagaacgccgatattcgaggaatcgagaagggatacggggcttgtcggtccgttggagccgattatgggatagaggtacagcggattgttgtagtaattgctctgcgagccttcaagcacaagtccgtcctcggacttcatgcccatcatttcgcatacggaagagaggttcggcatgctcgcgccgacattcacctcatatccggtgatgaggacgatatctccgcctcctttgatataggtcttgagggtttcggcttcctctgccgagatatcaagcgtaggcgcatagattattaccgcctcggcatcctcgggcactccctcggacacaagtgcaagagacgcaagctcgtagttctcggtctcgatgtagtcggtatactttgaggacagacccgtttccccgtgaccggtcgtataatatatcttcggtatgctgtcctcggctgctctcgcaacggcggaggttatatcgcgctcgccgtagaaaagcctgtctgcggtggttgacggatactgccccgtgctgtagtaatactgcatcacatactgctgatattcgctgtagctgagatcgccgtatccgtccagataatacatatacatatcgtcgtagccgacgaccgcgcttctcttatcggacactgcgataacgctgtttgattcgaggctttcattcgtatacttcgacacgaaattggggtctatcgcgggatcgacacggacaacggttatcttgtcggaaagctcgccgtagctgtttacgatcctctctacgcgggtgtcctcctgaccttcctcgcagatatagtaaagcttgatgtcttcctttattccgtcgaggatccccttcgtcgtgtcaccgagcgagaacaccgattccgcgctcatatcgatctcggtagcgcttttcggaagcaccgaaacgacgagatttatcaccacgacgatcgcaatcacgatcaccgacaccgcgacggaatacgaccccgttttgaggacgcggcggttcttctttttcgcgtttgacgccttcggagctgcgttttccggattctgcacattcatattgttgtcattcattttaccgcctcctcagttccaacgcttcttgtccaccgactgcacggtgagaaaaccgaacagcaggatcacagttacataataaacgaccgcgccgatgtcgaacacgccgtacatgaaggaatacgtctttgagaataccgcaagagaattgagcattttctcaaacgcgccttcaaacagagacgatttcacgacataaacgatgcttgcggcgaccacgagaaccgtgcctaccgcggcggatgttaccgcattcttggtcatgacatagatgagcagcgctgccgcaatgcacaggagaatgaagaacgcaaacgatgcggcggtcgaatcggggatcatcgcgctgatattattcataaggtaaaggagtatgaacacgccgagcgtgaggaccgccgagatcacctggctttcggtgagggaggatatgaacattccgatcgcaataagggcgcatccgacgaggaagaatgcgaatatcgacgcatatgcggtgacgaaatacacatcgccgtacacggaaaggatgagcggatagaggcagagtatcagcgttgagattccgagaaccgtgaccatcgcaaggtacttgcccgcgacgacagcggaggttcttatcggaagagtataaagaagctgatccgttctcgccgcgcgctcctcggaaaacgagcgcattgtcagtatcggtacgattataaggaaaataaacgatattccggatataactctttcaaactccggatatcccgctccaaagttcacgctgcaggtatatattcccgccataaggagcagaaacgccataaacaccggtgcaatcatgccggagaacaggcttttcagctcgcgtttgtatatcgccgtcatttatttgtcctccttttctccggagccgtctccgaaaagggaggaatactccccggtctcttccctgtttttcttctttgatcttttcggtgcggtctcgtaatacggggaatattcttcctcgctccgtgcgccgtccgcagaagaagccgcgccttcggaggcgttctccgcatcttcggaggaaaactccatatgctcctcgttcacaagctttataaagatatcctcaaggctgaggctgttcgactcaagtctgagaagcggtattcccgccgaagaaaaggcgcggaatatatcctctctgatatcgctgccggatttcacctcgacgtcgcactttacggaagagggggtctcggtgaagcttacgttttcaatgccgcgaacggtcgagacgatctccttcacgtcggcaagcggcgcgcgcgcctcaagctttatgacctcggtctcggagaagctgcggttgaggttttccatggtatccgaagccacgatcttgccgtgagcgatcacgataacgtaatcgcaggtggcggatatctcggggaggacgtggctcgaaagtattaccgtgtgatccttgccgagttcgcggatgagatcgcgtatctcgattatctgcatcgggtcaagtccgacggtcggctcgtcgagaatgattatctcgggatcgccgaggatcgcctgcgcgataccgactctctgacggtatccctttgaaagattgcgtataagtctgtctgcaactccgtggagcgcggtctttgtcattacgtttcccacggcttcggagagctttgcggagggaatcttctttgcgcgtcccacaaagctgaggtattccttcggggtcatgtcgttgtagagcggcggaatctcgggaagatatcctatccgcttccgcgcctcgagaggctcctcgtaaatgtcgtgaccgtcaacgataacctcgccgtcggtcgccgcaaggcatccgcatattatattcattgtcgttgattttcccgctccgttcggaccgagaaatccgtagatacgtcccttttcaacggtgaagctgatatcgtccaccgccgtgttcggaccgtactttttcgtcaggtgtctgacctctatcaaagctcttacctccgatttttaaattccgattggatttaatgtataaattttaccattcaaatttgaatatttataggagattatcttatcattttgtcacttttttcgtccgacaatttattttgacataaaagccgacgcgaaaaaaggacgtttcttacgcgttattaatattccgcatatcggcggaatatattttagagacggaaaacaaacgaaacacgtatcggagtttatattttacatgaacgaatgctttgtatcctccggcatatccggcaagcgaaaagaacgcatccgcagggatgtgataacgtactccatcgagcgcgggctcggcgcggacgaagtccgaagaagtgcgctgaaatacggaaaaaacacgcttgagaaaaaggggcgcacttccctcatgcgccgctttctctcgaatttcggcgatccgataataaggattctgcttgcggcatgcgcggtgaacattcttctgaatctgcgggacataaactggatcgagatcggcggaattctcgccgcggtattcgtctccacgtttatttcagcggttttcgagcattccgcgtcgggcgcgttcgagcgtctcaacgcgcggagcgaagaatatttcggagttgtgcgcgaaggaaagcttgtgcggtgtgcgcagagcgatatcgtcgtcggagacatcgtgaagatatgcggcggcgagatcgtcccgtgcgacggaatcatgatcgcggggacggtaaaatgcgatcagtcggtgctcaccggcgagagcaggcacattgaaaagaagtcccgcgcacgcggggcgggcagctttgcgcccgacacgttcaccggaaatcccgaaaaggacgacgaggttttctccggctgcgccatcatatccggcgaaggcttcatgctttgcataaaggtcggagaaagcacatatttcggctccgtcgccgcgaaggttcagtcggacaaaacggaaagcccgctcaaaaacaggctcggagagcttgcaaagaagatcagcttcatcggatatatcgcggctttcctcgtggcgggagcgtatcttttcaactcgttcttcatcgattcgggaatgtctctttccgtcatgctcgcgcggctctccgacgcgcgcttcaccgccggggaatgtctttcggcgctgacgcttgcaatatcggttctcgtggtcgcggttcccgagggacttccgatgatgatcaccgtcgttctctcttcaaacatgaaccgcatgataaagaaaaacgtgctcgttcgccgaatggtgggaatagagacaagcggaaacctcggaatcctcttctgcgacaaaacaggcacgctgaccgaaggaaaaatgtctctttcgcgcatcataacccccgacggagagtacccgtccggaaatgcgtttgtccgggacggagagatgctcgggtgcattctctcacccgccccctcgtccggcagaaaccagaccgacacggcattctgcgcttttgccgattcgatgacgccgcccgaaaccttcgcaaaggttccgttcgaatcctcgcgcaggtgcagcgccgccggaatccgcataaacggagaaagcgtcaccgtcgtgcgcggcgcgcccgagatactgctcggtcatgtatcccgcatacgccgcggaggcaaaagatcggcaatgactccggctgacatatcccgcatacgcgatctcgtatcgtccctctccgcctccgggcgtgtgataatgctgtgctccgcgccgggggatatgtgcggacgcataatgaagggagaatttcccgatcttacgtttctcggcatcgcggagatatgcgacggggtgagaaaagacgctcaaagctccgtgcgcgatgcgcagaaggcggggatacaggtcgtaatgatgacgggcgacggtgcacagaccgccgcctccgtcgccgggaaatgcggtattctcaccgagggcggcgtgtgcataagcggcgacgctctccgcgggatgagcgacagcgaggttaccgacctcatcccgcgtctgaacgtcgtatcgcgcgctctgccctccgacaagctgaggcttgtcgagcttgcgaaatccgcgggacttgtcgcgggcatgacgggcgacggagttaacgatgcgccgtcgctctgcgcggcggatgtgggatttgcaatgggctcgggaagcgaagtcgcctccgccgcttcggacatcgtgatccttgattcgagcctgcgctccatcgtaaacgcggttctgttcggaagaacgatcttcaagagcataagaaaattcataacattccagttgatcatgaatctatgcgccacggcggtatcattcatcggtccgttcatcggcattgacgcgcccgtaaccgtcgtgcagatgctctggatcaacatgataatggatacgctcggcgctctcgcattcgccggtgaagcgccgaatccgcgctgcctgcgcgaagctcccgtgccgcgttcccaggggcttatcactccgccgatgcttgcaaggatactcctctcgtcctcgttcatgacggcggtatgcctgatgtttctgaagctgcccgccttccgctcacttttccccgacgtctccgatctgtactatctgacggtatttttcgtgataatcatattcatggggatattcacaagcttctgcgtccgcaccgacaggataaaccttctctccggaatatcaaaaaatccggcattcgttctaataatggcgcttgcatccgccgtgcagttcgcgctcgtcgagttcggcggaagcgcaatacggtgcattccgctgtcctcgcgcgatgccgcccttgccgtgctcatcgccgcatcggtaataccgatacagagtacggtaaagctctttttccgtaaataattgacacgcgctttcttttgggatataattttattaaatcgtccctcggcagaactgtgccgaaggacatcacacacgccggactcattcggcgcgttttcccggaggaaagctgtgaagcgctacaacatcacggatatgaatataaacggtgcggggatcacgcgcgacaaaagcggcgccgtaattttcattcccggcgcggcggacggagatatctgcgatgccgaaataaacggcggcggcaagaattatcttaccgccgaaatgcgggagcttatatctccctccgagcaccgctgtccgagctgctgcgatgcgttcggagaatgcggaggatgcacgctccgccacataacctgcgagcatgagcttgaaatcaagcggcgcgccgtggttcaggctttcaggcggcacaaaatcacggcggagccggaagaggtaatcccgacctcccccgatgcgtaccgcaacaaagccgtattccacgcttcgggaaattctctcgcatatttcgccgggaaaagccatcgcccggtatatcccgaaagcggtcggtgtgcgataatccccgaaatattcgaccgactgcgaactttctgcgcgtcgtactttgccgagagctcactcgcactcccatcactctttctccgctgcggagacggcggcgcggtaatgctatgtgcggcaggcgcaagcgccgagcccgacaggatcgaagggctcgccgcatctctttccgacagctttcccgaagtcatatccgtatatgccgcggaccgcgagccttccctgcccggcgcggtattcacgcacatacggggagttcgcgagcttgcgatcaccgtgcgcggcataacattctccgtatctccggcgtcgttcttccaggtaaataacgaaggttgcgccgagctgtgccgtgttgtatgcgaattcgccgctcccgcgccgggtgcgcgcatcgccgatctgtactgcggaggcggcatgttcgccctcatgctcggaaaagccttcccggaatgcagcgtcacgggaatcgaaataaacgaaagcgccgtcgcgtccgccgcgaaaaacgcagctgaaaacggcatcggcaatgcggaatttctctgcggagatgccggagcatatccggagaggctgcgcgatctgtcgtgctgtgtggtcgatccgccgcgcgccgggctttcggacaggaccaccgcactgcttctcgaagcccgacccgacaggatcgtgtatgtatcatgcaatccggaaacgctcgcgcgcgacatcggacgcctcggcaaatcgtattcgatcgggcgcatgatatgtgcggacatgttcccccgcgcaccgcatgtggagacggtagtattgatgacgcgcgcggacagataagcgtccggaaatcccggattttatgcgtctgtcgtgattttgcgtcagtttaacatttcgttgatttcccgaaaatcatctctgcatgagcatatctgcgggaaattgcgatcacatggataaaagctatcccggcttttgtcttactacaaatatgaatcagaaattgaagcaggaagcgatcggcgaatacgacaacgaagaaaacagatgaatcatgatagccgccgcggaagtggagtacgagaacttctgtaaaataacgcgggcagaagaaatcacggagtttgccaaaaagatcggcatagcaacctgcgtgggattgctgcacgaagccgggatttttgccgaaattctatgaaaatacggatttgaggtgttcgaaatttgctgtaaagcgggaacggtcgaaaaaagccgtcgggattcccgaatgctgtgaggaaatcgggaagaacatgtgcaatccgattttgcaggcaaagcagttaaacgcaggaaaaacggatttgaatgtagtaatcggtctttgcgtcggacacgacagcctgttcaataaatattcggatgcactcgtaaccacacttctcacaaaggaccgcgtgccggggcatagcgctgcggcggctctttatctgagaaaggacatattattcaagactgatatgcaattgatttgcaaggggctttccgcgaaagcctgtaaaaaacgagatgggggataccgcacttttgtgcggtatcccccattttgatttaattcagataagaaaacgttttgcctaaatcggtatcaaagccgagtgcccgatacattccctcatcgcacggggcacaggtgacagccagaccggagagggcgttctccctgctccatttttgtgcagcttgtgtcagcatccgggcaatgccttttctgcggaacacgggttcaatataaaagtcatcgaacactcccgtgtcggtacatgcaaaggtggagaaacattttacgacgctacacatacccacagcacggcagccgcgctttgcaacaaagaaagtgatcttcccgtcacggatcgcccgggcaagatgttcctgctcttcctcggttgcaggctgttccccgatctccttcaagaatccgttttcaagctttttgagctgccaatcatcaggatcggcgaggacttccgcggttatgggaacatcttctgccgggggcaggatcatcagcgcatctccccactcgtcaacaccgttctctacaaagccgacgtttttccaaaaatgccgccgccgctcgctgccgccgcagttaagctctgcatacaatgcgccgcgttcttttgcccaatcaagcagcaccccggcgcattccctgccggttccgttcccgcgaaactccggatagacgcagtattccatgatgaagcacttgccgtcctcggaagtgaagagcacgggcatggcaaatccgatatcccgtccgtcccgccggaagaacaggaagaagcagcgatcctgcggtctgctgtaaatttccatcatgcggtcatgatacccggagccgagaaagtattcaagttcgtcgtcatcggagtcggggaaaatgtcccgcttgtgataggcatgaagctgctcccaaaaggcagcaacatcgttttccgtgactgcttcacggatggtgattcggttttccatttgatttcctccaaaatttgattcggagggttaggaagcgtgaaccctccatacacgattcatcctcataaagaccacacctttcttaatcaaattgtattcagatgccttttacggcattgataccttggaaattaccttcggaaaaatatttgcggaatcgttttacactgtcacgaagctgcgcctgaaacgcttttgtcagatgattccgacaagtaaacggaggctgatcgggcgagcggaatgtgatgtttttatcatcttcacacgatcaccgcgccgtcagcctcgcagagcggcgatgcctcaaaaggcaaagccgctccgcacaaggcagtcgaacacactgcttattttgtaatcaaaacagagttgaatatgctgcgaagcgctccgtcggacgggctgtttttcacaacaagctctccgacggcgttctctatcatcgtggacgatccgccgccgtcgagattcacggcatatgttgcgccgagttccttcagcatgagcgacaaatcgagcagcgatgcgccgtttgacacctcctgctgtctgccgtctacgactatcaggtacacgcatccgttatcatcgtagcccattgcggttctcgggtggcggatctcaccgaacggcgtgccctgtccgttctggtaaatcgtgccgcggcggagcaggacgtgcgatgctccgaagcctgtctgcatatttgaaatcttagccctcgcctcgcccgcgattccgcagtcgagagttccgtccttcatcacggcgatccacgggcggttttcgttattctgcttaaggatatttccgtccttaacgcaaagcccctgcggtgaattatcggattctatatggaagaagtccgcattgatgccgaagaaaatatccttgcctgatgcgatctcgctctccatttgctcgcggaccgttgcgctgacgccggaaaccttatctccgtccggcgtacccatgactatacgcgacgcgccgttcggcacggtcaaaagatacgccttgaccggcatgccgtgggcatcggtatactcaagctgtgcatactccgagccgtcctcgtaaacgctgctgtcacgcgccgtcagctcgagcagatttgaatcaacgccgtacagcgttcgtgcgggaatggacgcatccgactttgcctctccgaattccgagagatatttcgccgcaaatgtgcggatggcgaagagaattccgttctccgtaattgcatcaatgatgattttgtcatcatcggctgaaattataaatgtgttcgtccctatctcgggatcgtgctcatcactgccgcattttacgaatattgcttttcccccgttatatcccgcggaatcggcaatactcacatccttgccgcaagtcttttttatactgcgggcgagaaaagttgccattccgttaccgggatttgacgaaaaaacagtgtactcctcgacagggatgccgtcaagcgtcagctcctcgcacacagtcttatgcgaataaagacggcgcgttcccgacgttacgtttttcgtcgcctcgaccgtcacgtattcactgccggtccacttaacatatgagccgagtcggttgtacttgttcacataaccgaagctgtcccacagaaacgcgctcaccgcctcataaagtccggcactgtctccggcattgataacgatgctctttttcgtctgcacatcataaacccaatcgaactccccgagtcccgccgcagcctttctcgactttgtgcgtgaggtgtcgccgagaatgatctccaattctgccgtgctcttgtcggtaattatgcgattatttcctttcgtcgtgccgtagacgctgtcaagcgccgtgcagagaagccgcgcagcttcattctcaaagttgtccgtctcagacggcacaacgaccgagaaatcgccgagctcgaaatccactgcgggataaactgcctcgccgagtattacgtcccagcccgcagcccatctgatcacggctattacatcagccaaggagatttttccgtccgcctcggcatcgcctgccgaaacatcgaccgaaacatcccatccggcgaccttctgcagcagcagaataatgtcgcgcacatttatcttgccgtcgcggtttacatcaccgtagattatcacccgaagctcatcctcgccctgccgtacaacggctccggacggaacaagatcgctgccgccgagaacacaatcctctacggcaacgactgcgccgtcatcgaattccgcagcaaggtcgtccgccgtaacctcgccgtagattccgcgaatacagcccgcctcacggtcgagagtcagccgcgactccgctttcagagtcaatgccttgtccgcgcccgagaccggaacccaaagcaccgctccgaagaggatcgccgcactcagaagtgcggacagaatttttccgtgtttcatgaaatcatacctccgaattcggtagagatgtctgtaagcatattataacaaagaaaaaacgaaaacgcaagtatactgtgttttgaagcaatttcttgattatcttcgcctgagcaatactttacaaatatcaaaaaacatgctatcataaataaaacggtcaaaatgcacatcaattttttaatattgtatattttataaggaattcatgatatgattaattttataaaagtgctgctcaaccgacgtaaagccaaaattgcagcaagaaacgaattatgtgacaataccattgcacggtttaagtctgcaaacgaggctgcggaccgactgttttgcgatgctcatgttcttatagacaccgacgaatacacaaaatggaaagaaacatattcaaaagcccttcaggaaacaaggtccgatgaaatcaaaaagctaaagaaagccgaacatttctccggtctgattaacgaacatacaaaattaacagaaaacaaaaaacatttagaacagcgcattcttttccacaaccgcaaagtaacaaacgaaatgatcaaaaacgcctacgctcttataggcaatgtcgaaggtcggaaattagaccgtcaacaaatggaatgtatcgtaaaagacagtcacaatcaccttgtcattgccggcgcgggaacaggaaaaacgaccacagttataggaaaaataaaatttcttctgaaatcaaaacaatgcgcaccggaggacatattagttctttctttcacaaatgcatccgcatccgaaatgaatgaaagaattcgaaaagaaaccggatataacatagccgcatctacttttcacaaattagggcttaatatcatctcggcagttgatgcggcatttccgaaaataacgcagctgcgattaaaaaaatttatcaaagaacagatacttaccgagatgaaatccgaatcgtatcttaaacttttaaatgcgtatatgatttacaaccgtatagccgcgaaatccgaattcgatttcaagacaaaggaggaatacgaagaatacttaaagttcaatccgccaataactctctgcggaaacgaggtcaaaagctacggcgaaatggatattgcaaattttctcactcaaaacggagtacagtatatctatgaacaaccttacaaaatcgacacacgcacagaaatatacggtcagtatcaccctgatttttacctgccggattacgatatttacattgaatatttcggcataaacagaaacggcgaagtaccgccgtggttttcggcatacggcaccacgaccgcatctcagcattatcttgactccatagagtggaaacgcaatcttcaccaaagcaacggtacaaaaatgatagaatgctttgcctatgaaaaatcagaaggaacgctgcttgaaaacctccaccgaaatcttataaacttcgaagtatgcataacaccaaaatccgaagcagaggtatggaatcaaatttcacaaagcgaagatgatattctcgagggagtagtcgaattgtttgagaccgttataaacctcataaaaagcaaccgatactcaattgaatacgtccgtaagttaaatgccgaaagagaaaacacaaataataataacaaaataattcttttgcttatcgaaccgatatataatgcatacaatgattatcttgcgaagaacggtgaaattgactttaacgatatgatcaacacagcaagacagtatgtagacgaaggcaaatatataaatccgtataaatatgttatagtagatgaatatcaggacatttcaaaatcacgttttcttcttttgaacagcttgaggcagtcaagcgattatgagctattctgcgtaggtgatgattggcaaagtatttacagatttgcgggaagcgacataagctatattattaatttcgagcattattggggacgtacggaaatcagtaaaatcgaaacaacttaccgctttccgaaaaaattgattgacatcagcagtgattttataatgaaaaatccgatgcagatcagaaagaacatcgtcagtccgaacgccgatgcaggatttgctttgggagaagtatccggcttcaatgagcaatgtgcaatagaatttgtcgccaaacgaataaatgatctgcctcaaaaaagcagtgtctttttcataggaagatattcttttgatgcagaattattaaacaaaagcggactgtttgagtgccgttatgacaatcagctcgggcttataaaaatcatttatcgccaaagacccgacctcacgctgaactttttaacggcacataagtcaaaaggacttcaggcagattatgtattcataataaacaacaaaaaatcaaaaatgggctttccgagtaaaatacaggattccccgatactcgacctgcttcttgacaactgcgatcaatatccttatgccgaagaacgccgcctgttttatgttgcgctgacgcgtgcaaaaaagaaagcttttatagttacggtaaagggcaaagaatccgtttttgcaacggaactgaaggaactctacaaagacgatctgaaacatgagcaatatgaatgtccgatatgcggcggcaaacttcgaaaaatatctggtcagtacggtgacttcttcggatgttcaaattataaggtcaccggatgcacctacaaaagaaaaatcaattcaaatacatctcaggttgacaaagtaacttataatgtgataaaataatcgggataactttcgtgcggcggaaacagtgatgttttttcggcatcatacgttttttccgcgatcctttccgccgcggcgaaaaggatgcacggcagacagcaggattcacaaaagaagggcattttaatggatttttcggaactcaacttaaacgaacagattcttaccgcgctcggcgaagaaggatactccgagccgacccccatacaggcagaggcaattcccgttgtattggaaggacgcgatcttctcggctgtgcgcagacgggaacgggcaagaccgcggcgtttgcgataccgatacttcagcgtctcgcagaacgtcccgcaggtgcggaaaagcgcaagatatccgcgctcgtcataactccgacgcgcgagcttgcactccagattcacgaaagcttcaccgcatacggcaggcatctcaagctgcgctgtgcggttgtattcggcggagtgtcgcagaagccgcaggaggacgcgctcgccaagggtgtcgatatcctcatcgccacgcccggtcgtctttgggatctcatggggcagaagcttgtcgatatatccaagatagacgttctcgttctcgacgaggcggaccgtatgcttgacatgggcttcatccacgatgtacgccgcattgtaaagaaaacgcccgacagccgtcagacgctgatgttctcggcgaccatgccgccggacattgccgagcttgcaaacgaaatgctgaaggagcctcaccggatcgacattgcgcccgcgggctcgaccgtagatacgatccgccagttcgtatatttcgtcgatcgggagcacaaaaaggatctgcttgagtacattctcgagaaaagccccgtcgcgtcggtgcttgtattcacgagaacaaagcacggtgcggaccgcctgcagcggcttctttcaaaggacgggatcaaaaccgcgtcgatccacggagacaaatcccaggggtcgcgtcaggcggcactcaagaacttcaaggatcaccgcgttcgcgttttggtcgccaccgacattgcggcgcgcggaatcgacatctacgagcttccgcttgtaataaactacgatcttcctcaggaagcggaaacttatgtacaccgcatcggaagaacgggacgcgccggaatgcccggagttgcgatctccttctgctcatatgaggaaaagcttctcctttccgacgtggagtggcttacgggcgatctgctctgcgagctcacggacaacccgtaccccatgagaaacatcacaccggagaaaaaggatttcgtaccttcgacatacaaaagcatcggcaagaagccgcgcagaggttcaagacgcagatgagctccggagcgctcacgcatcccggtgaacttgagttgatcttcgacgtaatcaggcgatgcgagcttgagaagctccgcggagtgcggctcgtcactcccgaaagtgcgggcatatacgcgcatcttctgatcggaagagacgacacagccggagcggtatttctgacggatgagcggcgcgcggcgggccatgcggtgatatcgcgcggcggcggatgccgtccgatactgtttgaagactttctcacaaagcagtgcaggtcacgcgatgtttcaaagctgatactctgcaccgggcatgaaatactttcccccgagcttttctcctacaacgatttgtacaccgcgcttttcgcaaaaggaattctgatctgcgatcttttcgaagtgtcggacggtatctgccgttcggtgctctccccgaatttctcggattatccggatcggggggcaagggcatgatctgccgtcacagtcttaattccgatcgccgtatttatcacgcacaaaacgggcgctgcttcggcagcgtccgttttatctttttgcggatcagtatgttatcgagtcgatcttcaaagttccgccctcatccgtcagtctgaaatacagacggcggcttgaatccgacagtatatcgtcgcggaacgtaccgtcgtttcggaatatcttgtattcgactgcgaaattgtacgcctccgtcgccgtgccgtttttctcaatccccgcggattccacacgggtatcgtatatcatctgcggagtaaacgcgccctgacgctcgtacttttcaaagaaggcttcggtaaacataccgttgtaagcatcgctgtcccctcggcggatcgcggagaaatattccgagaagaacgatgcaaagcgatcctcggcggttatattaccttcgccgtatccgatctcctcgccgccgtttttcatataaagcgccctgtcaagccccatataatcctcatccgccgaaacgtcgcggttccaatcggtctcggcaaacttccgcgaatcgtaagtgacatcggggtaagcgctctttatctcatgctcgcgccgatatgcggggatgtacagcagtgctgccgccgccagagcaatcacgactacagccgcgatcaccgtgaaaaggcgctttttgcttttttcgcgctgtttttttgccatcgtcgggattaaaacatatcgaagtagcggagaaggttcttctttccgagcgagatcgcggcaagattatcctcgggtccttcaaactcaacggtaacgtagccgtcgtagccgtttctcttgaggattccgatgctctgtgcgatgtgagcctcgccgtggccgatgaccgtcgcgcggaggtagtttccgctgcggctcttgaaccagcagtcgccgggatcgatctccattccgctcttcacgaggaagtccttcgcatggacatggaacgcatacggtgccataacgccgaccgcgcggttcgtatcctcatcggcgcagaggaagtttccgagatcgacgagagcaccgtaattcggatggtttacggtattcacaagcttttcaacgcgggaggaatcctgagcaaaaagtccgtgattctcgctcatcgtgcggatgcccttctgctccgcgtactttgtgatttctcgcactctctccgcaatcttcggaagaaggcagtcaaagctgcgtccgagcttgatattggaaggaagaccgccggaaacgtcgtgtctgaacagcttcacgccgagctccgccgcagaatcgataaggcggcagatgcgctgtatttcctcgcgtccatcgtcgcctccccaatttataacatcggctccgataaggaaagcaacgggctcgattcccttctcggcacagtgctcacggatcttcttcgctccttcgggattcagccactccttctgccatcctccctcgacaaattctataccgtcaaatccctcggaagctgcgtgatcgatgcatccgagcacaccgagctttgaatcggacatataaccgccgtagctgtatgtacttacgcatgttttcataaagatatccaaacctttcccttcaccgggtgacccggtgcgttttcttactgaatattttatactaacgtctgtcgattttcaatagcaaatcgtaaattatcgactcatttatttactttttatttcttgacatagagcgacacagtaactataataatatattatgatgtatttttgtgcgatgctgcggatcgttttccgccgtcgggaggctgtaaatgcgtacttacaataacatacaccaggctgaaaagccaaaatctttcaccgatatccgtgatctgttccgttcaagcgcgcaggtcttcggagacaaggtgcagtatttctaccgcgacgatgcgctcgtccgcgaattcacgtacaacgatttctggagcaccatgcgtgaattcggcacggcgctttttgaccgcggtctttcaaacgcccatgtcgcagtcgtcggagacacccatccgtattgggtgacaaccttcacatccgtgatatcgacaggcggcgtcatcgttcccctcgatcatgagcttgacatcgatgaaatgataaacttcatgcgtcgtgcggaatgcaccgccgtcgtatacaccggaagcatgaacggacgcctcacgtcccgcatgaacgagcttccgtttataaagtatttcattccgataagtccggcaggggaggatttctccggcgggcgcgtcatgtcatatgaggattttctcaccgaaggacgtgcaaagcttgagacgggagacactcgctttgaggatcatgagatatccatggacgaaatgtgcgcgatcctgttcacgtcgggcacgaccggctcgtcaaagggagttatgctctcacaccgcaatctgaccgccgcggcggatgccgcgtgccgcgccacgcgcttcgaccgcaattcacgcttcgtttcggtccttccgatccaccacacctacgagcttacctgcgctcatctcgctcacggaaacctcggctgcacttcgtatatcaacgaaagcctccgctatgcaacgagaaacttcaaggaattcaagccgaattcgctcatactcgttccccttttcctcgaaaccattcacagaaagatttgggacgagatccgcaaaaagaaaatggagaagaaagtgcgcagcgcaatggctatcgcgctgacgcttctcaaaaccggagtcgatgtgcgcgagaagatgttctcggaaatcacggcggcattcggcggtaagctgaaatatataatagtcggcggcgcgccgatcgatccgcagatcataaaggatttctacgccttcggcatcacgatctgtcagggctacggaataaccgaatgttcccctctcgttgcggtgaaccgtcccggagcggtcaagttcgactccgtgggacaggtcgtcgacaactgcgaggtaaggatcgatcccgttgacggatgctcccagggcgaaggagagatcgtcgtccgcggtcagaacgtaatgctcggatactaccgcgacgcggacgccacgcggcgcgcgttcaccgaagacggctggttccgcacgggagatatcggcaccgttgaccgccacgggtacatcaccatcacgggaagaaagaaaaacgtcataatagcaagcaacggaaagaacgtattccccgaagagcttgaagagcgtctcgcacgcctccccgaggtcagggaatccgttgttctctcacgagaaggcgaaaacggagttaccatagttgcgataatcgttcccgaaatcgcagaagacagcgattattccgcgctcagcgaacgcataaaagaaggtatcgctaaaataaaccgttcccttccgtcgtacaagcacatcggaaaattcgaaatacgcagtgaggaattcgagaaaactccgtcaaaaaaaataaagcgtttcctattgcattaacggaaaagcagtgatataatatatgctgttggtttaatcccatatattgattggagaattacgatgtttgaacagttaaaagagcttcttgtgaatgaactttcggtaaacgccgatgacattaccatggatgccgagcttgtttccgatctcggaatcaattccctcgagcttgcggatttcgttctcctttgtgaggagcgtttcggagtgtccatcagcgatgacgatatccacaaattcatcactgtcggagatgttgtaaactacctctccgagaaatccaactgaaacagaaataccgttaagtcaagctttgcacagaacacctaatgatgtactgtgcattcttgtcgttaaggagtttttatggaaaagataaatatccgcggcgtgaattttctcaacaccaccctcgacggcgcggcagagtacatttggcagcgtttcgccgacggtgagcagaccgcggtatttacgcccaattccgagatcgtgcagaactgcatcgatactcccgagctttacgaaaccgtgaattccgccgaggtgataatcccggacgggatcggcgtaataaaggcggcaaagatcctcggcacacctctcagggaaagaattcccggagttgagctcggcgaacgcataataagagaaagcgccgggcacggcgcgaagatattctttctcggctcaaagccgggagtagcggagactgccgccgaggtaatgaaggagcgctatccgtcgatcgacatctgcggatgccgtgacgggtacttcaaaaaggaaggcagcgaatgcgatgaagtcgtcggtgaaattaacgaaagcgccgcagacatactcttcgtatgcctcggcgctccggtgcaggaaaaatggatctgcgcaaaccgcgcacgtctctccggtgtcaaggtgtttcttgctctcggcggttcgctcgactcatattccggcaacgtcaaacgcgctccggaattcttctgccgccacgggctcgaatggttttaccgtctgatgtgtcagccgtcccgtataggcagaatgatgaagctgccgaaattctatttcggcacatggctcttcaagctgaaaaacaaaaatcagtaaagtcccgcaaggcttgcgacgatctgcgccgcctgctcggtcgtcaggcggtcggtcgcaagcatgagatcgtaattctcgggcttgccccattttcgacccgtgtaatagttataataattcgcgcggtgacggtcggtctttatgattatgcttttggcttcgctctcactgagcgaatggcgcttgcatatttcattcactctgtgggtaaaatccgcatagaagaacacacgcagaatgtgctctcttccctcaagaaccgagtcggcgcaccgcccgacgaacaccgacggtccctgtgcggcaagcgattttataagatccgactgagcgaaaaacagtctgtcgtttatcggctgtattgaaggcgatatcgtatttgcaaaaatcgacgatcccgttgcaagcgtataaagcacgctgttcgggatcttttcgtctgcatcgacaagcttgtcggagcttatgcccgttttctgagctgacatcgttatcagattgttgtcgtaaaaattcgatcccgtcaattccgcaaccgcccgtccgatctcgcgtccgcggcttccgtactgtcttgcgatagtaatgactctgtgcataaaatcctccgtttttccgagcgggtgccgcgtatccgaacattgccgaatgcattcgcacaaagccgaagcatcgacataatccgaccgatgtctgacatatcgatgccggcacacctcttcatataaattatacgccaaaacgtcgtcaaagtaaatacttttttgcaaattgaggtcctctgcgcgaaaaatatgtttgacaatacaccgaactccacccggtaaacgcacaaattccgccccgaaaactaagccgaagcccccttttgttcggtttcaccgaaaaatccactgtaatctgcgccgccgtatccggcggcaaacggagataattatgataataataggcttcaaaaaagccgccgaagctctgcatcacgaagcaggggaagccctacgtgatcggatgctggcggaatttcacaaaataacatccccgatcatcacccgtgaggaatacgggaagcctgcggtcaaggagaaaattccattctccgtatcccacagcggggatatcgtaatatgcgcgatgggcgcggagaggcgcgccgatcttccgatgcttcgctcgggcgaagaaatagccgagggcttttttcttgccgatgcgagcccgtgctccgaaatcggcgcagatatcgaaaaaatatcggacaaacgttctcccgaacggacggaggcgattgccggaagatacttctcatgcgaggagcaagctctcattcgcagctccgacgatcccgtaggatgcttttacgcgctctggacccgtaaagaaagctatataaagctgacggggcgcgggctttccgccctgcgcgcagccgatacgctctgcattcccgaaagcgccgctcatatctccttcacccttctctccaacggcgaaaaatactctctgtcggtatccttcaccgaataagcggagcagaataaccttcctcaaagaccatatatttggggttacatttttcctcgccgcacactataataatagtgaggtatgtgacggacacggcacatatgcggaaaggaacaagctgatggaaataataaaaatcagtcagtcggaactcaaggttacgatgacctcagaggatatgcagagatacgatctcgactgcgatacgctcggggacgatcccgaagaaagcaggaaagcactgaaatgcattctccgtgaagcaaaggcggaaaagggattttccgcggcgggagaacgactgctcgtgcgcgtttttccctcacgcgacggcggatgcgaaatgtttgtaacgaagctcggcgccggcgaaggcgcggaaaacaaaaaatgcattcccggattttccgtccatccggcggaaggagcctttatttattttttcgagaagctgagcgatatggcatcggcatgccgtcggctttatgaggcggggtaccgcgcgccgagcgcggcgtaccgcgatacctgcggtaagcaggcgtattatctggtgataaggacaaaaactccgctgtgcgaagaaatgggcggggttcttatgaagatcggcgcggtctactacataaacgaattctgcgcactgctgtgcctcggcgcggtggaccgtctgtccgaatttgcataaaacacaggagcaccccggcatgggtgctcctgtgttttggaaaggaaagtattttataactcaaaggaacggtattcaccgaacctccaagagcaagtattgtacgggcggcaaaacgataactttgctgccgcttccggcacaaaaaaagttcaagcgccgcccggcaaagccggaaacatcgaagccgcgcatggtgcgggcagcacaagctgcaccgagaccgaaattcgggcttacgtcggagaatgacgcgctgcgccattcccgcggacgcagcaaaataacgtgcaagtttcgcctgatgttatgccgtgtctctattataccatgaagcaaaaatgcttgcttgcaagggcatttttgcgaagccatcaatatcgaagccgcgcgtagcgcggggcagcgcaagctgcgatgtttgcaagtattgcaaacatcactgaagatattatatcaccatcctcttttaaatacaatacttttacgcaattttgtttgatttttttattttttagtcagacgacctgataaaatgccgaaattccgttttcagagaggcttcggcgtcactttccgtgctccgttaattgcttatttgcagccgcagcgtacaaacgactcgcagtcaacacactgacatacggtggggtccttctcgtgagtaccgatttttacggtgttgagtccgcagtaatcggattcgcaatggttggcgcactcggaaacggtgcactgaatagctctgttgggtttcatatcagacatttcgcatcttcctttcatgatgaaaaagaattccgggatcttttgaatcccggaattattatctccgtccgacacgcttttgattcgtattttcaccgttttttcaaatcacatacggagtccgcgttatgaaatacgacgacggcagagctttttcgaaaagcaatgtgtaaagctcgtccgcgcgggacgatagctcgcgttggcggcgctccgacgcagacgtgagccccgacgacggttttgtgacgacatttattttccccgagcgccgtgcggcggcgagaatttctcttcctcgtccgttcgcggcgagcagattcgtatatgccggttccgacgaaatatcctccggcgtcacgccgagaagcgcaaagatcgcggcacggactatgcgcgcattcgtatattttttcgttgcggcaagcgaaaaaaattcctctgcgcttccgctttgccgtgcagcggatctcagccggtttccgagcccgccgcggcattccgcgatattttcgaaatcggtgccgcacattctgaagaacatccacaatatctcgcggagctttgagacatccgcgcgcggcgtattcatcatcatttcaagcgatgcgggcgggacaaacggcgcgccctcctccgccgtcatgccgcgaagctcggtcgcggaaagtgcgtcatccgttcttttcaccggaacacattcgatcttcgccgatcttatatactcagcggcaagaatatcgttcggattatcgcacttttcacgggaatatccggggcagagagtgccgagcaccttcgatcttatcacagccgcgccgagcgcgggatcgcgcttttcggtttccgaaaaaagtctgcggtattcctccgacgaaagcgtccgcgcaatatccgaaagaagctcgcggtcggcacacgacgatccgaacataagtcggtcggcgccgatgcgctccgcgatcgacaccccggcgcgggcgaagaattccccgcccgacgagcagtacggaaacggaagctcgaccacgagatccgctcccgagcggacggctgcctcggcgcgcgcgtacttatgaaaagcggcggaaagcgcccgctgtgtgaaattcccgctcatcacgagaaccacagcgtcgccttccgccgctttcattacatgcatatgtccgttgtgaaggggattgagttcgcacactatcgcagttacagacatacgccatctccttttacgggcaaattccgcttaatcggtaaagtatatcatattttactctttttcgccggaattgtcaacaccgttttccccgctgccgccgtccgcggaagcgtctttctcttcgcctttctcgtcggcggattcgggagaagcgccctccttttcataggcgaccttgccgtcacgcattacgcacttcacgctgtcgccttccttgacctcgcccgcaagaagagcctccgagaaggagtcctccactcttctgacgatcgcacggcgaagcggacgtgctccgtacacgggatcgaagccctcttttgcaagatgtgcaaccacctcgtcgtcaaaggagatctcgataccgagcgcgttgatgcgctttttgacctcttcaagcatgagagacgcgatctttctgatattttcgtcggtcagcttgttgaagattatgatctcgtcgacacggttgaggaattccggtctgaacgttgccttgagcgaatcggaaacggactgcttcattcgctcataatcctcggaggattcgtctgcgctgaatccgagaggattgtgtgcagccgttattccggcagcgccgacgttggaggtcatgatgatgacggtattcttgaagtcgacctttctgccctgggaatcggtaaggtgcccgtcctcaagtatctgaagaaggatattgaacacgtcgggatgcgccttctcgatctcatcgaaaagcactaccgaatacggatgacggcgtacctgctcggtaagctgtccgccttcctcgtatccgacgtatccgggaggtgaaccgataagcttcgacacgctgtgcttctccatgtactcggacatatcgacacggatcatcgcgttttcatctccgaacatgacatccgcaagcgccttggtaagctcggtcttgccgacgccggtaggtccgaggaagataaacgatccgatcggacggcgcggatccttgagtcccattctgccgcggcgtatcgcgcgtgcaaccgcttcaacagcgtcgtcctgcccgattatcctctccttgagaattttgtcgaggttgagaagtctctcctcctcctcggatgcgagcttcttcacggggatacccgtccatgcggtcacgatatcggcgatatcgtcggcagtcaccacaagctcgtttgcgttctttgatccgctgccgccgacattcttcttcgcttcaagctcgtcgcgcagcttcttctcctcatcgcgggcatgagccgccttttcataatcctcgcccacgatcgcctcttccttctcgcgcgccgcagccttcactttttcttcaagctcgcgcacgtcgggagcgggagtatagctttcgatacgaagctttgatgccgcctcatcgataaggtctatcgctttatcggggagaaagcggtcgccgatgtaacggacggaaagatttaccgccgcgtcgatcgcttcatcggatatcttcaatttatggtgagcctcgtacttgtcgcggagtccgtgaagaatttcgacagcctcctcgggagtcggctcaccgaccataacggactgaaaacgtctttcaagcgccgcgtccttctcgatatggcggcggtattcgtcgatcgtggtcgcgccgatcacctgaagctcgccccttgcaagcgcgggcttgagaatgttcgcggcatcgacagcgccttccgcgccgcctgcgccgattatcgtatggatctcatcgataaagaggatgatctgcgggttctgagccacctcactcatcacgttcttcattctctcctcaaactcgccgcggtactttgcgcccgcgatcatcgaggaaatgtcaagcgtgatgatctccttcgagcgaaggttgtccggtacgttgccttcgactatacgctttgcaagaccttcgaccaccgccgtcttaccgacaccgggttcaccgatcagacacggattgttctttgtgcggcgggacaggatctgaatgaccctctccgtctctttgtcgcgtccgatgatcgggtcgatctttccggatctcgccatctcgcagagatttctgccgtgtgcgtcaagcgtcggagtcttggtttttccggttttctcgctctttctcgaatacggtgcgttctcgttttcggcgctgccgaagtatcccgcgatatccgaacggatatcgttaaggcggacgccctgagcgacgatgatctgagcggcaaagcattcgggctcgtcggtgatggcgagaagcagatgctccgttccgatgaaggagtgacccgcatttgacgattcatacgcactgagggagattatcctctttgtgcggggtgtcatttcggagggcgaaacgtcggtcgatgcacctacgcccgcattcttctcgattatgctgcggcactcttcgagcgtaactccgcgtccggtgagcacctttgacgctatcgaatccgtctcggagagaagtccgagcagaagatgctcggagcctatatatgagtgtcccatctcacgcgcatactcaagcgcgctgttcagggcgttctgtgctttgtttgtgaatttctcgttcattattctcactctcctttttgctttatatgctcagtgaagcgtcacgcggcaagcgtctttttcacaagcgccgctcttgcgcggtcccgagccgccgtatcattttcggggagaccctccgcctctgatataacggcacgtccggcttctatcctgagcttatcgagacgggcataatcgcattcgcttatgcagccgaacgcgatgcccaatctgagtttttcgtatatctcaaggaattccgcataatccatacgctgcgaatagagcgccgtaccgagcgcacgtctcgacatatcgaacagcctctcgccgttctccttcttcatttcctcacgaatacggcgttcgcttacgatgatctgtttcacgacggcatcaagcttatcgataaggtcctcctcgcttacgccgagcgttatctgattcgatatctgataaagcgcagcgtccgcgcggcttccctctccgctcattccgcgaaccgtaagaccgatcttctggaggcgcagactgagcgcgcgtatctgatttgccgcggtaagcgcgggaaggaacatcattacggatgcacgcattcccgtaccgaggttcgtggggcagtgcgtaaggtagccgagcttttcgctgtacgcgatatcaagaccctcatctgcaagactgtccgccgcttcggcgtgctcgtatgcgctcttcagatcaaatccgggcacaatcgactgtatccttaagtgatcctcctcgcataccatgatgtatgttccgtcatcctcttttgaaaagagcgcgtgcggagtattctttgcggcaaattccgccgacaccgtatatctttcggcgtaagcctcgcgctcaaccggactgagggctgcaaaatcggtgaatgtatatcccttttcgggggtaaacaccgcttttgccttgtctattatctcctttgctttatccgccgtaagacgcggctcgaaagcatagccttccaaatttctcgcaacgcgcacgcggctcgaaagcactacgtccgcttcctgtccagatctgtcataccaagccatgatttcctacttcctttcattaaagaattttgtcttactgaccgcgcagaccgtttatctcgtcacggatctgcgccgctctctcgtaacgttcatccttgatcgcgtccttgagttcgccttcgagcgaacgtatccttcttttcacgtcgagcttgccgctgagcttcttcggagcgcgtccggtatgaaccgcgttctgatgaatatcgcagatcgtcttttcaagctcgtccgcgaaggtgttgtagcattccgggcatccgacgcgcccttctgccgcaagctcattgaacgtcgctccgcaaagcgggcatttcttgccggatgaaatccttccgcttcttctgctctccggagagaacaggcttccgaagatcgaattgagcgatccgaaatcgccgaagggggcgaaatcgttcatatccgagagatgcgggaatgcgctgaatttgatctcgccgttcttttcaagctccgccgcgcattcggggcagagagaatattttctttccttaccgtttatattttcacggtagaaaacagaagcttcattttttttgcatttttcgcacagcataattattacctatcctttccgttatatgtccggtgtaataaaccgattcttattttactttacaagggtcagtataatgtgccgaagtatgtcggctctgacctcgttttttttctcgcgcggcactttatcgagcgctccggaggaaatcgaagccgagatgacgcgcgacgcggcatccgaaactattccgtgatcgcggagatttacgatgtacgctctcgcctcgctttcatccacgctgtttcctatcgcgtggaagaagtgcatcagatactcgttctccgaaagctttactcggacgatctttatatatcctccaccgcctcgtctgctttcggtgatgtatccgcgttccggagtaaatctcgatgttatcacataattaatctgactcggaacgcagccgagctgcgatgcaagatcgtttcgtttaagctcggcgaacccgccgccgtcgtcaagcatcttttcgataagccttgctatattatcggatatcagcatatcaaacgcctcttttgctttttgtctttgactttctttaacctttgtgactacattatacttccttggtcagaaaaagtcaaagtcaaacaaagtcaaaaaagcatctccgcaggcggtcattcgaatttgtgcatatgttttctttgtttttctcactcattctgattttttctcactttttcatttttttgaaaaacgaaaaaacgcccgaggcgaatccggaaccggatgctccgcgatcgcctcgggcaaaaaagcactactccataaaacgtatcatcgaatactcatcggcaagcgcattccacgtttttctgtccacacgcccgcttgtttcca

SEQ ID NO: 1690 - DNA, 8014 bp, Unknown
  16S sequences of unknown bacteria
cgagaaaaaaggaaaccgccgcgacgatatgttctgcccgaaatgcggaagccgatacatagacgacgagcgaaagctgtgtccgaagtgcatggacaaaaacaagataatccgccgcacgggagagttcctgctcaaatacaaggctgaggtcattacaattgtcgcaatgctcgttctgacaagcgcgttcggcattctgacaccgtacatttcctccggcttctactacgaccaggtccttgacaaagcgggaaaatactacggcgaggtgctgcttgtcctcggaatcattatcggtacgcgcctgctttcgctgtttatatcaatgttccacagcattgttaccacgaaaatagccgcaaagctcgtgtatgacctgaaaaaagtaatattcggctcaatcgaaaagctgtcgctgtcgttcttcacgaaccgtcagacaggcggacttatgactcaggttacacgtgacgcgaacactatctactggttcttctgcgacggtgtgccgtattacctcgtaaatacagtacaggttatcgtaatactcataatcatgataataatgaacccgcttctcacgcttcttacggtagtcactgttccgtttatcatgatttcgatgaagtttttgtttgagaaaatggacaagttccacgcaaaaagatggacaagatctcgccagatgaactcgattctttcggatattctgagcggcatgagagtggtcaaggctttctcaaaggaaaaagaggaaacaaagagatttgacagaagcagccgcaaccttgccgaaatcgagcaggaaacctcggtattcggaacagtcgcgttcccttccctcggacttctcttctacataagcaatctgatcgtgctcggatgcggcggatggatggtaataaaaggaaagatgacatacggcacactgcttgtgttcatctcttacatgaacatggttctctccccgcttgactcgttccttttcatggtgtatgacttcacggacagccttaacgcgatgagcagacttattgagataatggacgcaaagccggatgtagtcgaagccgaaaatcccgttcatcttgacaattgccgcggaagcgtggaattcaagaacgtggacttctcgtatgacaagacgcgcaaggtcattgacaatgtttcgttcaaggttgaagcgggagaagctctcggaatagtcggacacacaggcgcgggaaaatcaactcttgcaaacctgctcataaggctttacgatgttaccgcgggtgagatattcatcgatggcataaacgtaaaggacatagcgtttgacgatttaaggcgtaacgttgccatagtatcgcaggagacatacctcttcgcgggaacaatacttgacaacatcaaatacgcaaatcctgacgcaagtgaagcggaagtaatcgaggcggcgaagatagcgggtgcgcacgactttataatgaagctgcccgacgcgtattcgactatgataggcttcggacacaaggatctttccggcggcgagagacagcgtgtttccatagccagagccattctgagaaatcctaaaatacttatccttgacgaggctacagccgctatggacacagaaaccgagcgaaagatacagacggcacttgaaaagctctccataggacgcacaaccattatgatagctcacagactctcgacattgcgcgacgcggacaagctcatcgtcatagaaaacggtaaaatacccgaagccggaacgcatctcgagcttctcgcgaagaaaggcatatattttaatctatataagttgcagcttgaagcgatgaagaatatcggaatagaagaatagtgaacgagggattttattcagtttaaattttatgtgatacaccctcgttccgagaatttctctttgttctacagtattaataaaccttatataacaccgtatactatcggaggtatatacacgatgcccgacacaaacaaatcaacaaacgctctcaaagaagtcgttgcgataaaatacattaccaaggataacgcaaagtttaaggtggtgaacgattttgtctcaatgaccgttactcttcccgatgacgacggaaatatgaccgagaaaacgtatgacagaatattcctgcaccgcgcgttcccgtttgattttccgtatgcttacatatcggttctggacagcgactccgcggaaatcggacttatcgaggatattgacgcgatgggagaggaaaacgcaaaactcctgcgcgccgagcttgacagaaaatactacacgccgattatcaaacagataatatctacaaaagacaaattcggctattcatactggaaaatactgaccgacgagggtgaaatggagataacgctccacgacacgttccagagcctgctgaaagtcggcggtacgagaattttcgtgaacgatattgacggaaaccgctttgagatacccgatattgaaaagctcgacagacaaagctaccgacgcattgagctgttcctgtgatttaggaaggagctgaacatggaaaacagacaaactctgactgaaagactgtgcggaatgaacaaatctctccaaaaagaagacatacttcttccgataggatttgaccttacgccgacagcttcacgcaaaaaaacggacggaattgcagcacttcttagggacaggatagcggtttacgaaaacggagaaaagacgagcgatatccccacggagagcatagccgagatagtcttcagaaaaggcataggctgtgttttcgtagaataccgcgacaaaagcgataaatggcacatactctgccgctccgacatggaatatctcgacttatatgccgcggctgcccgtgagatgaaccgatatattgaaggaaaagagatatcctacacctacgaaaaggaaatcgacagacgatgcccgaaatgcaacaggcagtataagccgggttccacgatatgcgagcactgcgttgacaaaaagagctatctcgcgcgcctgtggaaaatcgcaaaaccgtatcacaagctgatatacctctctgtcggattctactttattattgccgccgcgaatctcgtaccgccgtacatcaaccgcattctcgtcgacgactacattaaagcggaaacaatgccgaaagtgctcagttatttatcggtgatactgtcgatgctcggcgtgtatatcgttactcagctgctttcgatgataagaagcgtatttcttataaaagccagcaacggcattgtcgtgacgcttcgtgaaatggtgttcgacaagatacaaaagctctcgatagcgcgcatatccaagagaacctcgggagagctgatgaaccgtgtctcaaacgataccgctaacctttcgagattcatttcacaggatttcggaaacatggttgagcagattctgattcttctcgcggtgggaatatatcttttctcctacgactggcggcttgcgcttatgataatcctgccgacgcctatcgttatgtattcatacaggctgttccaccgcttcatgagacagattttccaccgtcagtggcagatggaatcgcgtgccaacactattcttcacgacacgttctccggtataagagtagttaaagcattcggtatggaaaagcgcgagataaagcgttacgacgagataacacaggttgagagggacacaaacatccgcgcaaacgttttcttcgcgaaaattcagccgtttcttgacttcttcatgggagtaggcgagtatttcctgctttactacgtcggaaataagataattggcgggcagatgactatcggtgaaatgagccagttctctgcttacgtcagcataatctacggtccgctccgctggatatcgtggctgccgagaagacttacgtgggtcatgacttccattgtaaaaatattcgatgtaattgacgaaaacaccgacgtcgcggacaaggaaaacgcaattgaccatgatattgacggttacatctcgtttgaaaacgtatcattcggctacgacaagacgtcatacgtgctgaaaaacatttcgctcgacataaagccgggtgagatgataggtattgtcggaaaatccggcgtcggaaaatccactctcatcaaccttgtcatgcgaatgtacgatgtttccgaaggcacgataaaaatcgacggaatagacatacgcgacatttcacagcagtctctccgctcacagataggcgttgttttgcaggagaccttcctcttctccggtacgatatacgacaatatctgctatgcaaaaccgagcgccacacgagatgaagttataactgccgcaaaggctgccggtgctcacagttttataatgaagctgccgaacgcttacaatacgaaagtcggtgagcgcggtcatacactctcaggcggcgagagacagcgtatagcaattgcacgtgctcttctgcataatccaaagatactcattcttgatgaagctacggcgtcccttgacacggaaaccgagaagcagatacaggacgccctgcaaaagctcatagcggacagaacaactcttgcaatcgcgcacaggctttccactctcagaaacgccacgagacttattgtgcttgacaaaggcgagcttgcggaggtcggcactcacgatgagctgataaagaagcaaggaatttactacggtcttgttatggctcagcggcaaatgtcgaaaatgtctccgaaaaatcaagcaaagcaagaagcaacagcataaaaaaggcttggtaccaaactttatggtatcaagcttttttgattcagtttttctttgctccaacgtatctgtcgagccatgctataccgaagtcaagcgccgtatcaagtccgcttttcatgccttcttttatgaccttagcgtctgctttgttgtctgcgtctatctcaagcagctgcatatagatttggtcgggtacgttatgccctttgtattccttctcggtcataattatcattttaattatatatctatcggacagattgccataacaaatgacattgtcttctcttaccaaaggacggttcttgtaaataataaaatcgccgtcaaccgtggatttcacgtcttttttatctacgatccattcagccatgtgcataatatcctttctcaattattttataatcaaaaatattatacactatcatgatatttttgtcaagcctataagagcggtttaggcatattttagcgagccggttgcgcgtttttacaatttgttattattttgctcagtgctgaggcgaaggtatctatatcgcgcacggtgttcataggagaaaggctcactctgacactgccgttttcatagcttccgagagttttatgggcaagcggcgcgcagtgatatcccgttcttagacaaatgcctaattttgacatttcttctccgataaccgaaggaaggatgccgtcgacgttgaagctgacaacagaaccgctgtgtgagccgtaaattgtcgcttgctcgattttagacaaatgcataaataatctatcggagagcatattcactttgctttcgatattcgcgacgccttttttggtgatatagcttattcccgcgttcaatccggctattgcggcaagcggcagagttccggcttccagtctttccggcagctcgtcgggcatttccgtatcaagcgaatttacgccggttccgccctcgattacagttttgtactttgttccctctgccgagactaaaattccgactcccatcggtccgaataatcccttgtgtccgggcatgcacagcgaggtgatgttcattttacccatgtctatcggaatgtgtcctgcactttgtgaagcgtctacgatgaattttatcccgttttctgcgcagatttgacctatcttctcaatatccgcggtgtccgacgaaatattcgactggtgtgtcgttattatgactttggtattaggacggagcttgttttctaaatcagatatatcgcggctgtcgtatatgtccgcactgcaaaatcccgaattaacaagcgacatcagcggtctgtaggaggcgttatgcgctaacgagtcaatcaataagtggtctccgtgctcggtcagtccttttatcgcgtaattcagcgcttgagttgcgttcattgtgaaagctacattctctgaatttgccgaaaataacccggcgacagattcgcggcaattgtagacgatctctgacgctttttcggataatctgtgagagcctcttccgggatttccgacatatttgaacgaatcggatacggcttttacgatctcaggcggtttcggataggttgtcgccgcgttgtcaaggtacactattttcattaatacctcccgattatgtcgccgtaggatatcttctttttgtcaagcaactctgtcagcgtatctatcttgtcgcacctgactttcaccccgacggagcatcctcttttggtgaatgacggatcaattgaaacaatttcggcgtcgattcgtgcaagtgccgcagttcttctggctctttcggcggctgtacggctttgcatagccacaacacaatctgacattttcttgtgtcctctcttttgttattatgtttgttatcagcttatgcgcgccgcggtttttgcgttacggattgacacggaaaagaaaatatactataattaatttatcaattcagacacgaggaaataatgaatacaggcgatattattgaagcgagaataatcgacacaaatgcaaacggtgcgggaatagccaaaatcgacggtgcggcggtgtttatcggcggttctgtcgaaggagatcttgtaaaggctgaaattatctcgcacgagaagaattactatacggcgaaactaatcgaaattattgaagaatcggaatacaggataacgccggaatgcgcgaatttttctttatgcggaggatgcacgctcggcaacattaattttgaatacgaaaacaagataaaaaagcagactgtggtatcagcgttcagaagagccggtcttgattacgcgatagtcggcgatacgctgcatacggatgaacgaaagcattaccgcaacaacattacgctccactataacggaggaaaattcggatattacgcagaaaagacaaatgtcgcggttgatttcggcaaatgtctattatgtcctacttcattttatgcagttgccgattatgtgaacgcgcatgtttccgatatcggtatgtttgctccgtcggatatgcacatcagagataattcagccggggatataacggtgtcgatatacacgggcaagaaagtacccgagccgaggaaagacgaatttcggggaaaatttttgaagaatttttcggaagaaagcacaaaatacactgtaaatttcgtctgcggaaacacgggagcatctgttatagacgacaggattttcggactggatatgcgtttttcctcggaagcattcagacaggtcaacacctcggcatttgaaaagctgcttgatgtagtatgttctatggctgaggattgtaaattcaccttctgcgcggatttgtactgcggctcgggaatcatagggcttgccatagcaaaaacaattccgaataagcgtttcatcgggatagaaatcaatccggactccatccgcgacgcaaaagtcaacgcgaaaatcaacggaattggaaacattgaattcttcgcgggagattcggcggatcttaaaaagcacctaaacgacggagctttgcctgagcttatcacggtagacccaccaagagcaggactttcgaaaaagatgtgcgccgatatcgtttcggtaaatcccgataacataatctatgtgtcgtgcaatccgcagacgttggtgcgcgacctgaaatattttgcggacaacggttattcaatcgagaaagcgataccggtgaacctcttcccttacacaaagcacgtcgagacggtagttcttttgtccc

SEQ ID NO: 1691 - DNA, 2721 bp, Unknown
  16S sequences of unknown bacteria
tttgtcaccctaattttattgtttatggcgatggtgctgcggatctttgtcctttcccggtccgcttattatgcggcggtagcgggcggacagagcagctggctgctggaggtggatcagagccggggacagatctatgactgcaatctcaagccgctgaccggttcggagacccgctatgtggcggcagtggagccctcagccgaggcggcgggggcgctgtatccggtgctggcagaggaggaccgggaggcggcgacccatgcgctggccggactgaccccctttgtcattgatgtgacctcaccggaggtctatgcgccgggggtggaggtgttcgaggtgcaggaccgggtcagcgccggacagacagcggtgcacctcatcggctatctggacagcgaaggcaagggggtcaccggactggaggcggcctttgacgagtacctgcgcagctgcggcggcagtctgtcggtgcggtatgccaccgataccatgggacaggcgctttccagcacggcgccggaggtgctgaacgagaactacggggccggcgggggagtggtgctcaccatcgaccgggagattcagcaggcagcggagcaggctgcggcccggtattttgagaagggggcggtggtggtgctggatgtccacaccggggagatccgggccatggcaagcctgccgtcctacgatcccaccaatgtggcggcagcactggaggacccgggcagcccgctgatcaaccgggcgctgcttccgtacagcgtcggctccaccttcaaggtgctggtggcagccaccgccattgaacagggctacgccgaccacacccatgactgtcccggctatatccaggtggaggatgtgatcttccactgccacaacctgacgggccatgggctgctcaatatgacccaggcgctggaaaaatcctgcaacccctactttgtatcgctgatccagctcaccgggggcgaatcggtggcagccaaggcagctgccatcggcttcgggtcgccgctggagctggcagacggcatcacggcatcagccggacggcttcccacctatgaggagctggcagtgccgggtcagaccgccaacttcgggttcgggcagggctatctcgccgccacgccgctgcagattgcccagctcatggcgacagtcgccaatgacggcgcggcagtcacccccaagctgatcgccggctacaccgaggacggacagaccatctcggaatatacccccacctattctccccggcaggtgatccgggagtcggcggcgctgcaggtgcagcagatgatgatccaggtggtggaggagggcagcggcaccaaagcccgtcccaaggcgctgggagcgggcggcaagaccgcctcggcccagaccggcatctatgatgaaaacggcgaggagatcgtccaggcgtggtttgcggggttctatccggcagatgagccccagtatgccattgcagtgctggcggagggcatggagtcgggcggcgactatgcggcgccggtgttcgccgaaatctgtgaccgcattgccgagctgggaaaactgaatggataacaggaggagaagtatgcaggacagaactgagatgaaccaggcagaaccggggcagacctatggatttacggtggtgccgggatcggggcaggacagcagtgccctccaggagaagctgcgggccatgcccggcgtgaccggggcggaggtctcggagcttcaggggcgggtctgggtacaggcgcacgggctggcacgcacggtgctggagcaggccatcgcccagagcggatatgaagtgaccggctgcactgatgagtccggacgggactgaccggcagtttttttgacaggatacttgaaaacttcggtgcggtattgtataataagaaagcctaattgtagaaaatagggcaatggagcgtgtgctttgccacgctggcagattggtcctgtgcgattgacggccgtgaatcatgtcaggcggggaaccgagcagcattaagcggttcgaagatgtgccgcagcaaacctgtctgccggtgtgacaaagcgcacgctttgcttatagggttggaagccagctgaacagaagggggcagggagctttgcatattgcgctgtatcggaaataccgtcccgctgcctttgcggatgtggtcgggcaggagcatatcacccacacactgcagagcgaagtagcatcgggcaatccggcccatgcctatctgtttaccggaagccgtggcaccggcaagaccacctgtgccaagatccttgccaaggcgctcaactgcaggaatccccagaacggggacccctgcggggaatgcgaagtctgccggggcattgatgatggctcggtgttggatgtcctggagattgatgccgccagcaacaacggcgtggacaatatccgggacctccgggacgaggccaacttcactcctgcggtgggcaaataccgggtctatatcatcgacgaggcccacatgctctccacaggcgctttcaatgccctgctcaaaatcatggaggagcccccggcccatgtggtattcattctggctaccaccgaggtgcacaagatcccggcaaccatcctctcccggtgccagcggttcgatttctaccgcattacccgggacgccatcgcttcccggctggaatacatcgctgggaaagagggcttta

SEQ ID NO: 1692 - DNA, 3405 bp, Unknown
  16S sequences of unknown bacteria
ggtactcgcagagggatggcgtttgaatccctctgtgcgccctccgcgtaggagcaccccctcaccgcagtgagatataataaatcaaaagacagagtcttttttctaaatttcccgaggggaatccgaaagggcgaagtccgttctacaccgccttgtatccggctttttctatcgccttcttcatcgccttcgggtctgcactgccgtctgtctctacctctgccactcccttttcgtggtcagccgtcgcggatattactcccggaacttcctcgagtgcttttttaaccgtcgcttcgcagtgcgagcacatcattcctttgatttttaccgtcattttcgttttttctcctgtttctgccgctttttgcagcttttttctcattttgtggtcgtgcttcgggtcgtgtatctttaaaagattcagcctaagcgcgtttgtcactacgcagaagcttgaaaggctcattgccgccgcgccgaacatcgggttgagctgccagccgagcacttttatgaacacgcctgccgcaagcgggattccgataacgttgtagatgaacgcccagaataggttctcgtgaatgttgcgtatcgttcctcggctcagtcttatcgcagcggacgcgtcggtgagcttcgagttcatcagcactacgtcggcagcgtctatggcaacgtccgttcctgcgcctatcgctattccgatgtcggcttcggtcagtgcgggagcgtcgtttattccgtctccgaccatggcgaccttgccctcgcgcttcagctcacggataattttcgcttttccgtcggggagaacgtccgatatcacgtcgtccactcccgcttccctgccgattgcctgtgcggttgcggcgttgtctcccgtcagcattaccacgcgaattcccatgcccttcagctcgtttatcgcctgtctgctgtcgtcttttatcacgtccgcgactgctataactccgagcagcctgtcgtcctcggcaaagaacagcggtgtttttcccgttttcgcaagctcggatgccgtgtttttcgccttttcgcttatcttggcggtctttccgatatacgcgatgttgccgccggtgtacgtctttccgcctgactttgcactgagtccgtttccgggagctgcggcaaagtcggtggtatcgcaagccttcacgccctgtttttcgccctcgcggactacagctttcgcaagaggatgctcgctctttacttcaagagagtacgcataacgaagaagctcgtccgatgaaactccgtcttcggggattatgtcggtgacggcaggctcgcccttggtgatggttcccgttttgtcgagcgcggctatctgcacgtgtcctgcgttttcaagcgaaactgcgtttttgaagaggattccgttctttgcgccgacgccgtttcccaccatgatggcgacaggtgtggcaagtccgagtgcgcagggacagcttatgacgagaaccgagattccgcgtgcgatagcgaaaccgaaggtctgtccgacgagaagccaaactattgttgtcactactgcgattgaaataacggtcggcacgaacacaccggagactttatcggcgattttcgctatcggagcttttgtagccgccgcgtcgcttaccattttgatgatctgcgcgagggttgtgtcctctccgactcttgaagcctcgcagcggaggaagccggacttgtttatcgtagccgccgagacggtgtctcccactgccttgtcaacgggaatactctcgccggtcagagcggattcgtcaagcgcgccgcttccttcgacaacgattccgtcaacgggaaccttttcgcctggtcttacgatgaaaatatctcctttctgcacctgctcgatggggagagtaacctcttttccgtcacgctcgacagctgcggttttcggagcgagctgcatgagacttttgagcgcgtttgtggttttgcccttcgagtgcgcttcgagcattttcccgacggtgatgagcgcgagaatcattgcggcggattcaaaatagaactcgtccatgtacatcataaccgcgtccatgtcgcccctcacctgtgccgccgtcatagcgaacagggcataggtgctgtatccgaacgcagcggagcttccgagagcaacgagcgtgtccatattcggcgagcggtggattagacccttgaagccgtttatgaagaatttttggtttatgaccatgaccgcgacggtgagcagaagctgtacaagacccatcgcgacgtggtttccgtcaaagaagtgcgggagcgggaaattccacatcatatgtcccatcgagaagtacatcaggacgatgagaaatccgagggatgcgacaagtctgcgtctcagcacgggagtttcgtggtcctcgagtgcgtcagcgtcgcttgattttgccggatttgcgcctgcacctttgagacttgcgccgtagcctgctttttcgacggcttttatgacggcatcgggagaagcggttccctcaacgcccatggaattggtgagcaggctgacggagcaggaagtaactcccttgacgccggagacagccttctctaccctggcactgcacgccgcgcagctcattccagttacgttatactgttccatatggattatcctttcgttttatttatatattgcgcttatttcatgagctttccgagggtatcgaccagttcgtcaacgatgtcgtcgcgtccgtcgcggatgtcgttcaccacgcaggttttgatatggttcgcgaggagctccttattgaaggcgttgagtgcggcattgactgcggcgacctgagtcatgatatcggggcaataggcgtttctttcgaccatgcccttgataccgcggatctgcccttcgatacggttcaggcgattgatgagctttttatattcctccggcgatcgctccttggttttatggcacgaacagcagcattttttgacgttatccacggtgatgtcctccttattctttgcgaaaaataagctttttcatgattttctatacccctatagggtatttttattatatacccccgcagggtattttgtcaagcgcgatattgaacaaatccgagggatagtatgcgcgcatttcggcgaaatcatgcataaaaaaagagcgcaagctctgtttttttaccttagacgacgggggtcttctaagagacttccgctgatgaagtttcacttaaatcctaagtgaagagaaagtagaaagactccgtctttcgatttaattattccactatcgtggggagctctttgcaggggtgaacgctaacgagcaagctcgttctagaggttcagacgcctgccccttgcacttactatgtaagtgcggagttccggctt

SEQ ID NO: 1693 - DNA, 5489 bp, Unknown
  16S sequences of unknown bacteria
ccgtaggtggggccatccaccacattgggaacatccacaagtacgcccgccgggaggatgtgccggaaaagaccctgttcgtcatcaccactgacggctatgaaaacgccagccgccgctataattacgaggcggtgcggcgcatgattgagcgtcagaaggaaaaatacggctgggagtttatttttctcggagcaaatattgatgcagtgcctctttctgggcgccaacatcgacgcagccaaggaggcagcccgcttcggcatcgacgccgaccgggcggtgaactacaagtgcgacgaggagggcacggcgctgaactatgaggtcatcagcgccgccgtgtgcagcgtccggtcggcccaacctctcagcgccgactggaaacgccgtattgatgaggatgtgaaaaaaaggggtagataatttcaggcaacttcaagccaccacgccgctcaatttctgccacgctataagcaaagaataggcgctgcccccggtcaaaggaatgaccggggacagcgctttattttttcttttccgcctcacagcgccttcagcttccggcaatattccgactccgccatttcccctgcctgaaacgctgcgcgcagctcctccgccacggcgacaatgcaattccattcatcagtggagatggtgccccgctgcttccggccctttaggcggttataggtgcgggcatactccttggcggcggcctcccgcagtttccgtttcgccgtctcatgggcgcccacgctgcggcaggtcttgccgtgctggccgaggatggggcggtcgcaatactgggtgttatacccgcccacggccacgaaccagtgtccgcaattcttgcacctgcggggcagattccctgcggcaatccccctcgtcaagtccaagtagaaaaaggcaatcaagtcgtcgaaagtggagcgctccgccatcttcggcttcccggttttctcgtcccggtacgggataaaggatatgtgcgccgggaaatcaaagcggaatgacgccacgggcgggtcgtagaacgggtcagattcctcgtccatatccaccagctttgccttcccgatcccatccttgaagcggccataggcgtcgatatagttctcccgcttgcaggagggcaagccctcaaaatacgccgacagcatccactgggtgttgcgccggaagtcgctcaagtcctggccgatccggctgagccgggctatccagtgcgcatagtcgtcgtgggcctgcgtcccccgggtcatcatctcgtcccacatctcccggcagtcctcgtcgctggtgaagcaggacggcgcatcctcccgccgcaaaagaagctcatacagcggcagcttccgcagcagatgccacagccgccgaaacgcttcgttggcgatcccggcgctggacggggcccgggcggcgaaaaacatctgcgcctcggcggcaaattccttggccgcagcgcctatatccagggtgagctgccccgacacctccagcgcctccgccgcaaaatatcccagcgggtactcctcccccgccacgatcacccccgccgctgtgaagtcggcggaaaagaaatccactgcgtcatagctcatccgaaacatagtttcccctccatacccgattgattttttgcgtgcatgccgatatttctgaaacgccttgcaaatgcgtttttatctgttatactcataatacccgataatagcaatattgtcaatcgggtatattccatctatgaaaggagggcagcccatccaccattccatccaaaaagaaagccgccgaactgcggcaacagtccggcggcacgccgcgcttcggaaaacgcagacgccatctgccacaagtctaacagagaggcctccgaaacgcaagttctttttctctgaatttgaaataaggagtgttttatgaaacgatccgactacaccgactatgaccaacttccgctgttcctcaccgcagaaatgacggccaagctcctggggatctccctctccagtgcctacgagctgatgcacgaagagggcttcccggctctgcgcatcggcaatcgcatcgtcgtccccaaggaaaagttctgccgctgggtggaccggcagacgggaggtgctcgatgaagcgcaccctgccgtggcagacgcccgtccgaaactactaccccctgccgaaagtcctttgccggctgggcctgtcccccggcgaaatcgctgtgtactcctttctcatgtactgcgaaaaccgcaccacctaccagtgctaccccagctaccgcaccatcggcgaggccgtgggcatgagccgcaacaccgttgcgaaatatgtccgtcagctggaggaaaaggggctcatccgcacggagcgcaccaccgtcacgctgaaagatggccgcaagcgaaacggctctctgctctacacgatcctcccgccggagcaggccgtggagcagttcaaccggcagcagctggccaaagcggaagccgccgccgagcgccgtcgcatacaagatacgctggccaaacaggccgcagaagccccgccttcgcccctgtgagctgctgtgtgacctcaccggagcgaaagcgggtgaagatagcacccccagggcttttgagcggtttcggaccgattttcggtgcgccgaaatcggggcaggagaaaggcattggcgcttttccgcacctatgccgttcacggcagcccgcagtgcgggctgccacgggggtttgcgggattttgagattgacgctgattctcagtctcccaatatgctttggctctattctttggaaaaatgcccgtttgccccgtgttttcaagggttttgggcagcgcaggcatacgaaaaaggaggaatttttaatggacaacaacggaaaaagccgtcactccgtgtggctgtcagacgaagtgtggcaggaggtagatgcattttacaagctggataattgccccacccgcaacgagtttgtggagaaggccctgcggcaatattgtggccgtctgcacgccgaacggtcggtcgcatacctgcctcgcgcgctgcaggagatgctggagggcacactgggcgtgttcggcgacaggctgggtaagctgctgttcaagctggtggtggagcacaacatgaccaaccatctgctgggcggcgacatagatatgacccgggacgagtacaacaaaatgcgcggcagcagcgtccgggaggtggcctccacccacggcagcatctcttttcgggatgtgctgctgttccatcgggaggagtaagcggtgcaaaatctgccacgccgtaagcaaagaaaagggaaatctttcagtagctttcccccgcagcttgtggtatgttgtgttgctgcaaggaggtgaccttaatggcaaaacggagacccgccggtgacggcatggtgcgaaggcgtgacgatggccgctgggaaggtcgcatcgtcatcggccaccgggaaaacggcgagccgctgttccgccatgtgtatgccaagacgcaaaaggccctgctggacaagctgcaccagaacatcgagtgctaccgggatgtggagctgaccgaggacagccgcatgacgctgggccagtggctggaccgctggctcacggagtacaaggcgggtacggtgcgccccggtaccctcgagggctaccgccgctacatcgaatactacatcaagccgcaactgggcgacaagcagatctccctcctctcccagcaggacatccagcggatgtaccgccgcctgaaaacggaggggcgcatccacgagcatcccgagatggggcatcagctctccgactccatggtgcgccacatccactccacgcttcacgccgcactgaaagacgcggtgcaggcgcatgtcattcccagaaatcccaccgaaggtacaacggcgcccaaacccaactacaagcccaagcgcatcctgaccggcgaggagctggatgccttccgcgcggtggtggagcgggacgaggtgtggcgggacttcttccagacggagctgatgaccggcctgcgccgcggcgagatctgcggcctacaatggagcgacttcgatgggaataccggtacgctgaaggtgggccgcactctccacagccagcggaagggcgagtataccgtcggtgagacaaagaccaatcaaggtatgcgtaccatcattctgccgcacagcgtggtggacatcctgcggcggcgaaaagcggatgccatcagccaatggatattccctgatccggtgaagccggaagatcccgtcgatcccaacgcggcgtatcgccacatgaagacgctgctccagcggacggggctgcccagtattcgcttccacgatctgcgccacaccttcgccacccatgccctcaccagcggcgtggacgccaagacactgtccggtatcctgggccacaccaacgcctccttcacgctggatacctacacccatgtcacctcagatatgcaaaagcaggcttgcggcatcgtaggcggcttcatggaggatattttcggaaaggagttgaaaccgtggcaagaaaacgaaaagccggagacggaacagtaaggcagcgcaaggacggtcggtgggaaggccgcatcgtcatcggctatgacgataacggctatcccaagacgaaaaatgtccttgccaaaacgaagaaggaatgcgtcgagaagctccagaagctcaaggtggattgcggcgggctgaagcccgaaaaagtacggtctgagatgcccttcggggactggctgacatactggtatgagaatcactccaagcctaagatccgcccaactacgcaggagacctacgagagccgcatccgcctgcatatcattccggagattggggacatcccgctgaataagctgacgcagaacgacctgcagcagttctacggtcggctcaagaaaagtggccggaagcgcttcaccgacaagtacggcgaagggctgtccgaccgaatggtgcgtatgtgccacgccacctgccgctcggcgctggagaaagcggtgcaggatgggctgatccgtgtgaacccggccctcggctgcaagctgccgccgaagaaggcgagggagatgcaggtgctgacgcgggaggagttgcaacggtttctcatccaagcgaagtttgagggctactatgaagtgttcctcctggacttagccaccggcctgcgccggggtgagctgatggcgctgcaatgggacgacctgaacttcaaaaccggtgtgttgaatgtgaataagcaggtctacgatgtgcgtggccagcttcagatcagcacgcccaagacgaagaactccgtccgcaagatcgtcctgccgcctgctgtggtggcggtgctgcgggagtacaaaaagacggtgaactcccgctggatgttcccgtcgccggtgaaggaggactgtcccatcacgcccggcgtggtgcggcgcaggttgcagc

SEQ ID NO: 1694 - DNA, 32572 bp, Unknown
  16S sequences of unknown bacteria
aacattgtttcaaggcggcttttcaatcggcactttcaaaggatattttcttgaaaatatttttaaaggagtgtgtcttatgtctttccattcttcttcccgttccgttttttcagaagaacgccccgaatctccgacgggacaggatatcggtgatcaaatacctgccccctccgattctcccgatcccgctctacatagcgcagggcggagcggctcgtcccgcgctttgaaaacgtcggatcaaaacggaaaaaaacgaagcgcgggcgcggcttttaaaaagatgttttccgcaaagcgcatagcgctgatggcgatttttacggcgttgagctttgtcgtcagtatgctcgaatttcccattttcccccaggcggaatttttgaaactcgattttggaaacgtctttatcatgctcatcggcttccttttgggtcccgtcgaagggatgatcgtcctcgttatcaaggaactgttgtatattcccgtaggcgggacgggcggggtaggacagctcgccaacattatcgtgacttcttccttccttctcgtgccgtcgatctcctataaattccataaaggacttaaaacggtgattcccgcgcttttcatcggctgtgtgcttgccagcggcatggcgcttctctccaatcggtttattctcattcccgccttcggcatagccgatcccaccgcctattttaagaaggtctggatgtatattttggcgttcaatctcgtcaaaacgacggcgatcagcatagtcaccatcctcctttataaacgcttgtccgcgtttttaaagaaaatgaagatttaaaagcccgaaattattgcaaaaaattgccgtacgtattataatatacgtatggctgtttttatatcgaagtcgcgggaagcgacggaaaagtttgcggaagagtatgcgaaaacgcttcgtcccggggacgtaattcttttggacggagaaatgggcgcggggaagacggtgttcgccaaaggcgtcgccaggggactcggcatagaggacgaggtcacgagccccacctacgcctatatgaacgactatgacggcggactttttcattatgactgttatcgcatcgaatcgccgcggcaggcggaaaatttaggcttggcggactatttcgagatgggcggcgtgtgcctcgtggaatggagcgaaaatatcgccccgcttctgcccggtcgcgcgaaacgggtgatcatccgcaaaacgggagaagaggaaagggagatagaatattgaataattttctggcgatcgacaccggcttgaaatatctcacggtgatggcggtgaaggaggggcaaacgttttattcccatcttcccgactgcgcgatgaaacattccgtgctgttgatggaagaggtggataaagtcttaaagcaagcggatctttctcccgccgaatgcgatttttttgcggcggtggtgggacccggttcttttacgggcatccgtatcggaatttcgacgataaagggcttttgcctggcggcggggaaaccttctcttcccgtcacctcgttcgaaacgatggcatataatgacgtagacggcaataagctcctctgcctggtcgacgctttgcacggccgctattatgcctgcggctatgaaacggcttcctacgacggctccccgcgtcttcccgcggcggctttgcgcgagatttttcctccttcctatctggaagaagcggaggtcctgcggctcgtaagcgaggaaaactatcttccctgcgcgttcgaacgactcccccttgcggataagacgcaggtgcggcttctcgaccctgtggcgggtttgcgggattcgattttggcgttgatgcgcagcgaagaaaacttcggggaattgaaggcggtgtatatccgcaaaagtcaagcggaagaacagctcggcttatagacgtccccgcttctttcgcctcaggctgttttcgggcgacggagccgcgcataagaacgagttttttgtttcgttccgtttttcccgtccgcttcggacttctttccaacggcaaggaaaaagccgaagagcgcagtatgatacggatcttggcatttttgatcagagagagaatatgaaatatcgaaactggacgtacaaagacattttgaaaatttccgaattggaaaaggcttgcttttcggatccgtggaactatcggatgttcgcggacgcgttttcatccaagctctttcacggcgttttggcggaggagaacggcgaggtcgtggggtatgcctgccagacggtgctgtttgaaaacgccgaagtggataatatcgcggtggcggaaggatacagaagggaagggattgcaaaaaaactgctcgaaatgctggaagaagaggcgaaagcccgcggcgcgacagtcatgcttttggaagtccgcgtatccaacgtgcccgcgatgagtctgtatctacatttgggctatgcgggaatctatacccgttcccgatattacgccgacggagaggacgcggtcgtcatgcaaaaaaggctctgcggcgcgtaaggttttcgtttgattttaagtcgcccgcggccttttctttcgctcgtcgcgccgaagtattcgttgaacgttctttttacttatctgcgcaaatttccgtggaatgcttttttccgcttattgaatcgcgaatttccgcagagcgttgttttccttcctcggctcggcataaattttcgtcaatccttccttttttacttcctcacaacctctcgccggagctttttttacccgtaatgcctgctgtgtttctttcaaagacgcgctttttgtaaatcccgacggttttcgcccgatttaaaaaaccgcgctttggcgcccgatagaaatttatggagtacgctgccgcgaaagacgcggtcgattgaaaaaataggagagctatgttcgatttgtccgaggtttcgtacatacaaaaggggacgggcgaggatctggtattttttcacggctatctcgcctccaaagagagctttgccgcgcagatcgaatatttttcccgtttttatcgcgtcaccgcgttcgattttctcggtttcggcgcatccgcgccgctgacggagcctttttccgtttccgagtacgcggcgtggacggaagaatttttaaaggcgctttcgatcgtacgcccacgcgtgatcgcccattcgttcggctgccgagtcgctgtcaaaatggcggcgcgaggcgcggaaaggggggatcaggtattcgataagatgctgctgacgggggcggcggggattattttgaaacgcggaatacgctataaaatcagggtgaaaacctatcgtttggtcaaaaaaatcgcgccgaagtttgccgaaaaacatttcggaagcgcggaatataaaacgctttctccggtgatgcgggagagctataaaaagatcgtcaacgaagatctgcgcgaggacgcgcggaaagtcgaaaacgaagttttactcgtcgaagggacggaggataaaacgacgcccatagaagaggcgcacgtgtatctttcctgtttctcaaacggatggataaaaacgacggagggcgggcattttgcgtttgcggaatatccgacggccttcaatctgattgcggaggaatttttctttcatgagtgacgtattgtcgagaatcggcgcgtgcatcgtctgcacctgcctcttttatgtggcgacgtataaatccttgggcgcgttgcagcagtgcggctataaaaacggcaaattcgcgcgctggctgacgcgtaaggacaatttgtattataaccgtctggcgctttggtcggggctggggctgctgtctacgggcgtcgtcgcgctcacattttcctttgcgggcgccaaaatcgccctgcttctttccgcgcttcccttccttttattctgcgtgctgttttgcatcgcggacaggaaatacgctttaaaggtacccgtggcggcgacgggcagaatcaagcgcctctccgccatctacgtgctttttacggcgtgcgtttcctatctcgtcatcgcgttgctcgcctttgtcggaaaactcgtcgacagcgagctgtacggcgttttggcgtatcttccctttacgctgatgcctttgctgctgccttggatcttatgcctcgccaatgccgcggacggactttacgaaactccccgcaataaaagattcgtcagacgggcgggacggatattggacgaaacgaaaatcattcgcgtggcggtggtaggcagctgcgggaagacgtcggtcaagaatattttgaaaagcatcctttccgcaaaatattctgtcgtggctacgcccgaatcgtataatacgcccgtcggaatcgccaagacggtgacgagcggggaatttgcggataaacaggttcttgtcgcggagatgggggcgcgccgcatcggggacatcgccgaactttgcgcgctggtgaagcctgattttgcggtgtttacgggcgtatgcgcgcagcatatcgaaacgttcggctctttggagaacgtgttgaagggcaagagcgaggtcctgaaagggacatccgagaaggtgatctgcggcgagggattaaaggaaaaaatccttacgcttcctttggaaaccgcctctctttcggataaagagaagtgcgtatacgccgattacggcgcgctgatcggggcgctgcttttgaagccggacggaacgtctttcgttttgcgcctgccggaacggaaagaaattttcgtcgatacgccgctgctcggcaagcactcggcggaaaatatcgccctcgcggctctcctcgccgccgagatgggattgaccgaagaggaaatttcggcgggaatcgagaagatagagcctattccccatcgtttgcagctgatcgaaagcggcggcgtgcacattctcgacgacagttataattccaatcccgtgggcgccgcggaggcggtggaggcgttgaagcgctttggcggcagaaagatcgtcgtcactcccggacttgtggaaacgggaatcctcgacgagaggctcaacggcgaactcggcgctcgtctggccgggctggatctcgtcatattggtcggagatacgctcgtcggcgcggtaaaagcgggttatacggcggcgggcggggaagcggaaaaactcgtcgtgcgctccacgctggacgcggcgagggaatatctcgcggacgttgtggaaacgggcgacgccgtgctgtttttaaacgatcttcccgacgcatggtgaacgcttttttgtggagcgcagcggaacagagcggattctcagactctccgcgcccttttcctttcgtgcgagggattcgttttatttccgcttagccgcgcttttttcgccgcttcttcgttttccggacggtgagttgccttctatcccttttgtcataaggaatagaatgaaaaaaatcgcttttttgaaaggatgcggttaaaaaaagaaataaataggcggaaaagccttgtgggaaaagggatagagcgcataaagggggaaggttgcccctttgaacttcaatatgaaaaaatcgccttgaatctcttttaataaaagggaaagagcgcatttcgggcagcgcgtggcaatttcaaaggttttctttttcgaaaaggcgtgaaaaattgccttttaaccccttttgtcaaaagggattgcgtagatacagccaacgaagaacaaatacaccaaagcggaaaaatttatttcacggaggtgtatttttatgcaaaaaattgcggtgttattcggcggaaaatccaacgaaaacgaaatttcgattttgacgggggtgttcgttctcaatctcatcgacaaggaaaagtttattcctgttcccgtatacatccacacggacggagaaatgtatacctccgcgaaaatgaacgatttgaatttgtttaagaagcaggacttctcctctttttcgagaatttttttcgacgggggcaccatgtatgcgttcaacgcggcaaagacaaaagtgaaaaacaaggggaagatagacggagccatcaattgctgtcacggcggcctcggggaaggcggaggaatttcggcgctgatgcagctcaacgaaattcccctcgcctcgcccgaactcacggcgtcgggtatgttcatggataaaacgctcaccaaactcgtcgccaaggcgctgaatatccccacggtggaatatatacgcgtcaacgaatcggattatgcgcgcaggggcaagtttttgctgaaaaacataggctccaaacttaaatatcccgtcgtggtgaagcctgcgcatctgggatcttccatcgggatttcccttgcggaaaacgaggaaggcgcggaaaaagcgatcgaggcggcgttccttctggacgagagagtgattatagaaaaatacataaaaggcaagcgggacatcaactgcgccgcatattccttaaacggtgaaatttttgtttccgaacccgaagaggcgtcatcgggagataagctttacacctttgcggataaatacttaaaggatggaaatcgtccgcgcgcgggcggaaaacgcggcggcggggcggcggtcctttccgacgaaacgagggaaaatatccgttcttatacgaggacattatataagcgcatgaatctgaaagggattgtccgcatggactttttgttgggcgaaggaaaaatttacctcggagaagtcaataccgttcccggttccttggcttattatcttttttgcgaacgggtttccgacgcaaaaaatctcttctccgatctgatagaagacgctgtcaagagcgccgaggcggagaaaaagcacgtcatatccacgggaatcttacagacggtgtccgtgcggggaaaaagccgcggcgtgaggctttgagcgggtatagaagagtctacgcttttataaaattgagaatgttttttagcggatttagacaaacgcgctaaaaggaaaaaagagcgaaagaggcataaataaacaggcggagcgtttttcagacgccccgtctttcttagaaacggaggaacgttgccgaaaactctttcggcaacagtttaaactcacgcgatgcgtatcaccatcatagaagcgttgacgttcggccccgccccgcctactcccgtggcaagggtaacggttgcgcctgtaaaattgacgagggcaagcgtactgttcgcgggcgcttcgacaatggcaaagcctcccgtgatggaacggacggcggagcccgcggctcccggagaagttccgaaaatagtgcctgcgacgctcgtatcgtttaaaaataatgcaaattgcgcgtccgccgtccccatcatggtaaaccataccgcataggtgcccgcgttttctatcgtaacggcgttcccgtttacgggatgagtcattccgtcggaaagaactccgttggaggagaaaagaatcggcgcgcttgccgccaccgtctgacggccgtcgttatatacatacgcgtaagcggacggtatcgtcggggtcggcgtgggctcgcccgcctgtattacggttttgtagaaaatggggcagcaggactgcgggcattgcggcggacagggaggacaacaaggaatacatccgcagtcgacttgtccgaaacattgttcttttttggaagtttcgaaggattttttcataagtgaagaacctctttaagaaaaattcggccgaagcggaaaaatcgttttttcctgtttcggcttagtttattatatgcggacgagaaagcgttgcgtgtaaataggggaaagcgcgtgatatagaggaaaacgagcgggaaagaaaaagggacgaaaagaggggcaaaaaaacaagaaaacgcgaagagaggaaatcgggagcggaaaaacagagggaatttagagccgcaaacgcgaagcgaagaggagcgtgaaaattaaggggcgcgggcggagaacaaacgcgcggggaaggcggtgcgaagagaggaaaaaggacaagccatgcgaaaaatggatggtaagaagggataaggcatgagaaaaacgaaaaccgcgcaaaaaggacggaaaagcgctgcgaagaatgcaaaacaacgaaaaggcgaaaaacgccttgcgttgattgcggcgtttgtttgaccgcgagaaaaaaataagttgactttcgtgtgacaggcagttccttttttcgcaaaaaatatggatcatccgattttttgacccgacggaaaacaattgcgccgggaagacaagaaagattttcccgcggtcccgtaaatcattgcttttttcgcgtcgttttgctatacttaataggacgaaaattgagcggcggcgcatactgttatgggacggaaggaaaagaagcgcgagaaaaaagcatggattcctcttctttccaaaaacgcaaaaacctgacgtatgcggaatgtaagacgtttgcttttgcaaaagcagacgttgcggcttaaaaaagacaaagggaaaactatggcaaacggcgaatttaccgataaagtaaaaattttgatcaaggcaggcaacggcggcgacgggatgaactcctttaaggcctttaagggaaaacccgcgtgcggtccggacggcggcgacgggggacggggcggcgacgtctattttgtgggggacaaagacatgagcgacttgttctccttccgtttcacgtccaaatttttcgcggaggacggcgagcgcggcggcacgaatcaatgcttcggcaagggcggcaagaacgtgtatattgccgtacctctcggtaccctcgtgcgcgacgcggaaacgggcaggctaatctgcgacgtcttcgaggacgggcagcaggtactcgtcgcccgcggcggcaacggcggcaaggggaacgtgcgctttaccacggcgcggcggcacgcgcctaattttgcccaaaagggcgaaaaggtcaagcagcattccgtcgttctcgaaatgaaagtgatcgcggacgtgggattggtgggattccccaacgtcggaaaaagcacgcttttgagcaaaatctccgctgccagacccaaaatcgccaattatcatttcaccacgctctctcccaatctcggcgtggtgcgctattacgataaatcttttgtggcggcggatatcccggggctcatcgaaggcgcggcggaaggcgcgggactcggacacgactttttaaggcacatcgaacggactcggatgctctgtcacgtcgtggatgtttcgggctgcgaggggcgcgaccccgtagacgatttcaagaaaatcaacgacgaattgaagaattacagcgaaacgctcgcttccttgccgcaaatcatcgtctgcaataaatgcgatattttcggcgccgaggaaaatttaaaaacgtttcggaaaaaatacgggcgcaagtataaaatcttcccgatcactgccgtcacgggcgaggggacgcgggaattgatcgaggggattttcgacgtgctcaaagacctgccccccgtggaacccgtccgtcccgacgaggaattcgaatacaccgccaacgacaatctcgatttcgagatctatcgggacgaaaacggcgtgttcgtcgtcgtgggaggacttgtggatatgctttgccgcaacgtcgttttgaacaatcccgattccatgctgtattttcaaaaagttctgcgcctgcgcggagtgattaagaaattaaacgaaatgggctgtcgggaaggagataccgtttctatcggcgacgtggaattcgattttgtgccgtaaaatctcggcattgctgccgtcctaaaaaactgccgcttttttgcgcttcgttttcctttccgcctctttttgacggatgaaaacaagaggtcggggaagaggaaaagcggaccttttttcttcggggcatcccgtgggaaaaaaattcccgcttctcgttttaagagaacaagtattctcttttgacgatagcttgggagaaaggaacgggaaagcgaacttcctttgcctcgggggtaagaggggtgcggtgaaggcttaaaaatgaaaagaaagatacgaaagagaaaattatggaacagggattgaaagcatttttttacgattataaatattatttgttgcccgacgactgcgcggacacggaagacgtcaaaaagatttcgtcgggagaatttcggcgcctgaaagaagaaaaatgtatggctcccgattttgtttacgaagcaatcgaaacggaatttctttccatcgaagcgcccgaacgggtctttcccgtgaatgtcaatctttattcgcggcaggaatacgacggtattctcgcaaaacaggtggaaaagcggtgccccggctgcgcccgctacacggacgacggctccgaggaactcaacgggcatcatcgggaattatccctcgcgggagtttgttattcccgcgaggaagaggactctcctctgccgtttgcaagagccgccgtctatttttgggagatcatctcgcgttccatcaacgagctggctgaaatgacggacaagggggatcagaagggcatcaacaagcttctcaatcgcacgctgtcccgattctttttgccgctcgatttttacgggggcgtggaagacggaaaatattgcttatgtatgagcggcgacgactatcccattcagggggtgcgcgcgatcgtcaaaatgctctccgatacggcgaatcacgccggttccgccatggacaaagcggggtggaaggtatatccctattttcccaagggaatttacgtccccaagcttcgtcccgactatttccggcatccgcctaaaattttctgctcggaaggcgacggaggcgtggagatcgtcttttacgaaaagggcgcggaatcgtggggggaaaagaaaacggcgggcaggaagcgcgcgttatatcggtatctctgccactatgcgggagaaaatctgctgctcgccgcgagttcgtcgatcgccgtcgcggaaaaattacctgcggacaagcaagaaatctgcgtcgaggacctcgcggaacttttacaaaagcgggcgacggaaatgttcgaagaggggattcccttcccctcccccgtctattttcagacggagggcataggggaaaacgcgctgccgtttaaggaagaaacgcggacctggatgaccgtctgttgtgaaatgacgcccgaacaaccgacggagaagcgggaattcgacaataccatcttcgagccgttcgggatcgtctatgcctatatttatctccccggacattttttagacggattggacgcttggaaaaaagaagtctgggattggtatttttatcatgcggaggaataccccgagccgattgtgcgaaaggaagattgggagagttttgcaaagaacgtcgggatcacattcgccccgaagggaatctgcaccgactgcatggtgtttgacgaacaggaatttttccgtattttaaaacatctggcgcccgttttggaaggattgagcgcaaagatcgtcaccgttaaaaaagacggcgttctcgcatacgatcccggttatgtgattcgtcccgaagattccgggctttgcagctgaaaaatataaaaagcgcggggcagggttgaggcgagcctttttcttcctttcagcgaaagaggaaaacaggcaaaagccgcaaagaggaaacggcgaaagaaaagacggccgtagacaaaaagcaagttcctaagggaaaagaccgatgcagacgtaaatgcggcagataggtgggctttttcaggaaagggacgcacatggcggcgggcggctatcccggataggaaagaaggaaaatcggtttcttcaaaaaagaaaacaggcaaaaatcgcggagcgccctgagagaaagacggataaaagcgcgagcgtaaggcttgaaagcgaataagagcctgcggaaaacatagttgaaaaaggagcatggataatatgacggataccattaccagcaaacaaagaagcaaattaaaagcgatcgcttcaaatttacagcccgtgacgcaaatcgggaaaggaggcgtcaccgacaatcttttaaagacgctttccgacgctttggaagcgcatgagatcatcaaagtgacgattttgcctgcggcgggggaggaaacggaaaatcttgccgagaacgtcgcggagcttttagaggccgttcccgtcgccgtcatcgggcgcaaggcaattttttatcggcgctcctcccgcgaaaatttcgtccacctcgaattttaaggttttaagaaaaggctttttgcgttttgtgtttaaaaaagcgaaaatcgttttataaatatagcgtgaaataaaggaaaggtgtgttagtcatgaatgattttgaaaacgaaaagaattttgagaatacagagccggaggtaaaaaacacggacgcgcccgaagaaaacggcgcctccgatcctgttttggaagaaaaagccgcgtgtgaaaatgcgtcttgccccgagaaggaacaagaggcggaggatgcggaacaaaaagcgggagaaggctcagaggaggaatcgttgaagagcggaaaggaacaggaggaaaaagagcgctcctgtaaggaaggaaaggaaaaaggtcattgtcaccgcgagctgcaaaaagcgcgcgaggagatagaaaaattgagggcggaaggggaagaactgaaacgaaaatggtattccgtcaccgccgaatacgaaaactatcgtcgccgcacgcagaatcaggcggcgcaaaagtacacggaaggcagaagcgacgtcgtcgccgcccttttccccatcggggacaacctcgaacgggctcttgccgcctgtgccgacgaaaagacgcgcgagggcgtggagatgattctcaaaagctataaaaagctgctggaaagcgagaatgtggaggaactcgatcctaccggacagtcgtttgatcccgcagtgtcggaggcgatcatggcggtccccgcggaagagggcgaggaagccggcgtagtcaagcaggtatacgtcaagggctataagcgcggcgacaaggttttacggtacgcgcaggtcattgtcactcaataagatttattcggccgagcgcgctgtttatctggcgttcggccgatttttttagaccggcgctatcgaccactctgctatcttttcatcgataaaattataatcggcagaaaaccgcgcgccgcccttttcgcatcctgcaatttttcctcgtcaatctcgccgcaatccaggcttttccaaaaagtcgaaaccgactgtttttcctgtttttcaggacaaaggggaccagggttgagatgaaataaacggtttacggaaaattggaggcgcgtgaaaaaatttcgacgcggtaaagactcgcggggattcttaaaaaagttcttaaatttttccctaaacgggagtgcgtcgtcttttgcagaataggcgcgattttctaatcgattgggaaatgcgggagaaatttggcgaaaatgccgattgaaaaatcggaaaaattataaaaaattcgggaggacatttcaatgaaggggatcgacaaggtctatgagttcttgaaaaagtgcggcacatattatttagcgacggcggacggcaatcagccccgcgtccgtcccttcggcacaatcgacctgttcggggggaaactgtatatccaaacgggaaaaagcaaagaggtatcccgtcggatgaagcaaaatccgcggatagaaatttgcgcccttttgggcgaaagttggctgcggatcgccgcggacgccgtagaggacgacgatcgggaagctcgcgtacatatgctggacgcctatccctccctcaaagccctgtatgcgcccgacgacggcaacacgcaggtgttttatcttaaaaacgtcgaggcaacgttctcttcttttaccgccgctcccgaaacgtatcgtttttgatgaaaattttatatcggaaatcggtggcaaaataaaagccccgcacaatagcgcgagagccttttaaagttatataaatatagtgttacagaaaaggaatggggggaacgctgtcataaaggatacggaaaagggagcggcgacgattcaaaaaaacgttggaatatcgacaggaagacgatgagaaaggaaaagtcgcgtgcggcgatcggcgaaagcgtacgcaaaatctctgccgtttttagtgccgatcaacatccctcgatgccgaaaagttcgttcggggtgatgctgaaatgcgtataaaacgccagaatattctcgtaagagggcttctttttgccgcgaagccattgtcctacggtggtttggttgacgcataactcttttgctaatccttcttggctcaaattgcgctcaatcatcaattgctttattacttcactatatgtcatcatcggtaagaggcgtttcgccgatttcatcggcgacggaaaattggagaaacttttttcagttaccattttaccaaattttggaatttttgacttgacataagtcaaaagacctgatataatataataattgagaaacggctatccgatattcgtcggagtggcaagtcggatatgttatgagaataccaaaacggtcatctgcgcctttaaaagaatcttatcggcggcagtttgcaaaaaatcgtgaaaatttatattgttcatacacgaagttcattggtttatagaaaaaacacacgggaaattttcgccgtgtgttttttcgtcgttaagagggtagtttgtgaaaaagacggaagaaagcgggcgctcgtcggaaaaggaatgagaaaacgagggggatagaaaaatcgaaaaaggcagtttcggagaagaacagggaaatggggaaggagggtttgggcgaggagcatagggaaacgagaaatagcatttggaaaaagaagaaaggagtcgtcgttttagaaaagcagaaaaagataaaaaacgggaaaaataagagtcgaggaagaagaaagggaacgaaaaaacagaaggcgaaggaggaaagggagaaaaacattcgggaaaagcatacgaaaaggagaaaaagggaaaaacgagcgagtcaaatgtcagcgcggaagggggaaaagcggagcggaatttgacggaggaacggcaagagaaaagcaaacgcgaagccggggaacaaatacgaggcgctttcaatcgagcgtccaaaaaatccgtcagatcctttccgccgtttctttaaaaactcaggataaccatggaaggaccgaagacaggaaaaaagaaaatttataaatttgacaggaaaaatttttatcgtttttgtttaagaatttggacggtgggttacatataaattgtaaatcaagcgcggcgtttcaaaggccgccgtatacatcgaaaaaaacagtgtttaaggagtgaaatagaagcgttatggcaggtaaagtaatcggtatcgacttaggtacgacaaattcgtgcgtggcagtgatggaaggcggcgagcccgtcgttatcaccaatgcggaaggagccagaactaccccttccgtagtatctttccaaaaggacggctcccgcgtcgtcggacaggcggcaaaacgtcaggctgtcgcaaaccccgacaagaccgttatctccattaaaaggcatatgggatccgactataaagtaaaaatcgacgataaatcttattccccgcaggaaatttccgcaatgattctcactaagctcaaagcggacgcggaggcatatctcggaacgaaagtgacggaggcggtcatcacctgccccgcttacttttccgacagtcagcgtcaggcgaccaaggacgcgggcaagatcgcgggactcaacgttctgagaatcatcaacgagccgacggcggcggcgctcgcttacgggctcgataaagacaagggcggcaaagtcatgatctacgacctcggcggcggtacgttcgacgtttccatccttgaaatttccgacggcgttttcgaagtgctcgccacgaacggcgacacgcggctgggcggcgacgactgggacaacaagatcatcgaatatctcgtagacgagttcaagaaatcccacgccatcgacttgtctaaggacaagatggcgatgcagagattgaaggaagctgccgaaaaagccaagatagagctttcgggcatgaattccaccaatatcaatctgcccttcatctccatgagcgcagagggacctcagcatctcgacgtcaatctgaccaaacaaaaattcgaggcgatgaccgcggatcttttgaacaggaccgtggagccgatgcggcttgccatgaaagacgcgggactttcctacaaagacatcgacaaagtcatccttgtgggcggctccacccgtatgcccgcggtggtcgaaaaagtgcgcgaagtgacgggcaaggaacctttcaagggcatcaaccccgacgagtgcgtggcgatcggcgcggcggtgcagggcggcgttttgacgggcgaagtcaaggacgttctccttctcgacgtcaccccgctttctctgggcatcgaaaccctcggcggcgtgtttacgagaatcatcgacagaaataccacgatccccgtcaaaaagagccaggtgttctccacggcggcggacaatcagacgagcgtggacattcacgttttgcagggcgagcgggaattctgcaaggacaacaagactctcggcaatttcatgctgacgggtatcgctcccgccccccgcggcattccgcagatcgaagtgactttcgacatagacgcgaacggcatcgtgcacgtgacggcgcaggataagggcacgggcaagtctacggacatcaccattacttcctccaccaatctttccgaggacgaaattgacaaggccgtgaaagacgccgagaaattcgccgaagaggacaagaagagaaaggaaaaggtggacaataagaacaaactggacggcatgattttctctgtcgagcagacaatcaaagattcgggcgacaagctggatgaaaacgacaagacggctttgcagagcgccgtggacgccgccaaaaaggatttggaatcggatgacgacgacaagatcaaagcggcttacgacactctgatgaattccgtgcagcccattttcgccaagctgtatcaggcgaacggcggtcagccgggacccgacgcgggcggagccggagcgggcgagggtgataccgaattccatcagtaacgcggaaaaagcggagccgatttcgggtacaaatttaaaaaaagagtacccaaggttgagccgaatgccaaaaggcgaatgaaaacggttgtccgcaatgcgaataaagcgaatcgggtttggcgaaccgtatggcgtattggaagccgcgcagagtttttctcggtgcggttttcgggcgtttccgctttgacgtcgtttgttcccgcttcttcgaattttaaaattccttattcccaagcgagagcgggaagtttgaatggagttcgttcggacaaggcgcgagagcggatacaggaatgcgtttgaaggacgaatcgcgcgttataacgaaaaatcaggctaaaatgcggaagtcttgcgatgagctcacgtttggatgcgtcggcgttatgcgcgtttggcggggaaactcgacgagcgggaaaaggaaatagagagagtcgttgacgatttattaggatcaaaacaaatttcgagtctttattcgcgcggcggcgaaagacggaatttgacgagagcaaaaaggcattaaaaaggatatttacggagcacacagaattatggcagaggcgaaaaagaattattatgagattttgggcgtcgacaagaaagcgagcgcggaagagataaagtcggcgtacagaaagctcgccaaacagtaccaccccgatctgcaccccggggacgcgacggctgcggaaaaatttaaggaaatcaacgaagcgaacgagattctttccgattcccaaaagcgcgccgcttacgactacgagctggaacatcccggtatgggaggcatgggcggcttcgagggcggtttcggggatttttcggatatattcagttcgattttcggaggcggtttcggcggtttcggaggcggcgcgcgttcggcgcagtcgagcgtcggggaagatatacagcgcgaaatgacgctgagctttatggacgcggcaaagggctgcacgaagaccttttcctatatgcgcaacgaaccctgcgcctcctgtaaaggcacgggcgcgcggggcggcaccgcgtacagcacctgttcccgctgcggcggcaaaggcgtcgtgcagacggtgcaaaataccatgttcggacgcaccatccgccagggggtatgccccgattgcggcggcacggggcgcgtgattaccgataaatgtcccgaatgcaaggggaaagggtccgtgcgcaaagaaacgacgctcaccctgaatattcccgcgggcgtcgatacgaacagttatatgaaaaagaagggatacggtcaggcggcgcagggcggcggacaggcgggcgatctcatcgtcgtattcaaagtggagccgcataagatctttgtccgcaacggattcgatttgcaggtggatctgccgatctcctttaagaccgccgcgctcggcgggaccgtcaaggtgccttctatcgacgatactttcgatttcactatccccgaagggactcaaaacgggcagatttttaccgtgcgcggcaagggaatccgctcggcgcggggcagtacgggcaatcttgtcctccgtgtactggtggaagtgccgacgagattgactcgggagcagaagcgggagatcgaggaactggacaaggacatcgatttgaaacagtacgacaaaatgaggaaatattcggacaacgtggagagtttctacggaaaaaagccctattgaggagtatgaaacgtatcgataaaaagcgcttttgcgggtgtcgcaaaagcgctttttccgtgagaaaattcgcggaagggggaaagaaaaggcggggaacggagcggaaaggcgaatgagggacggggaaagaaacggtgggagaaagagagaaaactcttagagggcggagcgggagaacatagagaaaagaaaatgcggggagaaagagtcgaatgataaaggaaaaacctcttgccgttttggaaagacgccttccgtataagcaagaggttttttcgtaaaatttttcaacgggcatctttgtcggccgcgatcggaaagggaagcccgcagagaaaacagattttttccatttcgtaaggcggtataaagagctcaaattcttcgtcgccgtgcttgatcgtcataatataaggcttcataaaaacggtgccgtaagcgttgacggagaggcggtactgtttgaagcatttatccgtcggctcctgcattttgttccagcccgtcgccatgattcgctttttcccttgttccacgcggacgatctcggaaacgggtatgccgtatacgtcttgaaaatcggagatgcagaacattccgtcttcgaaaaagacctgcgtttcgatgagtacataatcggcgaacagcgaagtgcggatcttcgtttttccgtttttttccttatacataaaagtcaaaacatccgtcggcaacgtttgggcgggcagacggagttcctttgccgcgtcttcattggcggacatcgcctgttcgagaagggcgttcgtctggggctgcgcctttttctcccgccgcttcttgcaaaggaacaaacagagcgccgctacgccgcttattccccctgcgacgaggagcccgggcgcgttatgccaggccgtcttgggacccgcgcgtaagacggacaccactaccactacaaaaaggaatgcgcagagaaattcgacgatggtgagccaaacgggaagagaagattttttctctaactgttcgaacagcttggaatgcgcttcggaagcgtcctgctgctcctttgcgacggaacggatgacaaacggctgaccgtcgagcgtttgcgagtcctgattggaaccgaaaatatttttcatctctcttctccctcttttctttcatgatgataaatatgtatatgtctgaaaggctggaaaatgtctgcaaccgctgcgccttccgccttttcgattttattataccccttttcgaacgcaaagtcaaggaaagttaaaaacgaaaagcgtacggggaaaatgcgccgaagcttttgttgcggcttttgtaaaattatagggccgaggacttgaaaaaatcgggcgttgatgatataatgtctgcaagaggtagtattatgaaatttatcgaacttaccgtacacaccaccacggaagcgagcgagatcatcgccgacattatgtggaattatacgaattacggcgtcacgatttgcgactctgctgatattatcgctttacagagggacaaagaaagcatctattgggattatatggacgacgatgtgaccgaaacggcgcccaaagacgttttggtgaaatgctatgtggcgaaagagattgccgaagaaacgtttaaaaacttgatgaaagatatttttgatgcgaaagaaaggagcggcggctgtcttccgttcggatctttggaggatacgaaaagggaagtggacggcgacgattggatagacgtgtggaaaaaacatttccgtcccattcatttggggcgtatcgtcgtggtgcccgagtggattgcctatcggcctttacaggaagagaaagtcgttctgctcgattcgaatatggcgttcgggacgggcgagcacgaaacgacttccatgtgcgtggaactcatgcaggattatgtgacgcccgattccgtctgtatcgacgtggggtgcggcagcggtattttgggcatttgcgcgatcaagctcggagcgaaaaaagcctatctcaccgacatcgattacgtggccgtgacgagcgcaacgcacaacagcaagctcaacggcaccgaggaaaaaacggtcgtggcgcattctaatcttctcgacgacgccgatattcaaggggacgtcatgatggcgaatatcacgggtgaaattttgaaaatgctggcgccctccattcccaaaaatttgaagcgcgacggcgtgctcattttgagcggcatcatcgaaagccgtctggatatggtgaaatccgcctatgaagaggtggggatgcgcgtcgtcaaagagcggcgcaagggcgaatggtttgctttggtattaaagcataaagaggcgtaatgatgtccgcacccaagagattttttgtcgaacgcatcgaggaggaaaccctcctcgaaggggaagaattcgaacacgcgaaaaacgttttaaggctggcggtcggggacgaagtcgtgcttctggacaacagcggcaaggaatacgccgccgtcatcgccgccgtggaaaaacggaacatgaaattacacgttttaaaagtaaacgagggggacagggaagcgacgacggatgtcgtactcctgttcggatatttgaaaaacgcggacaaaaacgaatttatcgtgcaaaaggcagtggaactcggcgtcaaaaaaatcatcgcattttcttcggaatattcttccgccttcatgaatttgaataagctggaacgattgaataagatttcccgggagtccgcgaaacaatgtcttcgttccgtcgcgccggaagtgacgtattgcgaacatttgaaagacgcgctcgcagaagtctgcgggtataaaaacaagctgttcgcctgcgagtttgcaaaaaggaacgaaacggatatttcaaaacttttcggcagcacggcgctggtggtcggaagcgaagggggattttcgggcgcggaagcggaactcgcgaaggcgctgggattttcctttatcacgctgggaaaacgcattttgcgcgcggaaaccgccgcgacggcgcttacggcgatcgccatgttttcgctgggagagctgggagagtcggaagaaaaagacaatcggataaaaaagccgggcgcaggggcggaataaatgaaaaaagagcgaaagaaaagggatgaaaaaggcggggaacggaagggaaaagaggaaaaaagaagcgggaggaaggaatatgaatatatcggcggaaatttttaaggcaaaagacggagcggaggagagcggaaaaagaatatgaaagctgtcgtttttacgctgggatgcaaggtcaacgacgtagagagcggctcgctgatacgcgggctggaaaatttgggctatactgtgtcgagagagctcgaaagcgcggatttatacatcatcaacacctgtgccgtcaccgccgaagccgaacacaagagccgacaggcgatctccaaggctttaaaattcaatcccgccgcgaaggtgctggtgtgcgggtgcgcttccgaaaaaaatcccgctccctttgccgcgcggaaacaagtgatttccgtcacgggcgcgaagcggaaaggaaagatcctcgaaatggcggcggcggggttttcggattctgtctgcggcgtgcgaatcgaagacggaaacgacgttttcgaggaattgccgacgcccgaatgtctgaaaacgagaaatttcgtcaaaatacaggacggctgcaaccgtttttgttcctactgcgtcattccttatctgcggggcaggagccgttcgagaagcgtggaaagcgcggcaaaggagattttggaaagcagcgcgcaggaaaccgtggtgacgggcatcgatatttcctcctatcgcgacgaaaacggcggggaccttgcggcgctgatgctcgccgtcaaagaggcggaaacgcgcatacgccttggctccctggaagtcagtctgatcgacgagcgatttttggacgccgtaaaacaggtgaagcggtttgcgccgcagtttcatctgtctttacagagcggctcgaatagggtgctcaaagcgatgaacaggcactatacgagagaggaatatctcgaaaaatgcgcgcttatctacgaatatttcccgaacgccgccgtcacgaccgatattatcgtcggctttcccgtcgaaacggaggaggacttttgcgattccctgagcattgtggacacggtgggattcgcgcaaatacacgcttttccctattcgccgcgggaggggacgaacgcctataaaaaatataaggaacttcccttttccgtcaaaaaggaaagactggcgcggctgctcgaaaggggcgccgaacaaaagaagaagtatatggagggatttatcggaaaaacgttggaaatggtgccggaaacttggacggacggttatacggaaggatattcggaaaattacattcgcctgtatttgcagggggagatagaaaaacgccccgcccgggtatgcggcgttcggctttttagagagggcttggaagtgagatatgctccatagattaaaagggccgtctatgggaaaaagcgcaaacgattgacacggaggatcgaaaatgatggcgcctttcgcgtcgcgcgtttgttttcttgatcgattcaacagcggaactgattttaacggtcttagggatcgtttatcgcccgcgagtgtctttcttatccgatagcgacggcgggaacaatcgcttcttattgcgctattgtttagatgaaaataggatgcggagaggcgcggacggattttttaggcgcggcgattttaggggatgtttacgctttggcggcttttcaaaaagaagacgaaagcccgacggcattatttactatttcatttcgggcgtggtcggcttttattcggaaagcaggatatttcgctattcggaaatacagaaaaattttccttttactcgggcattttgtggttttgacacttttagcaacgggagccgtcgcgagcggacgtttaggaagtcgttgtccgaaagaggcgtatcttactcggagaatccttaaaagcaggataaggaagaaactccgcgaaaggggcaaatctgactgctaagaagggggcaggtatgcggcgaacggggaatttacccgaatgtttttgcggcggtcgcactgtgcaccgccgattcccgaaatggcaagaatctttttagccgcgaggagattgatttttgtcgctgcgaccctttccaagggaaattgtcaagtgcttttttcggacatattcttttgttctgttttaagaagcgctttaaaaaatcgaggtcgtcgttgcgaccgcgtctattcggtttcaaactgcgggcgaaaaagaagctttgctcggggaatcttacggattgaaaagcaagcggaaaaatgtacggcgaggagcaggaaggagagaaagagcctatataaaatttagatcgttacgaaaaattaacaatcggaaagagggaaaaagatggaagagaaagaatacagacgcacgagaaaactattgggcgtttacggggtgggaaggggatttatttttgcgtatctgataattacaagtttagcctgcgcggggatgatattcgaatttttcaatatcgacgtcggattgattgtattctggctattctccctctctttcggctatacgacgccggctttgggcattgcgttcgccgtggatatgctgcacaagagcgccgcggcgggaggtatgattcttttgttgtcgctcgcgagcgtggcggcgctatttatactttggaaaatttccggaagaagaatttgggcagcgattgtattggccgtactgtttgcactcgatctcttttctttgaagattatccgcaatccgatcgtattggaaatcgtccgcattcccgtcattcttcacgtctttgccgcgatccctcctttcgtcgcgggaatcgtcgggagcatcctgaaaaaacgctgtccaccgggaaaaataccgactctgggagaatgggacaaaatttggaacgacaatcaatgcgcgtgcgtttcgaacggccgcgaatacatagcatcgaagaggcgcggcgagtggcaaagcgaaaacgcggagcgcggcaaagaaagggcggagagtccgggaaaaagttttgaaggggaaacggggcggtataaagaggaacgaaacacggaaagcgtgaacggaggggaaaaaacgacgggagcgattcgggagaaaattttgaaagagaaagaggaaaaaacgaaaaactctgaaagcagagagggcggagagaacagggcggagcgtaaagagtaagactgcgaaaaaagaaaacggtaaaaagaaaaggaacgcaaaagattaccgatcgtcaggcataagaggcgggggggaaaaggttggcacagctctgtaaataaaaatagtagagaaaggaaaaactcggaatggaatttcgtctttcgcggctcttaatttctgtaataaaaagtttttttgaggagagaggaggaaagataggaaatagagcgaaaaaagagaagggcgtcctttttttaagtcttataccgctagtttcaattggtttatgcgtatttttcggccgtacgataagtcgtggcggtaagaaaaacggagaatgtctttataagtcatggaacggggcgaagagaaacgttgagaatcgaaaaatcaagtatttgaaaacgcggatttacgtcaagtcgaatcaataaaatcagtaaacataataaggagaaaaaaacatggaaaactgtatcttttgcaaaataatacgcggggaaattccctccgcccggtattacgaagacgacgatatgatcgtcatcaaagacatcgagccgaaggcgaaactgcattatttgtgcattcccaaggagcattttgcgctgttgtccgaaatggacgacaagaaagccgagctgttgaagcgctgctttgaaaaaatcgcggcgttgcaggaaaagctgggactggaagagggatatcgcgtcatcgtcaatcagggacaaaacggcggacagagcgtgcctcatctgcacattcatttgctcggcggagaaaagctgacgggattttaacgcggctaaaattcccctccgataggttttgtgacattttcgtgaaaatacttgacaactgtgtgggaaagagtgtatgatagtggtgttaaatgagatataaggagaaacttatggataaccaagaatacctcaaggtttcgaaagaaatcagaaactacaaaatggcgcggataaacgtcgtagcgattttagcttttacgctcatcagcttcattatgtattttgtttcggaaagctatttcttgttcagtatttttacgagcgtgttatttatcgctttgggaaaagagtatcaaaaagtacccgcaacgggagcaatggtcgcgtgtattatagtagcgattctcattctggccgtatttgtagcgttttggcttttgtccaaaaaacatagatgggccatgatcgtactgctcgtgctgtttgcgggcgattgcttggctatcattgtttctatcttgataaagttcaatgcgcaggcgattctcgatattgcgttccatgcgtggatgatgtactatttcattctcggcgtaaaagccgcggcgaatctccaaaagcatttcccgcagggagtaacgcttacacaagaacagctcaacgaggcttaccgtatggaaaacggcatcgatcccgtcacgggacagcccgttttcggtcccgacggtcagccgatcgcgccgcaaaacgtgccgcaaaacggcggggtcgcagcgtcggtcgaagaggcgcagccttgcgtgcccgcaactcccgtcggatacgatccgatgacgggagcgcctatctatgaggacagaactgtaaaggagaacgaaacgaaagaaaacgtttccgcaaagcccgattcccccgtgctgagagaggaggacgacaagcgggtgcccgctgtggaaaccgtatataagggaatgaaggtgtccgttaagatagcgcctttttcaaataaggcgagaatcgtcgtagacgggaaagtgtatgcggaacagaagttgaaactgttttcgggctcttcgttttccgcggtggtgaacgggacggaatttgggtttgagtaccttcttcacggaacggccggggagtatatcctctatgccgacggaaatatcatagcgcatcgctattgattgtcccgtccgaaatatattttttcgggcgagtggtttaattatttttatatttgtcaataatcccttccgtaaagccgaaaaggcgctgcgggagggatttttatgcgttacggagtattgcaatttttaaagggattgggagcgctgcttgccgcgctgctcgtttctttctccgtctatttgatacacgcttcttcctttacgggcggagagagcacgtattatctgtattccgcttcttcgcaggcgcaaatcaagcaagctttgtccctcgcggaccttgcgcatctcaaaggagaaagcgccgtgtacgtctttgaaaaagagcgggccgagaacgcggcgggcacgcccgtcaacgaatatgcgtcgatggaagaaacgctccccgaagcgggtgcaagcgccttcgcttttgcagaggattttatctccgcttacgatgcaaagctctgcttcgcggaagaaatcggcggcaccctctctttttattgctattcgccgcgattgaaaggcggcgtgatactcaacggccggaaaatcaatctgcatatcgccgtgcgcgcggaaagcgtcgccgtgggaactccgattattttcggaggatattgagaaaaaaacttttttcggcaagaaggcttttgtccaaatggacaaagtagtatcgttcgcaaatcaatttccgaagatcgaaaggaagaaaagcggcggaacaaaaaaatatttcggcgggcgaaaagaagtaaaaaggcaaaaggggcattgagaggcgaaaagcgggaaaagcttgacaataggcgggaaaagtttggaaaacactcaaaaaaatgagaaagggcgttagaaatagagaaaagcgggcgaaaagagcgaggataaaaaaattttccgtttccatgtataaaagataaaatccgcggcaacaatttacatacaaatacattttttcggaggattttcaaaatgaaagaagaaaatgaaaacggtaaatcgacgagcgtgaaaaataagaaattgtatctttacgtagcgctcggctgcgctgcggtattgctggcggcggcgattatcatcacttcggttgcgctggcgaatcgcaatcacattcaggtggacaactcgacgagttccagcgacaacgaacagggcggcgcgtccggcgacgagcccgttatcgacaagcccgaggaattcagcgcgccgcttgccaccgtcagcgtgctcaacgagtacggattctactacaacaagacgctgaacaactactatgtgcatacgggcgtggacttttccgcggagcagggcagcgaggtgtttgccgtggcttcgggaacgatcgaaagcgtctatacgtccgacgttctggtagggacccagatcacgatcgatcacggcaacggcttgaagtccgtttacgaattcgtgaccgcgaaagaaggactgaaagcgggggacaaggtggaaaagggcgacgtcatcgctacggttgccgaacccaacggaaaagaatacaaggacggagcgcatctgcactttgaagtattcgaaaacgggcaaaacatcgatccttccaaatatctgaccttagaagaaaaataatctccgccttttgagaaactttgtccccgtcggcggggacaggtagcataaaatccgacacgcacgcataaaataacctgctaatactttttaggggttatttttttatgaaacgctttctttgtcttttgctttccgccgtatccctcttcgctctcgcactcttttcgacaggctgtgaaaaaaataaaaatgcggcgtgcaggtatgagatcaccgcggagtacgttcccgaaaccgccactttgaccgccatgatgaaagtggagtacaagaataacacgaacgacgagatttccgcgctcaaattcaatatgtatcccaatgcctatcgggaaaacgcttcctacaaacccgtttcccccgtctattcctccgccgcttattacgacggaaaaagctacggcggcatggagatcgccagcgtggacggcgcgaagaactgggaagtgacgggagaggacgaaaatatcctctgcgcctatctcgaagattctttattccccggcgataaagtcactttggatatttgttttcttaccaaactggcgaaaataaatcaccgcacgggcgtcgcgcagaaaacggtcaatctcggaaatttctttcctattctctgcggctatgcggacggcgctttctatgaatgcgtctactattcggacggggatccctttttctccgaatgcgcttctttttcggtggcgctcaccgtgcccaaggactacgtcgttgccgccacgggaaaaatagattcggaaaagactctggaaacgaaaaaggaatataccatgtctgcgacgaacgtcagggacttcgccatcgttctgtccgactgcttcgaggtggcaaagagcaaggcgaacggcgtggaaatcaattattactattataacgacgaacagcctgcggcgcatctcgccgctgcccaggaagcgctcgcctactattcctccacattcggcgcctatccctatgccacctattcggtggtgcagactggattttgttacggcggcatggaatttccgggactggtcatgatcagcgattctctcagcgaggaaaactgcgtatacaccgtcgtgcacgaaacggcgcaccaatggtggtatgccgccgtgggcagcaatcaggtggaaaacgcctggcaggacgaaggactcacggagtattccgccgcgctcttcttcgagaagcatcccgactacggctttacccgcgaacagatcatcaaggacgctctcgaagaatatcgcgcttattacaacgtatacagccaggtgttcggcgatgcggacacccgtatgacccgttcgctcaaagattatctgagcgaatacgaatatcgcagcatcgcttacgacaaaggggcggtgatgttcgatacgctgagaaacagcatcggggataaacgcttctttgcgggccttaaacattactattcggggtataaattcaagacggcgaagccggaagatctcatcggttgttttgaaaaatcgggcgtggacgtagcgggcttcttcgattcctttttaagcgggaaagccgtcatctgacgggcggccaaaattcccgaaagccttttgggagggcgcctgccgttcgttttcgccgggcagagaaagcgaaaaagaggaagcgaggcgaacggcgggaaaaatttgaaaaattttttgcgggaaaacacttgccaaaaatgatttcggggcgtataatagaatagaaaccgaatgtcggacggcgggagaaaattcctcctgcgttcgttccgacgggaaagtttatgtgaaggagcaattatggacgctgtccccgacaaccgaagtagtatggcgacaattcaagggaacccgcagtgcgtaagacacgcagtacgatttttacggaagattaataatttgtattgaccttcgataaaggagagtacaggcgcacgggcggtttttcccgtgcgttttttcatgccttttcgggcggcgccgcgccgcgatcgtttgtcggaaagcttggaaaacttctgtattcaaattttttaaggcggtacgagtatgatcagattctacaaaaccgatgaaaatctccgcattgcacccctcgaccagttcgaacgccgctgttgggtggaaatgatcaatcccaccgacgaagaggtggaaaacatccgggacctgagcggaatccccgaagaacttttaaaagctgcgctcgacgaggaagaatccgcgcgtgtcgatacggacgagggcgccaccatgtatatcgtggacagcccgatgatggtggacaccgaggagggggatacgtacacgaccattcccgtcgccatcatctacaacaacaagtgtatcgtcaccgtgtcgctaaatccgaatcccgttcttgccaatttcagctcgaacagaagccgcgtttccaccttgaagcccgtgggatttatcctcaattttatgctggaaaacgtaaagcgcttttcctattcgctcaaacagatcgataaaaagtccctgcgcctgcaagcggagctgcacaagtccatgcggaatcaggaactcatcgaactcttgggattgcaggattcgcttgtctatttctccacctctttaagcgcgaactcctccgtttacggcaggctgtcgcgcatggaacccgtgcagtccaatcccgattatcaggatctttacgacgacgtgctcatcgaaacgaggcaggccgtggagatgtgttctatttatcgggacattttgaaaacgaccatggatgctttcagttccgtcatttccaacaacgtcaacaacgtcgtgaagcgcttgacggtgattaccattttggtggcgattcccaccctgatcgcggggcttctcggcatgaacgtagatctgcccttcggcatgggggtgcacggcagcagcggcgcatgggagttttgggtgatcctcgccatttccgtcgtgctgacggcggtgtgttccttcctgcttgcgaaaatgacggactctgtgaaaatccgcacgcccaaacaagtcaaaaagaaaaggagaagataatgcctattttacaatacaaatgcaaaagttgcggaaaaaagttcgaggaacttgtaaaatcgcataccgataaggtggtttgttccgattgcggaggcgaaacggagcgcgactattcgggcgccgtatattcttcgacggggaaaaagccctcttcctgtacgggacactgttccacctgcggcggctgtcattgaaatccttgccggacttcacgcgcgcgactatattatattaataccgtcggtctaaaattaaaatgctgttaaaggcaggaaaacacggacgcgggaataaaatacaaaaaaataaaaaaaatctttaataaagtcgaaaaaacacttgacataattttttctaagtgctattatgtataagctgtcacttaaagaggtatcctctttgatgacgacacctttcttttgaaagggattccgaagattaacaactgcatagcaaaagtaaaagtttttttctaagaagagcctgacggaagtcaggggaaagggaagaaaaagacgagtacgaaaggcaaaatttttcatattaagatgaaagaaaagctaaaaggttaataacaagcaaaaaacggaaggacaattttaaaggtctgaaaggaagctgcaaaaccgattagccgagtgaaaatcatagaatttttgtagaaaagacgagtagaaaaagatcaagctacaaagagctaacggagaatgccttggtacatggcgccgaagaaggacgtgacaagctgcgaaaag

SEQ ID NO: 1695 - DNA, 4060 bp, Unknown
  16S sequences of unknown bacteria
cggcgggcttttcggcggcaccgtttttggcggcgtcggcctgtgccttggcggccctcagcatctcggcaattctctcctgctcggcaagcttttgagccttcagcttggctttttcctcttcccttgcctttcttgaggcttcaccggttttaaaatattcgtcaaagctcttgacgctgtttttctgggtatagtgctcgaaaactatgttgagctcctcatcggtcagcgccgtcatggatttttttgtttctccggtgtatttctgaagaagatcgataacgtttttattgtttgcctcaccgagatcctttgcaacctcgctaacgcggtatttaatcatcatactgtcaatttcctccttggtttatcagttcgcttgccctttttgcaaagccttcgtcgcaaagagccaccgccccggccgaggttcctatcgcccttgaaaggctgtatttatcggccgaaatacgaacgacctctatatccttgccgttcgttttgaatttaagttccttttcggtacgctgtgccgtatcgcttgcgactattataagctttgcacggtttttctccacggcttcggagcacatttcaaacccgattgcaagattgcttcctcgccttgcaattccgagaagcccgagaagtttatcattcatttttcgaaattacctcctcgcaggcgtcgtatatcccgtcgggtatctttgccgataaggagcgggaaagtcttccggatttgcggattttttcaaggcattcggcatttttgcacacatacgcccctcttccgtttttcttaaagcttccgtcaatttccacagagccgtcggaggttctgacaattcggataagctcggatttggttttcatttctccgcatcccatacattttctcagcggaacggatttcttttctgacacttttttcgctcccttcggacaaaactccgattactcctcgccgtaaaatccgctttcggggcggatgtcgatcttccagccggtcagctttgcggcaagacgggcgttctgacccttattgccgattgcaagagaaagctgtgcgtcgggaaccgaaacgtggcaggcctttgctccgtcggggtcgacttccaccgacacgacttttgcgggggacagagattcacttataaatgcaacgggatcgtcggaatatttgacaatgtcgattttctctccgccaagctcgtcaacgattttggcaacgcgggcacccttgggaccgatacatgcgccgatggggtcgacgtcgtcgtccttggaccaaacggcgattttggtgcgggaaccggcctcgcgggaaattgacttgacctctatggtgccgtcgtaaatctcgggaacctcggtttcaaaaaggcgctttacaaggccggaatgggttctggaaatgagaattttgggacccttttcggtttctctgacgtccaccacgaatattttaaggtgctgtccctcggtgatgacctcgccgggaatctgctcggctttggggagaatggcttccttttctccgatggtgactgtggcgttgcccgaaatcgggtcgacagtctgcacaacggcggtgacaagctcctgatttttgctttggaattcctgaagagtctgtcccctctcggcgtcgcggatgccctgacggatgacgtgctttgcggtctgagcggcgatacgtccgaatttatgggtgtcaaggggaatttctatcggctcgccgagaacggcgtttttgtttatctttcttgcgtcctcaagcagcatttcggtgtcgggatcctccacctcttccacaacggtcttgcggacgaaaacgtcgaaaattctcttttcgcagtcgatattgcagaaaaccacgtccttagagccgtagtcctttttggccgacacgacgattgctccggcaatcttttcggcaagataatcgcagcttattcccttttccttttccatgagctcgagcgcctcaaagaaagcgttcagattgtcctctcttaccttttcctctttagtttttcttgccattttccaaaaacatcctttcagttatttaaaagtcggcgtcgtcaagctttaccgacgcaatttcggatttatcgaaggtcaatgtgttttccccgtcggacagcacaaggctttgcccgtcaaagctttcgagaaaaccgtagaattccttttggccctcaaaggacttgtaggttttgacaatgatgtcgcggcccttcatcagttcaaaatgctccggctcctcaagctcgcggttaagccccagggagcaaacctcgagatgataggagcggtcgatgaaatcggcgctgtcaagcggctcgtcaagagcgcgggaaaaatcctcgcagtcgttgagggtgaccccgccttccttgtcgataaagaaacggagataccattcggccccctccttgacgaatttaaccgtccagatgctcagcccgaggctttcggccgcagactttgcaagctccctcgcctttgaaacgatattcgatgatgccaaagcataaccccctaataaaatcaaaagagcgggtcgccccactcctttgtcaatagtctttttaccttaatcactataccatattatatgtaaaaaatcaagagttattataacgaattataaagacccgtgcatttgctttttggctatttttaccttgcgcgcaaaaagagcggtcaacggtaataatacagctcataaaagaatgtggaaatcaggttcataagaacgattgccccgaggcaaattcccacaatggagcagacaaatccggcgacggctattcctctgcccggctcgcccttctgataacccttcatggcctttgaaccgagcacaagaccgattatcgaaagcacgattcccgatccgacgccgcccgaaagcaaaataccgagaattccgagcacaaggcttgccgtggcgtttcctttaaagggattttgataatagggcgcgcccggaccgtaaaatccgccgaaatttctgctccgctcatagggagtctgatagggcggaatgtttgggccctgataaggcggggcttcataagggggctgattcggagggcaggcattgcagttttccccgaaaggagccgagttttgtccttcggcgttttgggaaaattcgtttccgcagtttgtgcagaatttctgcccgtcttcgcaagggtttccgcaattcgtgcaatatttcataatcattcctcgtttcaaaaaggaaagcaaagaatttttatcctttgcgggtgtttgtttatatgtttaatatatcatctgacgcctcatttttcaagtcatattttttgcacaaaatttatttcccgactgtcaattaagtattgacaaagacgtttttattggttataataaacaaaaacacaccgaaaggaagaaaaaagcaatgaaaaagttcttgtcaatactcctgtgcgtggcaatgctctgtgcagtttcggtacccgtatttgcggagggtgaaaacaccaccgaagccgtcgtttcggcaggctcggtcaccggcagcgccggagaaaccgtaacggttcccgtatccatcgaaaagaatcccggtttcggtgccatgaccgtaaccgtaacctatgacgcagaccttctgtcggtcaccgacgacaaggtcactcccggtgaagtcatcgacggcgcagttagcaccgccgacggcaccaaggcaatgtatcttgccaacaccgccgaggccggcaaaatctatatcagcgttatcaaggccgagaatgtcaccggcgacggcgttctcttcaacatcgagtttaccgctgccgcttcggcaagcggagaaaccaaggtttccgtcaccgttgacgagcttgcaaacgaatccgccgacgtctacaccggatacaccgctgccgagggcaccgttacttttgaaagtgccttcaaatacggcgatgttgacggcgacggagaagttaccgttaccgacgctcttatggttcttcagcactcggtcggcaaaatagtcctcgccgac

SEQ ID NO: 1696 - DNA, 14646 bp, Unknown
  16S sequences of unknown bacteria
acccgctctacctcatctatacctccggctccaccggcgtacccaagggcgttttaaagacccacggcgcgatgcaaagctatatcgccgcctttaccgcccgctatcctgccaccccagcagactcgctgggcaaccagacgccgtttttcttcgacgcctcagccaaggacctttactggatgctccacgacggctgccgcctggaggtcctggacaccgggctgttctcgcagccgtaccacctgatcgaatatctcaacgaccggcacatcaccctgatctcctgggtgccgtcggcgctggtaatcgtctcacagctggatacctttgcggatatcctgccaaactacctgcgggccgtctttttcatcggcgaggttttcccgatgaagcattttttgatctggcaaaacgcgctgccgggggtgaaattcgtcaatctctacggccagtcggagctggccggggcctgctgctattatgaagtcgaccgggcgtttaccccggacgataccctgcccatcggccgccctttttccaatgcggaggtcttcctcctggacggcgaccgggtcgttacagagcccggccagatcggcgagatcggcatcgtctcccctgctctggccgccgggtatttcggcgacgcggagaagacggcggcggcgttctgcaccttctgcgaccacgggcgcaccctgcggctcttccgcaccggcgatatggcccgctacaccccggaggggctcctcgtcttcgccgcccggtgcgacgctcagatcaagcacatgggctaccggatcgagctgggggagatcgaagcggcggcaaacagtctgccggagatcaccggctgcgcctgtttgtacgacacggcgaaaaaccgcatcgtcctcttctgcaccgtgcaagacggcgtgacaaaggccagcctgcgcaaggccctgcgggagaagctctccacctatatgatcccctcaaaaattgaaatcctgccgcagctgccccgcaatgccaacggcaaaacggaccgggtcctgctgcgcacgctattaccgtaacaccgaaaggagccaataccatggaagaattactggaagttctgcgggatatccgcgacgacatcgactatgaaacggaagacaatctgatcgacggcaaggtcctcgattcctttgagatcgtcaccctcgtctcggagatctccgatacgttcgacatcaccatcagcgccaaatatctggtgccggagcacttcaactccgccaaggccatgtgggatatgatctgcgccatccgcgccgaagatgaataatgcataaaaacaagaaaagccacgccgcagtgccgtttgatacggcagctgcggcgcgatttttatataccatttccaggggacagcccgcgctgctgggcgacggtctttgcctcgctgcggcgcttgacgcctagcttttgcaggatatggctgacatgggtcttgaccgtggccagcttgatatccaggatctggccgatctcggcattgctgcggtcggcgcacaaaaggcgcagcacctgctgctccgtcgccgtcagcgccgcggccggggcgtcccgcgtctgcaggtagtcaggataataggccgcctgaatgcgggccgcaccaaggacggcctgcaaaaaggccgcatccttcacccaatcgcatttttccaatagcggcaagatcgccgcgccgaagctgctgaccggacggatgtagtgatacgtcgccgcgatatccagcgcctcctgcagcgccgcccgccagtccggctcccgccgggccgcataggcgattgcccgcagcagcagaagctgtagcagatccaaatggcgctcgcagcggcggaaatagttttccagcggcgccagggtcagcagggcatccgtcggttgccccagattgatctccaccatagcctgggtcaggtactgatagcgcttcatgacgtaaagatgcaccgggtcacgaggtgcactggcgcggtaccactgggttgccgtctccagttcgcccaaatagagcgcgattcggcagagcattgcatccagattcggcaaaaagcgcgtctgtcccagctcgataaaccggaggcggagggattccagcgtactcttcgcattgcccgcctgcccggcggccacctggctgcgggccagcagaccgagggtagcaaattcaatatccggcgttcccgtgcgctggatttcattcagccgagccatcagggccagcatccgggcagtgatatccgccccctgctcaaacttgctctccgcgatggcgcagtccgccaaaccgacgctgtcgcgccccaccgccgcctccaccggcagtcgcaatgtgcggtagagtgcatcgtctttttttgtccaagcagaaaaatcctttccgccgttgagcaggcttggcagggcgcttgtcacagagaggggcggcaaagcaatctcccggctggccagcaactttgccaagcgaagaaatgtctctaccaggctatcgacgccgcgctgcggcagggaaatacccaaccatgccaggcggctgcgcgcctccttgcaggcctcatccgaccgctttcgccgggcggcaaacgtttccagctcccggtaccagcgctcggacgcatcatagtccatctccagggcgcataggatactcatcgactgcatcagcactggcgaggccaaaatctcctgctccggcagggcgtgataatactgggccatctcataataatgccccatccccgggtgcagctgtgcgtttttgatcaacagctcagagatgcgctgatggtcgccgctcattttatagcaggccagggcattgctgtagtcctcctgcagctcatagtaaaggccgccgcggttataaatttttttgcactgctccgccgtatacgtccggtccagctcccacatcaaatactcccgtaaaataaaccagaagtgatacttcgctacaccgtcatactgcagcatactggtattgctctgcagccaccccagcagctctccggcccggggattgccgctggcgattcgcgctagttcaacgtcaaaaacctcaaatggggcaagctccagcaaaaacactcgcagctccaaggaaaggcggtgatagaccgcctcttcataatacgcaaacaattcccggcgaatcgctgcatccatctgcgcgtcgtactgtgctccgtcctgcaggtggcgtactgccagcacaagagccaatgggtagcccatgctttcccgcagcaacgtcttcagctccagttccgacacctgcacaccataggctgccaacagttcccctacccgttcccgatccagcaggagtgactgcgcgttgaaaatctgtaccagcccggcaaactggaacgaaattaaccagccgggcgccgtcccgcgagagagcaggacgaagcgcttgctcggattttcccgaatcaaggtacagagtgcctgctggtccgccggttcctggagcgcctggagttgatccaacagcaaaacgtcccaattctctgcccccgttggcagcgcaaaatccggcgcgtcggcagacaggacacatacctgccatccggccagcaaaacctgcgccgtgacgctcttgccaaagccgcagggagcagtaaacagtaccacccgtccattttccatcgcagcaaagaactggtctgccaactccggtcgaattacgatcggttctttcattgccattttctatctcctttttcccactgacatcacgattccatttccccaaagcagcgtgtcgatctcattctttcgtattatagcgaatctaaaaaaaatgtaaatcccaaactgggcaaattcttcgatttgcttgacttttttgtcatattttcttatagtgaatggtagaaattgacaagaaaaggcaggcaagtttatggaggttttgtcccgctaccaggtgctgcccagggaagggccgctgccgtggttctccggcagcccgatgcaactgcatacggttcagctggtgctggatcagctctccgggcgggtcctgctccagattctggcgcaaaatatgacggaccagcccatgaagtccgtctgcctccgcatcacctgccgggacgccgctgggacagttctgcaggaattccccgcggtgctgctgaaaaacatctacgccgcccctcacgggacgtttcataaccggcagaatctctatcttcctaccggtaccgccagctgcgacctgctccctgagcgagtatttttccaggacggccaggtctgggaccggcccgactatctgcagggccaattactgccgcctcccacgcctgtcgaccccgacgcatcggacgccgccgcactgcagcaggctgcccagcgggcgggctatcacagcgactattattacgaagagcataacgatttctggtattgcagctgtgggcaggccaatcccattgccgccatgtactgcggccggtgctgcgcaccccgcagctggctacaggccaatgcccgccatattgccgcccgtcggcccgcgccccggccagatctgcaagaatattttggccgtagccccggccagtatcagccggtactgccaacgccgccccaggaacagctggtctgcgacccgcacaccggcgagctgctcccgctggaggagtataacagcctgatgcgggcgatgtactaccaaaagcaggacacgccgcctcccgctccgccccggcgcagtcataccggctggatcgtcgcgctggtgctgctctgcctggcggctgccgccgtatttctcatcctgcccaagacccagtatggccgctaccagaaggccgtcagccagatggaagccgggcagtatgacgaagcctacgcggcgtttctcgccctgggggattacgacggcgctgccaaccaggctacctcctgccgctattaccaggcccagcgcctgtatgaagccgccgattgggcggcggcgggcgcgatcttcgaatccctgggcgactaccgcaaaagcccctcgctggcagcggactgccaataccgccaagcgctggacgcaatggcccaggcgtcctatgaagatgccatcgactttttgacaaaagcccagtccctggatgagagcaatacgctctacgagcagaagctgctggaatgctattacgagctcggcgtcgccgctgaggacgacggcgatgacgaagcggccatccgctggtacgagcagtgcccagactatcaggacgccgctgcgcggcaggacgcctgcgaggcccggctgcgcggcagcggtagcattacagatgggacatctggcaacaccggccttgcccaggatgggcagacccagttcggcggccagacagacgccgctgcgggcaaatccaatgaagaaatgtacgcctatgtcaccagccaccgccagcgggaggacgcgacaacggcggcgtatctcgccctgctgagccaagccaattaccgcgacagccagcagatctaccagtctctctacgcctggaaagtggagattttctttaatgccgaagccagcgacctaacgacccgcctggagacagccaccgccgcgcagacgctctatgcccattatatcgtctccggtggcccgctgaacggctcgctgcagctgaaatatacctatcgcaagcccaatggcgcgacgggcgaaaaggtgctcaccggcacctgcgccagcggaagcaccggcaatatcttctggcggggcggcatctatgccgagacggagcagcagcaagccgggacgatgcaggtcagctattacgacgcccagaccggcacgcagctctgcaccggctcgatcgccatcacactgcccacgagcgtgcagacaaagccctagaaaaactgctggacaaaaccccgttttgtggtatgatataagtagtttttggtacggcagctcatttgccgcaatgtggagcagcaggaggaatctatgaatactgacagctatccccgtttatttaaactgatccgcgagtgcgcccagacgacagaccggcttcccccggaagacgtgctagcccagcagcttgggatcagccgtgtcaagctgcgcgatatgctggcaacactgcaagccaatggctatatcagccgcaaaaagggcatcggcaccctcatcaacaagcacatgctggctgaaacggcccgcctggatatggatactgtttatgaggagatgatctccgagtccggccatatcccctccatgctggtacagaagatcaagctcgtctccgatattccccaggagatccgtgaccggctgcagctcgccccggaggacaccgcctacctgatcgaaaaaaccgcctttgccgacgatatccccgcgatcttcaccatcgactatatcccggccaagtattatgatgaatcagacctggatatccggctcatcgcccagtgtaccttcttctttgtccagcgctactgcgacgaattgctggataacctgatcgtccacgccgaggccattgccgcggggcataccattgctgaccgtctgcagctgccggaaggcgcgccggtcttgaagctgagctccatctgttacagccaaaagctcaagccgatcatgtcctctgtggaatactacaacacaaatatgctgccgctgtcgttcctgaaacgcatcagccggacaaagcagcaataaggcaataaaagctcacgaaagtggcgctgtgcaagcgttgcacagcgccactttcatatgcatgccggaaagaaaaaaatttccctgttttttaattttcctattgactccccgggaatttttgattatactgtgtccatagagcttgtctagtattgaaacgacgcaagcatctgtgaatacccaacatctattcacagcatccttcatcagaaaaagcgcccttgtgttaccggtcattccacaaaggcgcttttctctgcccatttttctgccgtgtccttacagggacgctttgatctgctgcaccatccggtcgacataatcccggtagttttccagagtatcgacccagttttccaggcagctgcggcccaggggcgtgatctggaagacacgcttggcatgggccttctccgtatcccaccgggagaccaagtacccggcgctctccatgcgcttgagcatccggtacaggccggtagcgtccaggctctcgccgcccagcaggttgcgccgctccagctcctggatgatctggaagccatggctcggcccgtcggacaaaataaccaggaccgccggcttgaccagcttatccaggtacgagccctggcacgggcaattctcctcctgcatccgcatctggggcaggctcttgcagacatgctcctccagcgcctcgctggtgtggcggacaaagggatagctggcgcagccatcctcccggtgcatcagcgcaaaccactccggatgcacgatatagagtgccgccgtcagcccaaggtcagcaaaatccggggcgtcattggtgctggccgcgcagcagcatgtcgtctgctgctgcgccttgccgatggtgataaacaccgtctggttctcctggaacaggaccgtccccgcttcggagaaatcgaccgtatcgtctgccagatgctcctcgcagtcggacaggaccttttccgccaggcaggaaaacgggccgcgcgccagcagggccgtgccgcccagggccagcagtgtcaccgggactttgcagtcggacagggccgcggctgccgccgcctcgtccaccgccgccggatagcccgcctgccggagcagcttggtcaggacctcccgggtcgcgtcgtcacgcgcgctgacgcccaaaagctgcaatgcatcccggttgcccaggacatagtgcagtgccaggagccgggcatcgttctcccgctcgatgtgcatggccccgtaatccacccagatattcttcatgatattgcctccgcttccagcctttccggcccgcgccgactggggcaaaccccaggccgctttttcatgttattattttcattataacgaatttcctacccaaatgcaaggcttaaattctccctgcacagcaggaaaaccggcgcagccgggcggcatgcttgcccgcccggctgcgccggttcttgcgcttttcttactccgccgcctgggcgcattgggccaggatccgcgcatagagcgcctggatcggttttgtcatccggcagcccttggcgtagagcaggtagagctgccgggtcgtgctcttcccctccaaccggaagggcaaaataccgcgcgcctgccgggcggcaaacccggaaacgacggccacgcccatcccctgggccaccatccgctgcatcgcctgggcgctctccacccgggcgatgacccggatcgactccgacgtgatccgattatcgcacaggaagtgatccaccgccagcttcgttccggaaccaccggcccggacgatcagcggctcccccagcagctcgttgccgctgacgccgcttttctgaagcgcccggtattttggcgtatccggcgcgatcagcatcaattcatcctgggcgatcggctcgtagcacagcgcctgccggttcaaaacggccccggcaaagccgagctgggcctccccatctaggaccatccgatgcactgcatcgctgtcgccgccccgcagggtaaagcggtactggggatactgccgggaaaaatccgccagataacccggcagcaaatactgcatgggaatagaggaggcggccagcgtcagctccagatgcgcgtgctccataagctgccgcgtcagatcagcgcagttttgcaggatcacctttgcatgggtgtagaccttgcgtccctcctccgtcagggcgatcttccgcttgccggtgcgcagcaggagcgtcacccccagctccttttccagcgccgtaatatgcccgctgacggtagattgggccagatacagctgctccgccgccgcggtaaagctgccctgctcgacgaccgccgcaaagacctccagctgtttcagattcaaattctgcatctcgtcaccttaaagcagcacttcataaagcccggcaaattccggaaaccccggctggccctcaaagcggggccgctccgccttcggcgcggcccaggccataccgcagtccgaggtgatgctgcggggcaccgggatcaggcggccgggcaagccgtttgccttgcagtgcttttccatggcaatggccgcggaggtcgtatgaaatgtaatgatcagcttctcttctttttctctcatccttctgcatagctccttattgcggcaatggctgtctctacttcggcgggcgtattgtaccagccgaaggagaaccgcactgccccctgggcctccgtgcccagggcgcgatgcatccggggcgcgcagtgggcaccggagcgcacggcaatatcatactccgccgccaggaaatctgccacctcgccggaatccgcatcttcgatattcaagctgacgaccggggcccggtcgcctgtgaaatcgccgtagaccgtcacgccggggatcgcccggacgccgtcgtaaaactggcgcatcagggccgtctccttttcgtggatggccgcgacgccggtctcgcgtaaaaagtccaccgcggcggacagcccggcgatgccgtggccgttcagcgttcccgcctccaggcgggtcggataagcggcgggctgctccggcagataggtctgcacaccggtgccgccggtcttgagggggcggatctccacaccctcggccaggcacaggccgcccgtcccctggggccccatcatgctcttgtggcccgtgaagcacagcacgctgatgccgctgcgggccatatcaatggaaaaagcccccgccgtctgggaggcgtccacaacataaagcaggccatgctcctgggcaaacgccccgacagcgtcgagatccaccagattgccggtgaggtttgacgcgtgggtcgtgatcacggcgcgggtattgggccgcagcagcggcgcgaaatcggagagtgcaatccgccccagccgatctgccggaacaaagctaagctccacgccccgcttttccagccgatagagaggccgcagcacagaattatgctccaggtctgtcgtgatgacatggtcgcccggaccaaacagaccgaagatcgccgtattcagtgcttccgtcgcattgctggtaaagcagacccgctccgggctgctgcagccgaaaaggtccgccagcttctgccgtgcgtcgtaaatcacccgggcggcgctgagagagccgccattgacaccccggccactgttgcccagcgactgcatcgcctgggtcaccgcctcaatgacgcagggcggccgccgcagcgacgtggccgcgttatccaaataaatcatgcctggactcctttccgcgccgtgcgcaccattacgggcggatgatcttccccgcgccgttcattttctcgacgatctggtacatatttgtcacagagccgaccgccaactgctccgtcagaccatagtaattcaggcaggtaccgcaggcgaggatctccacgccctggcgctccagctcctgcaggtcctgtaggctgtcgctgcccggcacggccagcttcacgccgccgttgtagagcaggaccgtcttcggcagctccggcagctggctaacggcaaagacgaagcccttgagcagcgttgcgcccagctccgcgctgccggaacccatctcgttcgtaccgatgaccacaatggtatcaccggagaccagcgggccgcagccgcaatccatcgccgcttccgccgcaccatctcctacggggatcgtcacgacatagtgatccggtgcaagctgctgctccgctgcctgcaagccgcggccagaggccatccgctgcagattctgcaccgcaactgcgttatccacatgcacttccagcgtgccgctgcccatttcctgcagcgctttcgttgcctttaccaccgggatggggcactgctcacctcttgcgtcgactactttcgtttccattgtctcaggtcctttctagattcattatgatgcgcagccagtgaccagctgcttttcctgccgctttttcacactagatgctttctttgttatcatatcacattccgttgtgttcgtcaaagtacagcggttctattataatcgcattttgcgattatttatattataccatcgcttattccgtccgatccgtgcagcccgcccagaagacactgcagaaaaatccgccgaatctgcaagtttcgccttgacatcctgcaatttgattgtataagtgtatacaaggattcacaaagccatcataaagaaaaggagagacgatccatgctggagatttcaagcaaaacaaatttgctggaacagaacacctataaatattccctgcaggatgtcgcggagccgaatctgtaccgggatatttacgactacgataccgtccccaagatcgcgttcaaccaccgccgggtgccgatgaacatgcctgaggagatctggatcaccgatacctccctgcgcgacggccagcagtctgtcgagccgtatacggtcgatcagatcgtcaacatctataaattcctctcgcgtctgggtggcccctacggcatcatccgccagacggaatttttcgtctatagcaagaaggaccgccaggccatcgaaaagtgcatggagctggaccttcccttcccggagatcaccagctggatccgcgccagcaaggacgacttccgcttggttcgggacctaggcattaaagagacgggcatcttagtcagctgcagcgactaccacattttcaaaaaaatgaaaatgacccgcgcccaggcgctggatcattaccttggcactgtgaaggacgcctttgacgccggtgtcatgccccgctgccatctggaggatatcacccgcgccgatttctacggcttcgtcgtcccgttcgtcaatgaactggtcaagctctccgaggaggcaaagattcccgttaagatccgcgcctgcgataccatgggctatggcgtgccgtattccgaggtcgcgctgccccgcagcgtccctggcatcatctacggcctgcagcactattccgacctgcccagcgaaatgctggagtggcacggccacaacgacttctacaaagccgtcaccaacgcctccacggcgtggctctacggcgcctgcgccgtcaactgcagcctgcttggcatcggcgagcgtaccggcaatgtcccgctggaggccatggtctttgaatacgccgccctccgcggctctctggacggcatggatccgacggtcatcaccgagattgccgactatttccagaaggacatcggctacgagatccccgttatgacaccgttcgtcggccgcaactttaatatgaccaaagccgggattcacgccgacgggcttttgaaagacgaggaaatctataatatcttcaacacccgcaagctgctgaaccgcaaacccaccgtccagattggcaagacctctggcctagccgggattgcctactggatcaatgaaaactataacctgccggaaagcgaagccgtctccaagcgggacccgctggtggagcagctcaagcagtggatcgacgcagagtacgagggcggccgtcagacgacactcgccacccacgagctggaagcgaagattgagcagctgtccggcggaaaatacaagcgcgtttaaggggggtggcaacatgtacgacacgacacataagacggtttctctggcagaccgggtctttgacaagctggaagatgacattctctttggccgctacgccaagggcgagatcctgacggagctgcgcctggtcgaggagctgggcgtcagccggacacccattcgggaggccctgcggcggcttgcccaggagcgcctgatcgccgataccggcaagggctccgtcgtcctggggatcaccaaggaggacctgcaagacattctcaacatccgcctggccgtcgaggggctggcaacgtattatgccacgctgaacatgacccctgaggggctggatgagctgcggcatatcgtcgagctccaggagttttacaccagccggaacgatccagcacacatcaaggaaatggacgaccagttccacaacctgatctgcaccatcagcggccgccaggtcatcgccgatacgctgcgcccgctgcatcggaaaatccagaattaccgccgcagctccatggccgacacggcccgcgcccgggctgcgacgcaggagcaccgcgccatctttgaagccatggccgctggggacgccgagcgagccaaggcgctgacggtagagcacatcaccaatgcaaaagcgagtattctcggaaaggaacaggcataatgggttacacgatcgcacaaaaaatcatcaaagcgcatctgcgctccggcgaaatgacgccgggcagcgagatcgccctgaaaatcgaccagacactgacacaggacgccaccggcacgatggcgtacctggaattcgaagccatgggtgtgccccgggtcaagacagagcgcagcgttgcctacatcgaccacaacacgctgcagtccggctttgaaaacgccgatgaccaccgctatatccagtccgtcgcaaaaaagcacggcatctggttctcccggcccggcaacggcatctgccaccaagtccatctggagcgcttcggcaagcccggcaagacccttatcgggtcggacagccacacgcccaccggcggcggcatcggcatgctggccatgggtgccggtggtctggacgtggcagtcgccatgggcggcggcgcgtattatatcgccatgccgaagatgttcaaggtcaatctgaccggccatctgcgcccgttcgtcaccgcgaaggatatcagcctggagctgctgcggctcctctcggtcaagggcggcgtcggcgcgatcatcgaatggggcggcgagggcattgccagcctgtctgttccggagcgggccaccatcacgaacatgggcacggagctgggcgcgacaacgtccatcttcccctcggatgaggtcacccgggccttcctgaaggccgaaggccgcgaagcggattatacgcccctgtccagcgacccggacgccgtctatgaccgcatcattgacatcgacctcgacacgctggagcctatgattgcctgcccgcacagcccggacaatgtcgtcaaggtctcctccctcaagggcacgaaggtcgaccaggtctgcatcggctcctgcaccaactcctctctgtttgatatgctcaaggtcgcagccctgctgaagggtaagaccattgatccctcggtcagcctctccatctcccccggctccaagcaggtcctgacaatgctggccgactgcggcgcgctgacagatatcatcgccagcggtgcgcgaatcctcgaatgcgcctgcggcccctgtatcggcatgggcttctctcccaactccggcggtgtcagcctgcggacgttcaaccgtaactttgaaggccgctccggcaccgccgacggtc

SEQ ID NO: 1697 - DNA, 17646 bp, Unknown
  16S sequences of unknown bacteria
cggcggctacagcggggtcatcgaaggccatgtctgcccgaagtgcggccgcgatgattccaagagcgaatataagttcgagaagatccgccgcatcaccggttatctggtcggaacggtggaccgcttcaacgacgccaagaaagcagaagaaaaggaccgcgtcaagcatgactgaacagctgcgcctggctggcccgctgcaggttgacagcttcgtggacggaccgggcatccggatggtgctgtggacgcaaggctgcccgcaccactgcccgggctgtcataatccgcagacgcatgatcccgcaggcgggacgctgtatgcggtggatgagctgatcgcgcagatcggcgcggaaccgctgcagagcgggctgactttgtccggcggggaaccgtttgaacaaagcgcggcgctcatgccgatcgctcgcgccgctcgagcgcgcggactttccctgtgggcgtattccggctatacctttgaacagctgatggccgatcccgaacgccgcgcgctgcttgaattgctggacgtgctggtggacggccggttcatcgaagcgcagaaagactatcgcctgcgtttcaagggcagccgcaatcagcgcatcatcgatgtgcctgcatcgctgcgggaagggcatgtggtatgttcttcctacgatgacgtcaatcaagatctggagtaaaaaaacctgtggtctttccgcagcggcctcaacagaggccctgcgggaccgcaggtttttgttatggcttgaggaagaccaggcaggcgccgcccagcagcccgctgtcctcattcaggttggtcttgaccacatggacgagcgggacgatgttggagaacaccttggacttgacccgcatctccacgtcctcgacgaagccggggatcttcagcgcgacgcttccgccgaggatgacgatgtccggatcgatgaaggcgtagatgatcgcgatggcattggccaggaattccttggcgtcatcgatgatctgcatggccgtttcgttgccgctttccgccagatcattgacctcaccggcatgggcggcgttaagaccggcccgattagctcttgaggtgatcgccgttcctgaacagatggcctccactccgcccggatagatgctgccatgcgtcggcccatccttccacagcgggatgttggcgatctcgtgtgcaaaaccatgcgcgccctgatagatcttcttattgatgaccagaccagagccgacgccggtggatacggtcatgaactgcacataatgataattctttcctcgtccgatgaccgcttcggccagacaggcgaggttggcgtcgttttcgagatagaccggcagtccggtcgcttcgctcagcttttcgcagatggggtaattccaccacttctcgccgaggttggtcgtcgtcaggatatagccgtgcagcaggtcgagcggtccgggacaggaaatgccgatgccctttgcgctcttgccgaagctctggatcgtcttgcggatctcttcgatggtcacaaaggggtcctgggcatctgtcgcaaactgccttctctcctctatctcgtaattttcgttgatcagggcgaccctggtgttggtcccgccgatatcgatggcgatggcatagttcatgctgattcctcctattcacttgcttgattatagaataacacgaagcgggagaaatggacagcgtaggatctaaataatatattattatgtggttgatgatataggtcaaatacatttatgacatttaaatgaccgtttattacataacatttaagaaaaagcgagttttaacgtataataatgattaccatcacaggatatctcatacttaagtgtagtgaaaaatgcgattgtgtcaaaaatgtcggggggggggcggtcaatatgaagaattttgaaacgagcataccatctatcgctgtctataatctgatctttctcagcatgatggtcttctttacctggcggatctcttctcggttttatccttatggcaaaaagatcctgttcatgcatctgctgatcaatcttatcccgaccttttattctttaggcatcgggctggattcttatctggatacgcttatcgcatatgtgctgtttcttggaccgacactggtattgtaccgccattccccgctatgggcgatgacgtcgtatatcgcgatgttcgcttctcagacgctctctgagtttctcgtctatctggtctgtgcattgatctggaacatgtcgaccgtagatgtttccgccgcgcatccgatgctgatctacatcgcctacttcatctgcgggatgggcagcttgtatggggtataccgtttcatgctgcagttcaccacgctggagaagcatctgcgccgtttgtttgtcgtcgccgcgttcagctgctttacgctgctgttcctcatcccggcgctcgtcatcagcaaaagtccggacttcaccgccaggctcgtgctcgtctttgcggtatccatgatcgtctgccttttgttatacagcgtgcacagctatatcacctccctgcgcacccgcaagcgcatggagctgtttgagcgggaataccagatgctgctggagcagtaccgtcaccttgacgcacgcaaagaggaagagatccgtgagctgcatcatgagatccgcaactgcatactgacgcttcagtcgctgaagcacgggtcaacacattcaaaggaagggaaagaatcatgaatcgtctgaatatcgggatcgcggaggacagagacatccaggccgcgtattatcaggaaatcatccgcaaagaactctcgcgtcatgagcttcacctgaagcattatcgaagcacgcaggaatgtttggcggatcaggagtttttggcagaggccgatatctttctgatcgacattcagctggatggctccagcgggatcgaactgggcagacagctcatgcaggcccattcgcagatcaagatcatctttatcagcggctatgtccgctatgcgccggaagtatatgaagtgccgcatgtgtatttcgtctggaagccggatctggaggtcaggctgccgcaggcgctgcaagccgcatgccgggaaagccgcagaagcgtgctgccactgaactggaaaggacataagaagttcatcttcatggatgagatcatgtacatcgagcgtgagctgcgcaagagcaggatcgtgcttccggaatgtgagcattatgtctacatgacgctggaggagctgatggaacgcctgcaggaacagcgcttcatccgcatccacaagagctacatcgtcaatttcgattatatcggagagttctgccgtcagatggtcgtgctgcgcgatgggacccagcttccggtcagccggacataccgcgcggcagtcagcgaggtcatgcacaagctgctgaaggaatccggagtaaggctggatgaggacgagcatgagaaaagcgctgcgtgatgtattcggctttttgcgggattatcatgagatggccacgctcatcctcctgcagctgctggcattgggcatccttttgcatttggacaatgccggcgggaacgtcgcgctgttctgcgcgttcctgctcatcgtgcagctgctggcgctctatctgatctaccgcatcttcaagcgcgcccagcgtcgggtggatgagcagatcaaccaggcttacctgcaaaagcagctggagtttcaggaggaccacctgtttgccctgcggcagatggagagcgatttcgatgagatccggcgcaagctggagccacagctggatgagctggaccacagcgagcccaaagacgccgattccatcctgaccaggctgctggggtattgcaagaagctgtgccagaacgcttacagcgagaacaagatcatcgacgccatcctgtacgccaaggtcagacgtgcgcaggaacaggacatcgatatccatgtgcaggtgatggtgccgcagacgctgcccatccgcgatgcggatctgatcgccgtatgcgtcaacctgctggacaatgccatcgaagaatgcatgcgtttgcctaaggagcagcgatggatctccttcagcgccgccgtcaagaagaactttctgatcctcacggcggaaaatgccaagcgtgaagaggccagcgtggactttgcccgcggcaagacatccaaagaggacgcgcagatgcacggatatgggctgaaggtcatccgccgcaccgccgagcgctatgatggctttgcagaggcagacaatgcggcgaagcaagtgagcgtgacggtcggcatgatgctgaaagacagtgaaaaaaagatggagaaaccatgaaattggattataataaataagtagaatgcccgtgccagatgggccttttctttgtcagagacaggtgatgtaatgagaaagctggtcaaatacctcaaaccttaccgtgtgcagtgcacgctcggtcccttctgcaagctgatggaggcagtgctcgaactgatcctgcccaccatcatggcatatatgatcaatgacggcgtggtccgccgcgatcttcatgtcgtgctctggctgagcctgctcatgctgctgatggtgcttgcaggctttggcttttccatggtctgccagtacaatgcggccttggcctcgcaggggttcggcaccgatatgcgcaatctgctgttcaggcatatccagcaattctctcatcaggatatcgatcatttcaccacgacctcgctgatcaaccgcatcggcaatgatgtcaatcagctgcagctggcggtcgccatgctcatccgtctggtcgttcgtgcgccattcatcatcatcggcgcgatcgtcatggccatgatccttgatttccgcctttcactgatcctggctgccaccgtgccgttcatcacgctgatcctgtatggcttcatccgcctgtccacgccgctttaccagatctatcagcagaagctcgatcagtttgcggccgtgctgcaggatcagtttgccggcatccgcgtcatccgcgccttcgtcacccagcgccgtgagcgggaaaaagcagaggcgcacatcgatgatctgcagcggcagatgatgcgcatcacccgtctgtctgccttgctcaatccactgacggccatcgtgctcaacggcgccatcgtcatcctgctctatcagggcgtgctgcagatccaggtgggaacgatcgagccgggggtcatcgtggcgttcatcaactatgccggatcgatcctcacggcgctggtcgccatgagcaatctgatcgtgatcttcaccagggccgcgacttccgcacagcgggtcaacgaggtgcttgagcatgagccgtccatggccccgggcagtgagccgatgcgctttcccgtcccagaggaggccgtgcgcttttcgcaggtgaccttctcctatggcagcggtgagcctgccgtgcgggatgtggatctcgtcatccgcgaacaagagacgatcggcatcatcggcgggaccggcgcaggcaagagcacgctgatccatttgatcgagcgtgcctatgacacgcagtcaggcagcgtattgctctatggacaggatgtgcggaccatccaggcaaaggatctgcatcgccatgtcgtcagtgttccgcagacatgcgagctgttttatggcagcgtgcgggataatgtgtgctttggcctgtctcgctgcgacgatgagcaggtatggcgggcgttagatctggcacaggccggatcgttcgtgcgggcgctgccgcatcagctggatgagcagatcgaaagaggcggggccaacctctccggcggacagcgtcagcggctgtgcatcgcgcgcgcattgatccgtgatccgcgcatcctcatcctggatgatgccagcagcgcgctggatttccgcacggatgcggcgctgcgcaaagggctgcgtgaagcatttccgcagatgaccagactgatcgtgtcacagcgcgctggtacgctgtgtgcctgcgaccgcatcctggtcatgcaggacggagtctgtgtcggctttgatacccatgcgcgactctatgatgactgcgcggtctaccgcggcatctgtcagacacaaggtgtttccagagagggggtgagcgcatgaacgaatcccatgccctccggcgtctgctcaggtttctctggcagttccgcctctggctgttgatctcgctgctgtgcgccttcatctccgtgctgttcagcgtcatcgcgccattgctcatcggccgcatcatcgacggcatcacctcaggcacggcgcttcatgcggtgatgcgggagctggtgctgctggccgcgttgtatctgtcgtattcactgttcaactggggcatgatgtatgcgtccaaccgcatcgcgtttgtcagcagctgcgtgctgcgccgtcagctggaggcgaagatggagaagctgccggtctccttctatgaccgccatgcccgcggggatctcatctcccggtttatcaatgacatcgatttcatcagcgacggctttctgcaggggctttccaccatgctcagcggtgcggccaccatcgtgctgacgctggtgttcatgctgcggatcaactggatcatggcgctgatcgtgaccgtgtctgcgccgtttacttacctggtcgcccggatcatcgccgtgcgcaccggacgatacttccgtgcgcaggccaatgtgctcggccgtctcaatggctatggggaggaaatgctcagcgggatccgcacgctcaaggcgtatggctatgaagaagaggcggtccgccagtttgagcagtatgacgcacagctttatgatgccggcgtcaaggcgcagttctatggttctctggccaatccgagcactcgcttcgtgatgaacatggcttatgcggccgtcggcggtgccggtgcactgctggcactggctggtcagatcaccatcggcagcatttccagctttctgatgtattccaatttgttttccaagccattcacggagatctccggcgtcatgacccagctgcagagcgcggtatccagcgcgcagcgtgtgtttgacctcctcgatgagccgcaggaggatgcggatggagaacaagtgctgcaggtcagggaaggacgtgtcgatttccttcatgtgcgtttcggctatgagccggggcagccgctgatgaaggacatcacgctgcatgtccctgccggcagccgggtcgccatcgtcggccgcaccggtgcaggaaagacgacgctggtcaacctgctcatgcgcttttatgagatcgagggcggccagatcctgatcgatgatcaggatatccgccgctgtacccgtgattccctgcgccgtcaattcggcatggtattgcaagatacttgtctgttcgagggcacgatcggggagaacatcgcattcggcaaaccagaagccagccgccgcgagatcgaagaagcggcacggcgaagcggtgcgcatgaattcatccggcggctggacaagggctatgaatcgctgatccgcgcggacagcgacatgctttcccagggacagcggcagctgctggccatcacccgggtgctgctcatggatccgcgcatgctcatcctcgatgaagccaccagcagcatagacacgctcagcgagcgtcacgtcaaccaggccatggagctgctcatgaagggcaggacgagcttcatcatcgcacatcgtctctccaccatcaccgacgctgatctgatcctggtgatggagcagggagacattgtcgaacaggggacgcatgaagcgctgctgcaggcaggcggcgcttatgccgagctgttcaacagtcagtttacataaaggaggaatcaggatgtacgcaatgatcgcaacctggcgcatggcgctggacggcgtcagccggggaaaggaaatgcttgcggatggcagctgcgcggcagacgcgctggaaagcgcgatccgcatggtggaggagcgggaagagtacaccagcgtcggctatggcggcctgcccaatgcgcagatgcaggtggaactggacgccgggttcatggacggagacagcttgtcgatcggggcggtcggcggcattcatgacttcgccagcccctttgcgatcgcgcgccgtctttcccgcgagccgctgaataattttctggtcggcagcggcgccgagctctatgcgcacaaacatggctttgcccgccgcaacatgctcagtgaagcggcgcgggcgcgttacatgcgtcagcggcaggaacagtcgctgcaggcatatgcggggcacgatacggtgtgcatgatcgccctggatcactgcggcagcatgtgcgcgggcacatcgaccagcggcctgttcatgaagcatcccgggcgtgtcggcgattccccgatcgccggcagcgggttttatgcggactccgaggtcggctgcgcctgcgcgaccggattgggcgaagaggtcatgaagggctgtgtctcttatgagatcgtccggctgatgaagcagggcctgacgcccatgcaggcatgcgaacaggccgtgatggactttgaccatgacctgcgccggcgaagaggcagtgcaggcgacatgtcgctgatcgccatgaatgcgcagggagagtggggcatcagcaccaatatcgacacgttttcctttgtcacggccagcgaatcacagccagccatcgtctggctggccaaacgcgatgcacgaggaaagctgcagatcaaacaggcggatgcggcctggctgagcgcccatccgcaggaataggaggaaggacatgaagaggataatagaagtctgtgccggaagctatcaggactgcctggcggcataccgcggcggggcacagcgagcggagctgaacagcgcgctgagcgtaggcgggctcaccccgagcgtcgccgcgcttcgccgggccaaacaggagaccagcctgaagatcatctgcatggtgcgtccgcgcgccgcgggcttctgttatgatgaggcagatgtacagatcatgatggatgatgcgcgcatattgcttcaggaaggcgcagacggcatcgccttcggctttctggatgaacacggccgcgtggccgcagaggacacggctgccatgtgcggactgatccactcctttggcaaagaggcggtattccaccgcgcctttgatgtctgtgaagatccgtttgctgcgatgcagacgctgatccagtgcggcgctgaccgattgctgaccagcggccagcaggccaaggccgtgcagggggcagagctgatccgcacgctgcaggagcgcttcggcaaagagatcgagatcctcgccggcagcggggtcaatgcggagaatgcccgttcgctcatggaacagaccgggatctggcaggtgcattcctcatgcaaggatcatcgatgcgatccgacgacagtaaaaggaccggtcagctatgcttatctgaacggcccgcatcgatgcgatcatgatgtggtcagtgaaacattggtgcgcagcctggtgcaggcagtacaggaagactgagcgatcagtctttttgtttgcggaaacgctgcttgagctgccgcagggcagtcgtccgcggatgcgcgttcagcttgcgcaggttctctgccagcgctttttcatattttccctgatttcccggggaatagaagcgtgcgtccttgagctcatccggcagatactggatataaggccatatggcagacatgccataatcatagcggtcttcttcgtgcagcgctgtcggcgtgtatttcagataatccggcatctggcatgccttggcgcgggctgcctgagcggcggcgtcgatggcgctctccgcagatctggacttgggggacagcgcgaggtcgatgacggccatgctcagcgggatgcgggcttccggcatgccgatgtgccgcgccgcgtcgatggcctggatcgtccgagcgacagcggccggattgcccaggccgatatcctcataagcgatgaccagcagacggcgctccaatgattccagatcctgggaatccaggaacagcgccagataatacaatgccgcgtcgacatcgctgccgcggatggacttctggaaagcgctgagcaagtcataatggccgtccccttccttggaggtgcgctggttcgggacgatctggcagtgatcgagcagcgcgcgtgtgatccgatcatcttcgctcagcacgctggccagctcgagcaggttcagcgcatagcgcacatcgccgttggaacgctcagcgatgaaccgcagcgcatcctcatctgcctgcagcctgccgccgaagccgcgctcatgatccagcgcatgcctgagcgcctgcaggatatcctcttcgcacagtgccttcaaggcaaagagatgacagcgggagcggatggccggattgatgctgtggagcggattggcggtcgtcgcgccgatcatcgtgatgttcccgttttccacatgcggcagcagcagatcctgtttgtccttgttcagccggtggacctcatcgatgatgacgaccagaccggggtacagccgcgcttccgcaaagagcgcgtccaggtctttcttggatccgttgacggcgttgaacagccggtatggcaggccggcctcattggccaataccatggccagcgtcgtcttgccgatgccaggtggaccatagaagatcatggaaaacaatgtcttcttttctgcgcagcgccgcagcacgccgtctgcggacagcagatgctgctgcccgatgatctcgtccaatgtctgcggacgcatccgatatgccagaggttctctcatcttcatcaccggattcattttatcacagtccatgcgcaggcaaaaggcagaaaaaaagccggagaccggctagacgagcgaagcgatgacgttgagcgccatggagatgatcagcacgacgagcagggtgatgcttgcccagttgttgaagaacgcgctgaaatgaaaatcatatggaccgatcagttcggcgcggtaattcgccctctgcttcagctcgaggatgaagagcaccacggcggcgatcatcacgatcagcatgagcagagcgagcaggatcaagacgctttcctgagcgatgaacagggtcatctgggcaacggcattgttcacgatgtggaagatcagccccggcagcagcgatcccgtgcggatgtccgcataacataagatcaggctgaagaagaagatcggcacggcctgcgggatgttcccatgtatgagcgcgaagaggaacgaagtgaccaggatggcaaagccgtttccataccgcttcagtcccatcatgcagacgccgcgaaacaagtattcctcaaacagcggagcagcgatgaccgacgtgaacatcagcaggaggttgctcagcggatcggcggtaggagagaaatccggcgtggagaaggcgcggggcaagagcagcgagatcaaggagacgatcatcgaaaggatcatcatcccgccagagcccaggatataataacggatcatggtctttgccggcatcggcgtgatcggtttccagcggatctcgccctctgtcttcggctggaagaagctgcgtaccagcagccagcagatcagcatgctcaccagcatggcgatctcgctgaacgcggtgacggcaccgatgttccctgttctgatcgcaaagggataagcgatggaaagcatggcgaaagatacgatcaatgagatcagcagatacagcaggatggaaatgctgatgctcttgaatatccgttttggtctgtctgtcatgaaattcctcctcatggtcattttctctattgtagcaggaatgcagaaggagcgctatacgctgaggaataatcatgagcgaggggcgtatattgaagtgaaggagggaatttatggaagatcatcagaaccctttgcgttttgagacaagcccgtaccacaatgtcgtgatcaaagaccgcaagagcatggagctcagcggcgtcaagcagatcgacagcttcgattcctcagagtttctgctggagacgacgctgggctggatgttggtgagcggaaaggatctgacgctgggcaagctggatacagatcacggcgatgtgatcatcaaaggcagcatcgactccatgacctatgtgtcaggaaagaaaggacaggagcgcggatcgctgttcaaccgtctgtttaaataatgctgctgtcagtacagatccaggccatcctgttccagctgcttgcgggatggctgtatggtctgttcttttccctgatccaggtgctcacgcaataccggcagagacgcgtgtccaccacgcttgtcgaagtgctgtttcatgcgggattcaccgctgtcttattctttgctttattgcagctcaacggtgcctgcatgaacatctggctgatgctgttctttgctttaggcgccttgttttattaccggttttactaccacgtattctttcatctgttcaccattgtaaggcgttacattagaggcgtatttcgacaatttagtattgcgaaatcacgtacacttgttataattaaaaagaacaaacgccgaaagaacagaagaaggaaaaggagggatccggatggcggcaaggaaaaagaagattaagctgacaaagtcagccagggtcatgctctgcatgatcttcgccggactctctgccggtatgctttatagttccgcacaggaactgcagacgatgctgcagctgaaagaaggcattgccagcgataaaagcgagatcgccgatctgaagcagcaggtcacggatctgtccgatgaaaaggaaaagctggaagatccggaatatctgaaatacatggtgcgcggaaagtatctggtcagcaaggacggggagcaggtgttcaagctgccttcctcagacagcagcacaaatacgcaggacagcgaataaggatggaggatgaccttcatctttttttatgcgttcatctgcggaagatatgctcgcggtgataggcaaagaacagcttgcgctcttcagacatcagccgctcctccagctgaaggtcctgagggagacagaagacctcccggaaatgcgcatgagacctcagctcctggcagaccaggagcctgcccttggcattgaagctgatgtatccctggtcaaagagatagtcatgattgcggcatagcagcatgccgttgttgttgtcgatgggctcatacaagtgcgcgcagtcgcggaacggcttgatgtgcgagccgatcagcatatgcggcagatcgatcccgcagatcggacagcgatggtcgtattcgtgaaacagcgtgtctttgtagaatgactgcagctgcttggattcatccctgctgcaagggatgccgcggcgcggcagcatgcgcaggatctccttctgataacggtaagggatcatctcgctgtcctggttcttccagttgtcccgggaagagggatagatcgtcttcagataatggcacagcgcggtcggagagaccagcggcggattcgcacagcggtattcgctgaggatgcgcagacagtcttcccggatggcgtcgggaaaggccagcatctcttcctctgcccagatgaacgtatggcactgtctggccgcagagaacagcagcggatggatcatctgctggatctgcgcggccgcaaagcgcggctgctcgagaagagaaaacagctggggatcagcattcgggtcgctgagcatgcaggcgagcagcgaaaggtcctccagctgagaatgcatggcggaacgggcgaagatggtcgcgttcggcgtgacatcatagcccctggtgagccgcttcatcagcgacgcatcgatgatctcctgaatgtccagacggacctgctcccgcgcgggggcacgagaggattcccggtggagctcttggaatacatcgctgacggcctggtcgaagtcgatgccccggatctcatcatgatccagcaggacaagcacatgtttcagataagatttctccatgagaccacttcctttatgtcaattctattataccaaccctgcagcgaaaaacatattttttcgacaccccgctttttcgagtcagttcgacaggcggaaacctctacaatgtaatcataaaaaggaaggtgtttgaaaaaatgaaaggaccaggtatcaaggattataccgcggagctgacgagaagaagagaggaagcgcatgcgcagggattgaagtatatcgaagtgaattccaagaagctgcatcaggagatctctcctgattttgcgacgatgccgacgtgctgtcaggcgatgtacaagcagatgctgacgggagatgagatcctggagcgccccagagggacgaccgggttcggctcacatctgaccatccggttttatgtggacaatttcgaaggaagagagaagctgtatccgggcaagaagcgggggcgtccgccgaaaagcccgcaggagaaggaagcggcccgcaaggccaggctgaagcattccacgcaggatctgtgttcgctgatcaagtcctggctgggtgagcatggctgggaatatgaagagcacaaagggatcatcgaggcccatcatgaaggaaagagatggatcatcaatgtgcaggggatccaccgcggtcgcaaacagcctcttcccctcaagctgagcgagatcatccgccagatggatgatgaagaagccgtctacagcctggcgttcaatgactctgcctcttatcgaagacagtggcaggagatcccgcaggtcgtcaaggagcggctgcacatgagcgtgatctttgcggataaaaaaggcaacatcgtcgagctgtgagcacatccccgcgcaggggatgtcttttgtcatgcgggcgttcgtgcagcaggccgtaggcaaaacacataggatacagggacaaaaggggtgaactatgttccatggtattctgttagtgcttgcgctgagcatggacagcctgctggctgcgctggcttatgcgctgcgcggcatccgcattccactgacgagcgctctcatcatcgcggtcgtctctgccggtttcctggggctttcttttctgtctgcctttgcgctgagcaccctgatctcaccgcaggcggcagccgtgctgtcggccgtgatgtttgccgggctgagcttatattcgtttttccaaagctcgctcaagcggatgcttcgccatgcggcccgccgtctgctcacgtttcactgcggcggggcagtcttcgtcttggaaatctatctggatgaggaaaaggcagaccgcgaccagtccaaggtcctcacggccgctgaagcgttctatctcgctgtggcgctgtcgcttgactctttgctgagcgggatggcgctcggcctggatatcacgcagccgctgatgatcgtggccgccgactttgccgccgcgctgttctccatctttgccggcagtgcgctcgccgaccgcgcatctggtttccagcggttcgacacggggatgatcagtggatttttgtatgctttgctggcggtttcccgctttttctgatttgtccattttgcggcaaaaaggtttataaataaaggaaaaagtgatatattatgagtgtcgtgttgataggaggaaactgtaatgagcaaaagaccagtcgttttggttgtcatggatggcgtcggaatcagagaatccgatttcggcaatgccgtgagcaacgcatacaaacctacgttagacaatttatggaacaattgcccgcatacagagatcaaggcacatggtgtcgctgtcggtctgccgagcgacggtgatatggggaacagtgaggtcggccacaatgcactgggctgcggccagatctacagccagggcgcaaagctggtaaacgagtccatcgaaagcggagatatgtttaccacagagacctggaaggaactggtagacaagtgcaaggatcatggaacgatgcacttcttgggcctgctgtccgatggcaatgtccactctcacatcgatcatctgaaggcgctgatcgctcgtgccaaggaagacggcgtaaaggaagttcgtctgcatgtactgctggacggccgcgatgtgccggaaaccagcgcgctgatctatgtggatgagatcgaaaattacatggcaggcctgaatgatgacggcttccacgcttgcatcgccagcggcggcggacgcatgaagatcacgatggaccgctatgaagcaaactgggccatggtcgaagaaggatggcatacgcatgtcctgggtgaaggacgtcagttcgcatccgccaaggaagccattgagacataccgcgcggagagcggcgtggtggaccaggatctgccggcattcgtcatcgcagaagagggaaagccagtcggtacgatcgaagacggcgattctgtcatcctgttcaacttccgcggagaccgcgcacaggagatctccctggcctttgacggcgatgagcattttgacaagtttgaccgtgttcgcgtgccggatgtgatgtatgcaggaatgctgcagtatgatgcggatctcaatatcccgcacaacttcctgacctatccgccgaagatcaagtacacgctgtctgagcatctggtcaagcatggcatccgcatgtatgcgatcagcgaaacgcagaaatacggacatgtcacctatttctggaacggaaaccgttctgagaaattcgacgagaacctggagacttacgaagaggtcaagtccgatgtggttccgttcgaacagcgcccgtggatgaaatctgcagagatcaccgacaagctgatcgaagcgatcaagtccggtcagtatgatttcctgcggaccaactatcctaacggcgatatggtcggccataccggaaactatgaggcaaccatcatcggtgtggaatctgtcgatctgcagctggcccgcgtcaaggaagcggtcgatgcagtcaacggcatcatgatcgtgaccgctgaccacggcaatgccgatgagatgtatgagaagccgaagaaggaaggcgcgccgatcaaggcgaagaccagccatacgctgaacaaagtaccgttcatcgtctatggcgcagacgtgaccatgaaggaaggggatttcggtctttccaacgtggcggcagtcgtgacagacctgctggatctgccggctgatgagcattggaacgaatccatcatcaacaagaaataaagtcctgcagaggcgaagaggagcgagagctccttttttgctgtggcctggcggaagttgacaaacgctggcagcagagagataataaaacggcaatgcggtttacgcaaagagggggcatcatatggagaaaaaagcgaagtcgtttgatcagcacatcgtcaggatcagggtgctttcctgtgtgctggtcgtcctgattcatatcacgcatgcgtatctgtatgccggaggcgcgatcgagtcaaagaaattcattccgctggtgatcatcaacgcagcgtcgcggatcggcgtgccgctgttcttcatgatctccggatatctgacgcttcgcaggccctatgatccggaaaagaaccggaagaagatcattcactacatc

SEQ ID NO: 1698 - DNA, 3639 bp, Unknown
  16S sequences of unknown bacteria
cctctctattcgtcggcagcgtcagatgtgtataagagacaggcagaagcctttgccggacaggttcagcttaacggctggcgctttgcgttttccagtcctccacaacctgggacaccaaatcctcccagttcatattgccctgggcatattgcagcagtgcgccgccgaaatgatccttaaacgtctgtcccgggaacagggtaaaattccatccgatattctgcacctcttcccggttcatccaatcagccacctcgccggccaacggatcgtttggatgctcgtcagcggaaaaagtgtcaaacggcgcgataaagccaagatcctctgttacaaattttttgccagtctgagaggaaaaaagccagtagataaaatccgccgcccgtttttggtccgcctcgctggctttggcgttgatgcagaaaaagttttccgtgccaatgcacagcccctgggtttcttccccttccataccggtatagatgggcaaaaaacggatattctcttcttttacggtgttgccttctacccctttgatatcgttccaagcccagttgccgttttgaaccatggcgcatttgcccaaagcgaattccgccatagaatccatcacctgctttgtgccgagcagtttaggggcaaccgtcgaattctggaggtagagatcgaaaatatttttgaagttttcgtgataggaaaaggcaatttcccgggtagcatcgctggtcaggtccacttctccccgaatccactcataggaaatggggatgttggccaaatgggtctgccagcgccaatcctcgcccggctttaaagaggtgcaggcaaacacaccgtcgatccccagctgctcttttttggcagtcatatcctccactacctcctgcagcttggaaaaactgttgatctgttcggccgaggagaccttggctcctttggtttcgaaatatttttgcaggatcgcgttattgtaaatgataccgtatccttccaccacataggggatgccatagaccttcccgccgctggtcaccgccagacttttatcttttaaatgccgatacagttcaatatcgctcaaatcggcgcagtagtctttccagttgagatatcccaagggcccgttgatttggaacagagtcggtgcgtcggacttggccatttccgattttagcgtctgctcataggttccggatgccgctgtgaccacccgcaattcgacgccggtttccttttgataagccttggcaattttttgataaacgtccgctacttccggcttaaaattcaaatagtaaacggaaccgcctttctgatccgctactgctccgctgccggatgagtcggtgtttttctgacatccggtcaatgccagcagcaggcaaaaggtcagtgtaagcgctgtcagctttttcatatacgttcctccctttttcatttcgcccagcgcggtataaagccgcagcatgatgcacaggcttgtccgctatccagccctattgtccaaccggccagcttttcgggttcggtcagaccaattttataccaggcaaagcgatatgatttcgaaaaatagtatgtgtcttcctctgccgtttatcctcaaaagcggaggctgttttacaaaattcgttttgccgtgcggaaaattttgctataatagggtaggaataaaaacaggctttttgtattggctgtacggaatgaaaaacctaaaggaggatcgccatgtctgtcaaaccaatcactgattctttaccgctatcctgtaaaggggaagaaaccatccttttaaagcagatcgcacaaaatacgcaaagcgccgcgcaagccgcccgccagcagctgctgctttccaaaatccggctggggctcaccggctttttgaccgccttggtgctgcttgcttttcttttgtgggggccgaggcttcaccgttctttgcagaacgccgatcacgccttcgacagtctggagatggttgcctctcagctggtacaggcggacatccccgccctgctctcggatatggatcagctggccgctaagggtaaagacagtctggaggccatggaaaaggcagcggaggtcttggaaaaaattgatatggaccagctcaaccgggccattgcagatttgcaaaaagcggtatctcccctcgccaagctgtttggctgatctaaggtccaaggagcaacgcaagcgcatattttgtccaaaacagcatcagcatttttcatcaattttggcagagattttaggaattttccacaaagcccatccttgtctgccgtacgccgctttccaaacatttctgcttatttcgacgtttttcccagcagaaccagctgggaaatgtcgaatcacgtcggattttatcgagaaaaatcggtcgtgctcttgccggaaagcttttgctccggcctccgctcggataagccttcctttttcttatcttgatttttcctttttatccatataagatagaagacggcaaaaaaaagaagagagaagcgggattggcattcatacgattcacttttgggggtagtgtaatgccacaagtcagaaaaattatcgtttcagacaatgaccaaatatttttagcatcctgtcaaaatgcgtttgcactgcgggggatgcaggctgttccggtacccaaacacgggcgcctgctgtgggatgcgattgaaaaagagcgccccgctcttgtcgtgtgcaatatttttatggcctattgcgatgcaatccatatcatggagcagctgaatcaaaacatggaaacggttccggtctttgtcgctctgtgcgcgtcagacaatgagtgtttgttcgagcgttttttatccgcaggcggtgccgatatattcgtcaagccttttgacgccgacattctggccgaacgaattgttcagcatctggaacaggccgatcgaaaaaacaatctgcgccgggtggacttttcgcctttctccccctcaccctctgacgatgcagccaagcttttaaaaataatcggcgtgccggcccatttgaccggctaccattacatcaaaatggggctgactctgctgctggaaaatccggcacgtttttcttatggtaccaaggggctgtatcaggctatcgcgcaacagacacacagcagctaccaccgggtggagaggaacatccgcactgccgtagaagctgcgtttgaccggggggatttggcgttgtttgaaaaatttttcgggtcttcgatcagccggaaaactggaaagcccaataatgcccagtttatcgccactttgtatgaatatctctcatcgcagaaaaaagcttccaacgggtaaaccgaacctgcgactttaggaaaaagccattcacaaacttttcataaaactggtcagattcgtttaaatttttatcatgaactatccatatccgactgatatacttagtattgtaccaagggagaaagacggttgccagcacggccgttctctggtaaaattttcattgacctcctctttaaaaaacgcggtgccagccgcgttttttattttacccgaaaagtggcaccgtcccggtaaaaagcaggggatcgaatttttccaatcccctgctttttctttttaagatagctccccc

SEQ ID NO: 1699 - DNA, 2651 bp, Unknown
  16S sequences of unknown bacteria
tccagcgctgcctggcgcagcatgccgcattccttatccgaaagcgtcagcgccggcgccgccacgatgctgtcgccggtatgtacgcccaccgggtcaaagttttccatgctgcaaatggtaatgacgttgccccggctgtcgcgcatcacctcaaactcgatttccttccagccggaaatgcacttttccaccaaaatctgcgtgatgggcgaaagcctgagcccgttgcccccaatttcatgcagcgcctccggcgtatcggcaatgccgccgcctgtgccccccagcgtaaacgcaggccgcacgatgaccggataccctatgctttcggcaaaggccagcgcatcgtctatgttcgtcaccaccttggacgggatcacgggctggccgatctcctccatcgtatccttaaacctttgcctgtcctccgctttatcgatggtatctggcttggcacccagcagctttacgttataccgatccaaatacccgctctttgccagctgcatggaaagcgtcagccccgtctgcccacccagggtggacaataggctgtccggccgttccttttcaatgatgcgttcgatggtctccagcgtcagcggctcgatgtaaattctatccgccatggcgttgtccgtcatgatcgtcgccgggttggaattgaccagcactacctccagcccgtcctctttcagcgcgcggcaggcctgcgtgcccgcatagtcaaactccgcagcctggccgatgacaatcggccccgagccgatcaccattaccttgtgtattcctttagaaagcggcatgtccgtttcctccttctatcctcgccatccatgtatccaaaacgttctctgttgcggcaaactgtatcgaatagccccagtcgccgtaaacgatgcccgcgcacgttccgtcatttacgtttaccaggcatacccggcccggcgcttgaacgctttcgctgtccaccgcatatccatggttttggctggtggcgcgcacacggcctgttgccaaatccttcaccggctggttggcgccgcggtgcccatgctttagccgataggtctttgccccctgggatagcgccagcagctcatgcccaagcccaacgcccagcaccggccgcttcgcctggcaaagctgcgctatctgatgggtcagcgccggctccgccgccggatcgcccggcccttcagagagcacgatcccttccggctcgtccgccaagatctccaccgccgtgcttcctgccggccacaccgtgacctggcagcccctttgccgcagcgcctggatcaggctgcgcttggtgccaaaatcccacagcgccacacggtgcttttgcgcgccttccgcctcataacgccgcacctccggcgttgttaccgcctgtaccgcaccgcgaacctcatagctgtccagcagggcctgctgagccggcgtcagcgtcttgctgtccgtgatgatgccgttcattacgccattttcgcggatcgcccgcgtcagcgcccgcgtatccacaccgcaaaggccaatgacgttttgcgccttcaaatacgatgccagcgtgccttcgcaccggaagttggacggtgcctggcagcattcccgcacgatataggcacgcacctgcggcgccccgctttcaaagtcctccggaatgacaccatagttgccgatcagcggaaaggtctgcaccaaaatctgtccgtgatagctggggtctgtcagcgcctccaaataccccgtcatccccgtggtaaacacgacctcccccgcaatctctccctccgcgccaaggcgggtgccggcaaaggtcatgccgttttgcaaaatcaaatacgcctgcttgtccatcgttgcctccctacgaccgcatgcgctgggccatctcctccagctccgcccaccggtccatcttttgttctattttggtttccaatgtctgctgttcttccgtcaagcgctgcaaggccacgtaatcgctgcccgcctgcgccatctgtgtctttatttcatccagcgttagttccagcgtttcaatctcctgttcaatcgtgtcatattcccgctgctcatgatagctgaatttcgtcttggttttttccctcggcgtcgcaggctttgccggccggttgccttggctctgcgcttcggcctgccgccgcgcctccaaatacgcggaataaccgcctagaaagggctgtacgtgcccatcgcccatcagcgcaaatcccttttccgtcacacggtccaaaaaatatctgtcgtgcgaaacggcaatgacggcgcctgcaaaattttccaaatactcctccaacacctgcaaggtctgaatatccaaatcattggtgggttcgtctaaaaacagaaggtttgggctgcccatcagcacacacagcagcaacaggcgccgcctttccccgccgctcagattttccacccgccggtattgcagttctcccggaaacaaaaaccgttccagcatctggctcgccgtgattaccccttgcttggtgtgtatatcctccgctatgtcccggatcacatcgatcacgcgctgcttgggatccagttcctcgctctcctgggaaaaatacccgatttttaccgtctccccccggatcacctcgccgctgtcc

SEQ ID NO: 1700 - DNA, 3954 bp, Unknown
  16S sequences of unknown bacteria
gttcagcagcttaagaaagctcagtgatatagataaataaaaaaacggctccaggtgaagtgaaccccgaagattagacaaaaaagaatattaagttgttacggaatgagttcggtattgtaccgggctcattcctttcagtttcattgagatcctttcgtaattgtaataatcgatatatcgctttagttcatcaatgaaaacgttaacattttcaaacttttctccgtagaacatctcaacctttagtctgccaaagaagttttccatagctccgttatccatgcaatttccttttctggacatactctgtgtaatattgtgctcggcaaggagacgctggtattctgcatgttggtattgccaaccctggtccgaatgaaacaccggcgaagcgtcagccgggagcttagcgaaaaggccatcaagcatctctctaatctgccataggtttggacttgttgagatggagtaggaaactatctctctgttgtacagatccatcacaggagacaaatacactttctcatcgcagactttaaactgtgttacatcagtcgtcaatttttcaaaaggctttgaggcatggaaatcccttttcagaatattatctgcgatcttcccgacttcgcctttgtatgaatggtatgtttcattcttacgctgtttgcctttcaaatcaagaattctcatcagttttagcactgtcttgtggttaagggtgtagcctttgcttctcataaccatcagaactctacggtatccgtatcttcccttattgctgttgtatatctcctgtatttccgctttctcttttacatacctatctgtttctgggtatttgaggtagtaatagtatgtgctccgggccagccctgacagctgcagcaggtctttcagcggatacttttgccttaattcagagacgattatcgctttttgccgttctctcgctcttccgcaagaactaaggcacttagtttttttaggtattctatctccatgcgcagcctttggttctctgcaatcagatcttcctctatacctttctccggcttgggtggcctacctttccttacgccatcagatgtattatttgttctgccgcgtctctccttcatcagaccttcagctccttcttccagatatatgcgttcccacctctgtaccattgctgctgccgatgattctgactgcctgaccaactcgtacttcctggctgtttccctatagcccatttgatgttctcgcatgtccagtataactgctgttttgaattctgccgagtatcttttgtatttttgtccctttttgctcattaaaaatatgcacctccgaaagtgtctaactttcggggcgcatatcaaagccgtgtctacttttttatgctcttttcaatttgcgcaatttattataccttatctaccttatcgtctcaatccatggagcactgcaaacaggaactcatacaatatctcgattactacaacaaccgcaagattaaggcaaagctgaagggcttgccgcctgcaattcacagacaacaagccctttcaacagaaatatttgcctaacttttggggggcagtttacaagtatggagtggtatattaggttttacaccgagatgtgcctcaacagaagtttgagatacaagacgcaacaaggttttaaagatgcttattgcgtgagtttctaagaaaaccgtgttgaaatagtgaccttgtgcaaaataatcattccactttttatgagttttgctacgcatacttcttatagacaacaaaataaaaagctctgataaaaaaggggttgtcgataataaaagctccatttttcgacaaaaatatacaaaaaccggagttcgagatttacttgttggcaaagtccttctgcacagcggtgaccacaagttccacaagatgcttttctgtagccatacgggcttctacacaacaacgtgtaggctgatttgttttggaaacccactcgtcataaatccgattaaaccgagcgaataaagccatatccctaaggaatatatgtacggaaaggatataatccttgctcgaaccgtgatctgcaagcaaacggtctattttattcaatgcaccaactgtttgctcttctatgctgtcggccgaaggaaaggcctgaccgctcaaaaagagcatacctttatatgatatgatctgatgcatcctctcgttgccttcaaaatactctatcataatcaatataatcctcctgctttttatacatattatacgtccttattttcgtttatggtcttataggtgtgctttaggtgattcatcatggcttgtgccgcacctacggaatcattatttacaatggcctgataaatgcgtacatgatcatctatcatctctataatattggattgatacaaagacaattgagatctttgagcttctaattcgccccttatagaataaagaaactccgataaaagtttgttttttgcggcatttattatggcggtatgaaatttcataccggaacgtgtggggttggttcttgtcccggaatttatttgcgcaagcaagtctgcttttaattcttcaagtgcagaactgataagttgtatgtcctcatcggttgcacgctttgccgcaagccctgcaagctgtgattctattataattctggtttccataagatcacttatggaagaacaattagctattgttcctatcaaatcataatttgctatgcgcaaatatgcatctttggttaaaaaagtcccttgaccaggacgtgaacatacaattccagaaaagctgagagcttttaatgcctcacgtatacagttgcgactcacgccaaaccgctcggcaaactctgtttcgctgggcagttgttctccaggaagccatatttcttctttaatctgctgtaacagtaatcttacaacttcttgatgaagaacagtgcggggaacttgataaaatggcataattatactcctactcatatacactttttcacagtataccataatatcattaaataaaccacataatatggctttatcatacatggttctttgattctgtaggaaggtaaaccgtgtcttccttcctacagaagtatttgttatatggatgcttttttacagtttaccagttgcacagctaatacagcggcaaaaacacatacaccgattatatcggtgattgttgcagtattgataagcagtaaagccgcaatgccgcagcctacgcggctgcatactgatagagcgtttataagataaccttcaatagctgcagcaaggcatacgcatccaagcatagccgttataaacgggactatggattctgccaaagtgccgcacataagcaattctgggccgaatgcaaacatgtacggtacaacaaacgcagctagagcaagtctccacgcagcaaagcccacctttgaaggatttgcatttgcaatacctgcggcggcatatgccgcaatagcaacaggaggagtaagcatagacatacaggcgaagtagaatacaaacatatgtgcctgtatctgactaaggccaagctccataagaccaggagctataagtgttgccatcacgatatatgcgccggatgtaggcattcccataccaagcagtattgctataaacatacctaatgcaaggccgattataagtttgccgccagctaaagccactactagagagctaagccttgaacccaggccagtcatgaataatacgcctattataataccggcatttgttactgctgctgcaacggtgatcatttgctcaggagcgtcctgaagctcatgcagcagatttttaagcatttgtttacggtcacttgaaaaaataatggcaattaccaaattggcgattatagctatgaatccggcacgcatggcggtataaccgcacataagcaggactattaccagcacaac

SEQ ID NO: 1701 - DNA, 14620 bp, Unknown
  16S sequences of unknown bacteria
gataaaattaatttattatatataggcaccatacctgtgcatatccgaaatcccgaatactttttaaagcttttttgcgaattgccgggggatgacattgctttgaatataattggcagctgcacagcgcccgatttactttacagcttttccgaaaatgataaaagaatccatatagggaaatcagtaaatcataagaccgcactttctatgataagctcggctgattttcttataaatttcggtaataacaacacacatatgacaccgtgtaaaattttcgagtacatgtcatacggcaagcctataatatcagtctctccgataaaggaggaaccgagcagcaggtatcttgaaaaatatccgctttcattaataattaaagaatatgagaataatgttgcggatgatattgaaaaattgaaaaattttgtttcgcaagctcctaaactcgatcaatcggaatttgataagcttaacggattgttttaccttaataaacccgaggcatttatcaaggttattaaaaaagaggttttgcaatgaaaacagtgctgattaattcctgtaacttcggcagtaccggaaatataatgcgcgaaattgccgaaaccgctgaaaacggagggtatacggcggcggtctgttatccgcaaagccgtgacaacagcagaaagcaaaaggaaaaggattttgttatcgggactcggttctcgcgtaatatacacctgatgcttgcagagataaccgggcttaacggttacttttcatgtttttcaacattaaagcttttgaaaaagcttgataagcttaaaccggatataattcacctgcacaaccttcacaactgctatataaacctttcgctgctttttaaatacataaaaaagcataatattaaaacggtctggaccctgcacgactgctgggcttttaccggacactgcccgtattttgatattgtcggatgtaacaaatggaaaacgggctgttacggctgtccgcagtataaggaatatccgaaaagcctttttgataattcaaaatatatgtaccgccttaaaaagaaatggtttacgggtattaaagatatgacgatagttactccgtcggagtggctggcaagccttgttaaggaatcatatttaaaggattatcccgttaaggttattaacaacggtattgaccttaatgtatttaaaccgaccgaaagcgatttcaggaaaaaatacgctttagagaataaatatattgttttgggggttgcgttcggctggggaaggcgtaagggcttggatgtattcgttgaattggcaagacggcttgataaggaaaaatacaaggtggttttggtgggcactgacgataatgtcgataagctgttgccggaaaacattatttccattcacagaacgcagaaccaaaccgagcttgcaaaaatatattcggcagcagatgtttttgcaaaccccacaagggaagaaaattatccgactgttaatatggaagccctcgcctgcggcactccggttgtaacattcaataccggcggcagccccgaaatgcttgacgaaacctgcggggcggcagtggcaaaaaacgatatcgacgctatgtataacgaaataatacggatttgcgaagcaaagccttatagcttggaggcgtgtattaaaaaagcaaagggctttgataaaaatgaaaaatttggagaatatataaggctatacgaggttttaaatgaacaaaattaaaaagttgattctatcaaatccaattacaaaaaggattgccttggctgcaaggcactttcaattgagttataaattatttataaaaacaatcattaaattaaaaaaattcgaaagaaaaggaaaagttattttctatctcggaatacctgcacacagcaatttgggggatttggcacaaggcatgtgtataagacggtggcttgaaaagcactaccaagaacgccaagtgcttgaaatagaaacaaatgcgcttgtgaacactccgttttcattgttaaataagcttgctgaactatataaatcgggcgatatgatagtatttcaaagcggttatacaaccaccgatctcggaggttttgccgatgaaatgcaccgtgcggttatgaaagtattgcctaatgcggaaatgcttatgctccctcaaacaatattttttaaaagcaaggacaatgaaaaaaggacagcagagtgttacaacagtatgaaacatatgcttttcttggcacgcgaccggatatcattcggaatggcaaagcaaatgttccccgacattcccgttatgcagtttcctgacattgtgactacgcttataggaaattacagctttaattacagccgtgacggaataatgttctgctgccgtgatgacggtgagaaatattacagtgatgaagaaatttcgttgttgatgaataaatgcgaaagactttgcaaggttgcaaagacggatacaacaaaggttggcaaaactgccgatatagtcagaaatgcagaacactatataatgaacgaaatagacacatatgcccattataaggcagttgtaaccgacagatatcatggcactatattgtcgttggcggcaggaacacctgtaattattattaaaactaccgaccacaaggttacaacaggcgcggaatggtttaagggcgtttatgacgattatgtatatgttgcagactcacttgacgaggcttacgaaattgcaaaatctgttttaaaaaaagaattgaccaataagctgccgccgtattttgaaacaaactactatgataagctgccggaaatttttagtaaagaaataaggaaatgaagtaatggaaatatgtgatttgcgacattgcaccggttgcgggatgtgttcaaatttatgccctaaaaatgcaataacaatgaaaaaaggcgaacacggatttacatatcctcatatagacggggataaatgtataaattgcggtctgtgcataaaaaaatgtcccgccaatacagaaaagcaaaccgaatgtactatgaaaaatgtatatgcggcatggaatgttgccagagacactcgaaagaaatcaacttcaggcggagtttgttcactcttggaaaatgagattctgaaagacggcggtgcaattgtcggggtcaaatgggatgcggattttcacgcaaaacactctatagctttcgatgagcaacaagccgaaatgttccgcggttcaaaatatgttcaaagcgacaccggcaatatttacataagggtaaaggaactgttggaaaacgggaagaaagtgctgtttaccggaacgccttgccaggttgccgctttaaaatcatttctcggagaagactacagcggactcttcaccgttgatttggtttgccacggagtaccgtcatatgactgctttaaaagatttttaaatgaaatttcaggcgagtataacaaaaagattacgaatgtcagacttaggtataaatcaccgtattgggattattgcagcgttcgtattgattttgaggacggaacggattaccgaaaatatacggtagacgacccgtatttcacactttttaatattggctattctttaagagaaagctgccatacctgcaaatatacaagcagtcaccgtgagggcgacattacacttgctgatttttggggctatcagccttcctgttttaaaatgcggaattacaataaaggaatttcggttcttgccgctaattcggataagggtattgatttatttgataaaatcaaaaatagtttaaattttgaagctgtatcgttggaagcagctttcaaaaccaataaatcgttttcagagccttacgctattgcaaaggagaaacttaacgatttttggaacgattacgataatggtctttcaaccgataagctttgcaaaaaatatgtaacaaaacctttcagacttccgaatttactttttttaagacgattaaaaaaacgatataattgggtgataaaacgcaaatgagtaactcgagaagtaaaaacgcattacttaacattgtattcgggtatgccgcgcaaatggggatattgatattatcctttgtcggcagaagaatattcttaaggtttctttctattgattatttaggcattaacggtctttattcaaatatactcacagttttatcgcttgcggaattagggcttgatactgccgtattatactcgctttataaaccggttgcggataatgatataccgcttataaattctctgcttaaatatttcaagaaaatatacactgtacttgcggtcggcatatttgcggtggggcttgctcttataccttttttgaaatttatagttaaaagcagccttaacgataacagtctcataattttttatttgcttttccttgtgaataccgttgcatcatattttgtggctcacaaggtggcatttctttcggcttgccaggagcaaagaatacaaaagcttgtaatgctttcatccaaccttattttgcaggtattgcatattatagttcttttaatatggaaaaattattatgtctatgtctctgcaaccgttgttacaacaattataaacaaccttattcttaatgctatatgcaataaaattcatccgcatttaaaggataaaacagagcctgtcagctttgaaaaggagcctataagaaacaggatatactctacatttgtttataaaataggcggtgtggcaataaacaatacggataatatcctgatttcaatgcttgtaagcaccgctgccgtaggcttttattcaaattattacacacttatatctgcgatacagggctttatcgccattatatcaacctcgcttataagcgggataggaaatctcggcgccggcggagacaagaaaagacaatatgaaatattcagtatggtattgcttttttatcattttgtagcggcgcttggtttggttggattcagcttgctttttaatgatgttataacggtgtggctgggctcaaaatatttgtttgacagtaaaaccgttttcataattgcttttaatttttatatcacaaatgcaattacccctatatggatgtatcgtgaagcaaacggcttgtttgatcaggtaaaatatttaatgcttatccgtgctgcaatcaatatagtgctttcggttgctttaggaaaaatttgcggaacatttggtattttacttgctacagcaataagccttatagccacaaatttttggtatgagcccaatattcttttcaaagaaatatttgaggcacctgtgcttaactattggacagggcaaataaaatacttttcagcaacagttttaggtttgattattgcctattattccgtacgcaatataccaaacggaataataatgctgctcataaaagcagtcataattgcagtatctgtttctttgccgttttttgcggtttcgtgtaagagtacggaatttaaaacggcaaccgattttctgaaaaccaggaggaaataaatatgtcactgttcaaaaacaaaaccttaatgataaccggcgggacggggtcgttcggcaacgccgtgcttaaccgctttcttgaaacggatataggcgagatccgcattttttcaagggatgaaaaaaagcaggacgatatgcgccacgaattccaaagcaagctgccggagtcggcggataagatcaaattttacataggcgatgtgagggatattcagtcgattaaaaacgccgttcacggcgtagattatatttttcacgccgcggcgctcaagcaggtgccgtcctgcgagtttttccccatggaggcggtgcgcacaaatgttatcggaacggataatgttttgaccgccgctattgacgaaggggtggaaagtgtgatatgcttatctacggataaggcggcgtaccccataaacgcaatgggaatcacaaaggcgcttgaggaaaaggtcgcggttgcgcgttcgagaagctcgggcaagactaaaatttgctgcactcgttacggcaatgttatgtgctcgcgcggcagtgttatcccgctgtggatcgaccagataaaaaagggtctgccgataaccgtaacagagcctttgatgacccgctttataatgtcgcttgaggaggcggtcgatttggtgcttttcgcctttgaacacggcgaaaacggcgatctgcttatacaaaaggcgcccgcctgcacaattgaaacacaggcaagagcggtttgcgagctgttcggcggaaatcctgaaaatataaaggtcataggcatccgccacggcgagaaaatgtacgaaacgctgcttaccaacgaggaatgcgcgaaggcagtggatatgggagagttctaccgcgtgccggcggataacagaggtcttaactacgataaatacttcagcgagggcgatgaggaacgcaacacgctgtcggaatttaattcgcataacacaaaaatgctgaatgttgaagagaccaaggcaaaaattgcggcgcttgcatatatacaaagggagcttgcggaattaaatttataattcggagaatttaaaatgactgactttcaaatcggcatattaaagcttgtaaaaagtgcgcttacgggcgagagtgtttcggttccggaggactttgactgggaagaggcgctgacaaccgcaaaaaagcatcagataataccggtaatctattacggcgttaagtattcatctcttaccccgccggaggatataatgcggattttggagcttgcgactttcaagagcgtcgcattttcgcagaatcagctttacgcgcttgactgcatatacaaggcgttcgatgaaaacggaatcgattatatgccgcttaagggcgcatgccttaagcttatttatccgcagcccgagcttagattaatgggagacgcggatatacttataaggtatgagcagtatggaaaaacacgcccgattatgactgcgctcggctttaatgaggtgctcgaaagcgatcatgagcttgtatgggataaaaagggaattttgcatgccgagctgcataagcggttgataccctcctataataaggattattataaatattacggggacggctggcgctttgcacggcggggtaacggctgtcggtatgacatgcgggatgaggatacttatgtatatctttttacccattatgccaagcactaccgcgacggcggcataggcatacgccatatgacggatttgtatgttttttcggataagcacccccaccttgatttcggctatattgagcgtgagcttgaaaagctgcggctggcggagttttacaaaaacaccgagcatacacttaaggtttggttcggcgggaaagagcccgataatatgtccgaccgcataacaaatacaattttcggcagcggctcttacggcacgcatgatacgcatgttttatccgccgcagtcaaaacggcgggagaggaaagcagcgagaacgctatcagaaaaaatctgtttttaaaccgaatgttcccgacctacagtgcaatggcttcaagatataaatgccttaaaaatcatccgtcgctgctgccgctaatgtgggcggtgcgctttttgcagataccgttccgtcgcggcagtataaggcgaaatgtcgatttggcaaaaatagcagagccggacaaggtgatagcttacagaaaagagcttgaagcagtgggtcttaaattcgattttaaggagtaacggatgaacatacttgtaacgggcgccaagggctttgtcgggaaaaatctttgcgcggcgctgaaaaatatccgcgataataaggacagaacgcggaatattaaaatagaagaaatttttgagtatgatattgataccgaaaggaacctgcttgacggtttttgcgaaagggcgaactttgtgtttaatcttgcaggcgtaaaccgcccgaaggacaacacggagtttatggagggcaatttcggatttgcctcggatttgcttaatatccttaaaaagcataataataaatgtccggtaatgctgtcaagctctgttcaggcgaccctgataggtcggtatgacaacgactacggcagaagcaaaaaagctggagaggagctttttttcaaatatgccgaggaaacaggcgctaaggtgctggtttaccgttttccgaacctgttcggcaaatggtgcagaccgaactacaacagcgccgttgcgacattctgcaataataccgcgaacgatttacccataaccgtaaatgatcgaaatactgagcttgaactgctttacatagacgatttggttgccgaaatgctggacgcgctcgaaaataacgagcatcactgcgagtttgacggcataaacaccgtaattaccgaaagcggaaaatattgcgccgtacctgtcacccacaaagtaaccctcggtgaaattgcggatttattggcgcagtttaaaaatcagccgaaaacgcttttaatgcccgagatgccggatggctcttttgcgaaaaagctttattcaacctacctttcgtatttgccgaaggaaaaggtcagcttttcgcttaaaatgaatattgacgaacgcggcagctttacagagcttttaaaaaccgcgggctgcgggcagttcagcgttaatatttcaaaaccgggaattacaaagggtcagcactggcataattctaagtgggaattttttattgtggtatcgggtcacgggcttattgaagaaagaaaaatcggcagcgacgaggtgctccgttttgaagtgagcggtaataacatagaagctgtgcatatgctgccgggctacactcacaatataataaatctttccgatacggaagaccttgtgactcttatgtgggctaacgaacagtttgacccaaatcacccggatacattctttgaaaaagtataagtccgataaaatcgcccgcagcaccgcttttggttcggggcagtacttcagtacggctccgctcaccgcaagacggcactgcgaacgattttctcaggactttcaggacttattgaagcggagggaaatttgtaatgaatataaaaaccgattacaacgatgttaagtttaaagataacggcaagctaaagcttttaataatagtgggaacgcgccccgaaataataaggcttgcggcggtgataagcaaatgccgcgagtattttgactgcatattagcgcacacggggcagaattacgattataatcttaacggcgtgttttttaaggacctgaagcttaaagatccggaggtatatatggacgcggtaggcgacgatttaggtgctaccgtaggcaatataataaattgctcgtacaagcttatgaaccaaataaagcccgacgcgcttttaattttgggcgatacaaactcctgcctgtcggcaatttcagcgaagaggctgcatattccgatatttcacatggaggctggcaaccgctgcaaggatgaatgcctgcccgaggagacaaacagacggatagtagatataatatccgatgttaatatggcgtattcggagcatgcccgccgttatcttgccgagtgcgggctgccgaaagagcgcacatatgttacgggctcgcctatggcggaggtgcttcatcataatttagaggaaataaaacaatccgacattcttgaaaagcttaatttagagcctaaaaaatatattttgctttccgcccacagagaagaaaatatcgacaccgaaaagaactttttatcgctgtttacggcgataaatcttcttgccgaaaaatatgatatgcctatactttactcctgccacccgcgttctaaaaagagattggagcaaagcggctttaagcttgataagagggtcattcggcatgagccgctcggcttccacgattacaataagctccaaatgaacgcgttctgcgttgtatcggattccggcactctgccggaggaaagcagcttttttaccggcgtcggcaacccgttccccgctgtttgcatacgcacatcgacagaacgccccgaggcgcttgataaggcatgcttcattcttgcgggaattgatgaaaaaagccttttgcaggcagtgaataccgccgtggaaatgaataaaaacggtgatatcggcatacccgtgcccgattatacagaggaaaatgtatcgaccaaggtcgtgaaaataattcagtcatacacaggcgttgtcaataaaacggtgtggagaaagctatgaaaaaaattaaaaagtacgttaaaattataacagcagttgtgcttgttatcgtgcttttgtttgcaagcggtgtaatattttatctttcaaagcttaatttgataaaattcagcgacggtaaattcaggtggaacggctctattgatacaaacgacagcgaaacgcttgacgaagaaagccgaatgaacgacgcgatagccgatcttgaagaaaaagacgctatcgacgctaccggtgaaatttacaaggataaaaggtttttgaatattctgcttataggcacagacgagtataccgaggagttcagcgagaacgcaagaggcgacagctgtatgatcatgtcggtcggcaaaaaggacggctccttaaagcttgcaagccttgaacgcggtatgggtatgccgatacttgacggcaaatacaaggggcagtacgactggctgacccacaccttccgctacggcggcgcggatcttatgatgcgcgaggtgcgcgagtgcttcaaggtggatgttgaaagatacatacgcgtgaattttgccacctttaaaaaggggatagaggcggtcggcggaattgatattacactgacggcggcagaagcaggctatgttaatggggggaccggcttaaaaaaatatactgcaggtctaaaccatttggacggggaagcggcgctcgtttatgctcgctgcagacatatagacagcgactggcacagaatagaacgccaaagaaatgtcatacaggcggtcgtcaccaaaacgaaagagcttgatatagccgagctgaacggactgctcaatgatgtcctgccgcttgtacagaccaacctcacacggcttgagattaccgagctgctgcttttggcgcctaaataccgcggcgcggaaataaagcagatgaccgttcctgtaagcggcagctacggcggaatgagaggactcggcgggcgcagtcttttctcggttgattttgagaccaattcgcgcgcgctgagggaatttatttacggcattaagaattaaaacggtaatcggtgagaaacacagtgagaaagccttcaagatttaagtcagcccgccgcattttgatttttcgaactttgcgcagtgtgcaatgcaaaaagggcgtatatttcggcaaataattaatgtctactgaataattgcattagcaaatgcaattatataaaatcgagttaaaatctcgattttatgggtcaaaacctttgttttgaccgtcagtatccattgattgtcgcctgattttaaaaagaatcaaaatgtgattctttttaaagtgcaaggttttttcgcaaaattgcgcaaaaaccttgcatctgaacaattcataagtttacaccaacatgctcaggttaaggtacctttgaattgttcagcaggcattaattaaaatacggataaggcgtaatgttctacggcaccgcatgaaaacatatttttaattgtatgggagtgattgcggaatgtttaagggacgaacggcggcggtattatcattgattttatgtctggcttttttcagcacgcttatgcgcggcagaattccgaccttggcggtatcgggaagcgtgatgggaagacccacggttattttagacgccggtcacggcgggtttgacggcggcgcggttgcgcccgacggaactgtggaaaaggaaataaatcttaaaattgccttaaagctgaaggaatttttaaggctcggagggtatgaggtcgttatgacgcgggacagcgatgtttcaaccgacgatgttgaaaccgataaaattgccgcccgcaaaaaaagcgatcttaaaaatcgattgaagcttatgaaggattatcccgacgcggtgtttgtgagtatacatctcaataaattcaccacctccgccgcagcgggctcgcaggtgtttttcggtacgggcagagaggaatcgaaaaagctcggagaggatatacagaaagcgatagtacggcttttgcagcccgaaaacacaagagttaacaagaaggcgacgagcagtacctatattctttacaatgcaaccctgcccgcggtgcttgtggaatgcggctttttaagcaacaccgccgagcttaaacggcttaagaccgaggaataccaaaacaaaatggcgttcagcattttttgcggaataatggattatcataaaattgcggaggaaggctaaatggcaacaaaaagcaaaacggtatttgtctgcggcgaatgcggctatgaaacgcccaaatgggtggggaaatgtcccggctgcggcgaatggaacacaatggttgaggatgtccgcctgccgcagaaggcggcggtgtctgcagctccgcggccggctcacacattttcggcaataccgttgtcgcaaataaacgcggcggacgagcaccgctttgtaaccggaatatccgagcttgacagagtgctcggcggcggcatagtaaagggctcggtgatattgctttcgggcgatcccggaatcggaaaatcgaccatacttctgcaggtctgcaacgcgctgcagggcgatattaaaattctatatgtatcgggtgaggaatcggcgattcaaattaaattaagagcaaagcgcataggcgttgaaagcgacgcggtatccgtaatgaccgagactgatgttcagacggtttgcgaatacataaattccgcccgtcccgatcttgttatgatagactcgatccaaaccatgcagcaccccgatatttcatcgtcccccggcagcatagttcaggtgcgcgaatcggcaaatatgcttctgcgcacgggtaagagccttgacattccgatctttattgtcggtcatgtcaataagggcggcgatatcgcagggcctaaggtgatggagcatattgtggatacggtgctttatttcgagggggaaagaaatcagtcctatcgcattttaagggcgataaaaaaccgtttcggctcaacaaacgaaataggcgtttttgagatgaccgaaacggggcttgcggaggttgaaaacccgtccgctatgatgctttcgggcagaatgagcgatgtctcgggcgggtgcataacctgcattatcgagggtacgcgcccgatattggcagaggtgcaggggcttgttgcggcaacgggcttcggcaacgcgcgcagaaccgccgccggctttgattataaccgcttaaatcttctgcttgcggtactcgaaaaaaggctggggcttatgttctcgaatcttgatacctatataaacatagtcggcggaataaggctggacgagcctgcggcggatcttgccgtggctatggcgctggtttcggggcttcgcgatataccgatagacgaaaatacgattgtattcggcgagataggtctttcgggcgagctgcgcagcgttccgcgcgcacaggcgcgtgtaaacgaggcggagcggatgggctttactcgctgcatactgccgacggcgtgccttaagcagatcaattccgctcccgggggaatcaagcttatcggggtcaagcggctgtcggacgcggtggcgtttattaagtagagccgccgtttttgtcggtctcgggtcggcttaaatacgggcacacccccgaaacggaatttacaaccgtgcatttgttaagcgtacagtagccgtcggactgatatttgcagttttcggcgcattgaattaatcccattttgattatctccaaaaccgttatatacggttagtatgaaaaataaaatcaataatatacaccaagagcgcggcaacttttcgccgcgctcccctacgggaatgccgctcgctcgaaaatcgcggattttcggactgcactccctgctcttgcggtgcccaaagaaaataatcgcttggagcgcgaattttctttgaccgcggcgccataacgccctccttttatccgccacaggcggcagtcggttgttatgctccgccaataccaccccggtgacctcctgaaaccgcttgttcagcggtttttcgcttacaaggtgtttttccgccgcacaggcgtgggaaaaacgaaaaatgcggcgttaccgccgcaaataacaaattgagggcttatcgataaattgtaatatacacaaaacggctgttcgaaacaggtatttagctttcctgtgctcgggcggctgttttatttgtctgcggaaatttcaagaattcataaaaatgttatggtacaatagataggtaacaaaaaaagaagaaaattcatctcaaatatggtatgatgttaataactacaaaaacaaagtaccataagaggtgaattttctatgacaagtataacatcaaaa

SEQ ID NO: 1702 - DNA, 4061 bp, Unknown
  16S sequences of unknown bacteria
gagtagagagcgttaaaaaagcggccgaaaaagtcggcggaaagacaacagcatttttttccgcaattgctcagaagtataagacggccgtcgtgtttacatttgtagaaaaggttggagaaacactttaccatacagcagttgttctggaaaataatggttcaatcttgggaacataccgtaaaattcaactcaatcgagatgaaaggctatgggcctcgcctggcgaccgtgtggagtcctttgtgtcttctgaaatcgggcgaattggcgtggtcattggcgatgaatatttgttcccggagatttttgggctgcaacagattaaacgtgcagatctcattgcaatgccctccgcctatgtcagcggtggtggaaaaatagaggcgaaccccagaattgttgcacgaaattatccgaagcaggcagtgcttctctggccatcggaacccaggcttatttggtcgtggccaattatgtcggcacagaaaagggatatgcaggcggcagcggattatataccttagaacccatttatggaaaagaccagcccaggctaaccggcacggaggaaattggatttgttacccgtttcgaaactttggcagcagaaacgtggtggatgaatcaggaagttcgggtgattaccaggaagccaaatttctatacaccacttactatataagggctttccgcattagtcggccccttgttataaagataagaggcattttcaaatgttgagttttgatagaaagggggctaacgaaaaagattcgacagccacagcgggcagagatctgattttaagaagaggtgaagatgcatgaaaaagtttagaaagatttccagtttattgttggcctgtatgatgctcctgttgaccgcctgcggtggaaataacaccacaggggaagaagtgcaggcaccagtcgttacaacaggtgaagcgggtgccatggagaggaccgtcaaccccgcagaacctgtggaccgtgatgatgttattttctgtcaggtcaatgagccgaaatctctggaccctctggacggcgaaaatgcccaggactggatgttcccgcgccagattctcgaaacactgattcgtgacgcaccaggtgatcccaccacccagattcctgccatggctgagtcctgggaattcagtgaggatgggctaagtctctatctgacaatccctgaaggcgtgaaattttctaatggatatgattgcgatgtcgagaatattgtgtggtccttgaatcgctcctttgaagcccccgctaccgatgcctataccggtatgattaaggatgctactgttgttgatgaccatacggttgctgtcaacctgctttatccttatgagcccatcacaaagattctgaccaatgttaccatgggtattcagagtaagcagtactatgaggagtgccaggcaaatggcacctcttatggacggacgattattggcacaggcgcctataagctggatagctggaccaatggtgaaaagctggtccttgttgctaacgagctgtatcacggggaacctgcgagtattccaaccgtgacctgtatgattatggccgatcaaaccagtgcaggaattgccatggaaatgaacgaaattgacgtatttttcggtgtttctactgtcgacttgaaccggtttagaacgaatcctgacctccaagtgttgtccgctcggagctttacatattattccgtctggttcaatacaacgcgcactccctttgataacccggctgttcgcgttgctctgagctatgcgatcgaccggcaagctgtgattgacggcggcgcaaacggcgttggatggaccattgagtgccccatgccctctggtatttttggctaccaagaggactttaaacacaatccttatgatccggaaaaggcaaaagaactgttggccgaggctggttaccccgacggctttagctgtacactaaagtgtacaacagaggattatgtacagatgccggcgcaggttattcaagagcagctgagacagattggcattgactgtgagctggtgccgattgagcgtggcacctacttggaggaagtccaggttcagggtgatttcgatatcatcttcgccggttctggcgccttgtacgcggatgctgattctgttacctataaatgcctgcacagctccgccaagggccagggcggcaactggtctttgtatgagaacccggagatggatgcgctgttggaagcggcccgccaggagattgatcctgatgtccgttatgaattgtacacccaggtttccgagctctgcaaggaggattgcccgatcatccctgttatgcaaagcaccaatacattaaccgcatggaaagatattcagggagtctatgggcatcctgcgtctgcattcctgttccaggattattactggcttacagaataacagagatcgcacgaaatacccatccatagactttttaaggggaaacctcctgaagtgctaaagtatcttatggctttatattctacatagatattcttagaggagatatgctccgatggaattgattggggcatatctcctctattctatatgaaaggagacggggggcgcatgttaaagttcattggcaagcggctcttgtggctgattccaatttgtctgggtgtctctctgattatctttgcaattatggaccttactccaggcaacccggcccgcctgctgctgggtgaaagcgcaacggaagatgccgtcgcagaacttgaagaagagcttgggctgaataagccctttttcaccagatatcttgactgggtttccggtgtttttacaggagactttggaatttcctaccggacgcgggaaccagtttttgacgaggtcatggcgcgcttacccagaacagtaaaactggcttttttgaccagtgttctctccgtattatttagcattccattaggaatcttatctgcggtcaagagaggctccgcattagacaatgtctctttggtggtttctttgatattaacatcggcgccagctttcctcgtgggcctggtgttcatattaatcttttgtctttggctaggatggttccccgccaccggtgtcagtacatggaagggatatgtattaccgggtattgcagcggcgttaaactatagtgccgcgcttcaacggatgatgcgttcctccatgctggaaaccatccgctcagactttattcgtacagctcgtgcaaagggctgcaaagaaatgcgcgtcattatgcatcatgcacttggcaatgcaattttgcctgtaattacgctgatcggcattaactttggctggcagttaggcggtactattattattgaacagctattctcaattccagggctgggaacattgcttcttacctcagtaaattacaaagatgccccccaggttatgacatcttgtgtgttggttgccattttggcggccttgattaaccttgccgtagatattgcttatgcatatattgatccacgtgttaaggcacagcttttcggaaaatgaaagaaggaggatgttgcaatgaacgcgagcacagtgaaagcggatactcttgaacctagacatgtgtataagaaaaaaagtcagattcgcgaagtttgggaacgatacaagcgcgataagctcgcaatgtttggcctcattctgtttgtaatcatgtgtgtagccgcattgtctacaaacttttttgtcgattatgacggcgatgttattaccatgcacctcaacgaaaaattttgggggccctctgcggatcactggttgggtacagatctttttggccgcgatatcctcagccgtattttgtggggagctagaatctccatgtttatcggcatggcgtctgtgctgatgtctttgatttttggaaccattatcggcgcagccgcagggtactttggcgggtggattgatgaaatatccatgcggctgatggacgttgttttggcaatcccagagacattgctggcgatttgcattgtggccgccatgggcaacagtattatcaatc

SEQ ID NO: 1703 - DNA, 25354 bp, Unknown
  16S sequences of unknown bacteria
tcggcgaaaagatcaccgctggtttcttccagtcggtaacctgccgtacagccggcttcaactccattgaccaggctaccctcaatcccatcagcaagggcatttccactatgctgatgttcattggtgcggcacctggttccaccggcggcggtgtgaaaattaccaccttctcggttctgattatgacagtggcttcggtgctacggggccgggaggaagttgtgatgtggaaccgccgggtggacaagagtgttgtctacaaggctgtgaccattgtggtctgtgccgcggctctggttctggtggcgagctttatcatctccttcctgctgccccagtgcgcgttcctggacatcatcttcgaatgcacctctgccttcgcaaccgttggcctctcctcgggcgtgaccggtgaggccgataccatcagcaagctgatcctgacgctgctgatgtatctgggacgggtaggcccggtttcctttgcgctgtccctggtagcgggaagcagcagccgcaaggagatcatgccggaaggcaagatcgtggtgggctgagttccccaaaaagaatatgctataaaaagaactgcccgatcctgcgaccggacagttcttttttgtgcagtgctaaggcttcatgatataggccatatcactgacaatgccttccacattcttcatggcacggttggcagctttcttcatcttgcggcgctgacgggctgtggtcatgttggttgcggcatacatggcagtgccggcagccagccccacagccagtccggtcataacgccggtggcggaacggttcatgcttttcacctcgttttcctgtgccgcggcagatgacggcacaaccatagcatggctctttttcatcaaaacttgcatggttccctgccagatcgccgcaggaaagtttctgatgtttttccggaaatttctttctacatattgcacttattctgtgattatagtatactttcatttagtcaatattaccttaatatttctggactttcaaaaatgcggatttttatatgtaattatacacaaatacaggatttttgatttacttataattgtgtttattgcataaaccgatctgaacggattcctgcattgggaaactttgtcacccgggaaaaagccgcctataatggaagtacagagtgaacggaggaaaatgtatgaacagacccttgcgtgtcgcagccattcaggatatgtccggatttggccgctgttctctgaccgtgattttgccggtgctgtcggtgatgggagtacaggtcagcccgattccaacggcaatcctgtccactcacacaggcggattcggcgatgtggtaatgcgggatctcaccgattatctcgccccctgcctggaacattacaagagtcagggaatcgaatttgaatgcgtatacagcggattcctggcatcggaaaatcaggtggatcactgcctggaatttttccggagctatcctgaggcattcaaagttgtcgatcctgtcatgggcgaccatggcaagccctacaagacctataccaaggccatgcagaagcggatggcagaactggtgcgtgtggcagatctgatcacgcccaatgtcaccgaagcctgcatcctgctcggggaggagtacgatcacaatcccattacccggcagcaggccaagagtatgctggtccggctctctgaaatggggccgcggtatgtggtgatcaccggcatgcagctggcatccggcaccatgaccaatgtgggctatgaccgggaacgcaacgcgttctggatggtaccctgtgagtatgtaccggtaagctatcccggaaccggcgatatgtatgccagcgtactcattggcggattcctgtccggcgacagccttcccatcgccatggaccgtgcaacccggttcaccgagcttgcaatccagaccaccttcagctatggcaccgatacccggtgcggcgtacagctggagcgtgtcctgggctggctcacacagcagactgtactcaaaggatatcagatcctctgaaaataattgtttgaaggtgtggtaattatggcagcaaagaaatcgaagctcagcgtttataccctgtccgccatcggcgttatgacagcggtatcctttatcagcaactttatctccatccccatcggcaccctgacccggattcacatgggcaatgtgttctgttccctgtccggtatcctgctcgggccggtctatggcggtgtggccggcggccttggcgcgttcttctatgacttcaccaacccgctctatgttgcggaagctcccattacgctgttcaataagttcttcatcggcttctttgccggcctgatctcgcacaagggcggtcactatggagaaaaggcttcgctgaactttgtaggcgcgctggtgggcaacctggcttacaccctgctgttctacggcaagaacttcatcagcgaatacttcctgctccgcctggagatgaacaccattatcgccaatatgctggttcgcctgagcgcatcggccctgcagatcccgctgaccctgattgtcaccatgatcctggcgcccttcttcctcaaggcaatccagaaggcaggcattcacagaaaactgttcccggagcatacagagggccattccgctgcataaggctcctttgggactgaatgaaatcgaggcgttggaacaatgactgaagaagaaaagatctttgcgggaaagatgtttgacccccgcagtgaagaactgcggcagatcaagcacaaggcccatgaggcctgccgccgctacaatacactggacgaatatgacccggaacgccaggagctgatgcgcagcatcctgggcagcacaggcaaaaccttctacttccagggacctgtccagatcaactatggcagccatacctttatcggcgagaacttctttgccaacttcgggctcaccattatggatgacgcccgggtctatatcggcaacaatgtctgcttcggacccaatgtatcgctgatggcaaccacccatccgctcattgcacaggagcgcatgggcatggatgccgaaggccgtaccaccatggcagaatatgcggatgagatccacatcggcaacaatgtctggatcgcctgcaacgcagtggtgctgggcggcgtgcatatcggcaacaatgtcgtgatcggcgccggcagcgttgtcaccaaggatattcccgatggctatctggccttcggcaatccctgcaagccagtgcgtcccattaccgaggcggattccaagaaggatctgatcctccccgaggaccgcaagcactttgaatacaacctcatgtaaccccataccgacccattgcaaaaaggagcctgcatttctgcaggctcctttttggcgttattgataccgggcgacggcttcggagatggactccaggaatgcctcctcaccgaaggtgttgagcttgaggaacatggcctggctgccgccggatgcgatggcggaaaggcgtacgccatgggccgtttccaagagcaggacactcagactcacccggttgccgcccagggtgctgtaccgctcatagacccgcagtacgcaccggcccgagctgctctggaagtggctctcgtcctccatcgaggcggtgaagctgccctccagcacagcggtgtcaatggcgttcagtatggcggaaaagttcccgtgcagggttgcttccagttttgccattatctttcctcctgagtcagactataaaaagagagggggaaaagtccctcccctttttgcggatcagtaatcgaagtgctctcccaccagacggcaggcctgcatgaccgcagccgtactgaggactactaccgccgataccgaaaccacggcgagcagcaggagcttggatttattgtgagtaagccagcatttcatgacagaatcctccttggttgtggaatggaaaacaggctccggaataatctcaccggcgccgggagtgttggtacaccggggcattttgacgctttggtgtgctgatagcttcattgtagcacagtactccgggaaaactcaacagcattttgtaaacaaattatctccatttcccacagccagcatacagccccgggcaaattgctgcaatcgcagcagagccctgttgagccggcggttggcagtggaacggtcaatgcccagcagacgggaggcttccgccgccggaatccccctgcggtagcgcagttcgatgatctgctgttcggtgggggtgagctgggtttcgatcccggcttcgatcacccggtggtaaaaggaaaggctttcctggttgtccccgaagccctcctcccggaacagcccggtcagacagcggtccatatccgcatagagcagattgcggcggttgtaggtgggatagggttgacgcaaacggcatttcctccttatgaatggcgcagcaggtagagtcccactgcccgggtttcgtagtattcctggcggagcagatcgatccggcgcagcgcatggagatattcttttccgtacaactgatccaggctgccccggagctgccggatgcgctgatccagaagttccgcagaatgaaggtattcttcggcaagctgttgcatacaggttcctcctcaaaaagaacaaatgttcgtgattttgcactgaaaaaagcggagtgttctccgcggattttttcttccgggccagccagcctgagtggtgtgccgacgataccctacatgttctattgtactgtgggaattagactttgtcaatagaacataatctaatttagccatacagaacccggtcgaaaaagtttggtaaccaaaaaaacatggaaaaccgggtcggactgtgttacaatggctgatagaaatttctactgcgggaggaagcctcgaatggggaatgaacgacgccggaaaaagaaaaaacgcctgaactggccggcagttctggccttgatgattctgctgggcggaggcggcctggcagcggtctggcagctgaagccggaactgctggaggtgttcagcgctgtgggacagagcaacgcccaggagccgggttccgccgatgagaacccggctccggaggagggcagcgatgccgcgccccagaatcagtacccggtgatcaccctgggggctgataccgtctgggtgcaggcgggcagtgactttgatcccaccgccaacctgactgtgaccgatccggaggatggggagctgagctatatgcaggattccatcacaccggtgccgggcacctataccatcatttccacagtggacctcaccacaccgggcgcctatgtggtgaccgtttcggcaaaggatctctccggcgccatgtccgagaccggctattcggtgcgggtgctggcagagggcgaacagcccggcagtgctgacgccacctatattgacgggattctgctggtgagccgggattatccgctgccccggaaccagggcggttccaatgccgaggccaatgcggcactgcagcggcttcaggcggctgcggcggcagagggacatgacctgccgctgctgtcggggtaccgttcctttgatgagcaggtggtgcttttcaaccgctatgtgcgcaaggacggcctggagctggcgatccggtactcggcgcctcccggacagtcggagcaccagaccggactgtgctttgatgtagccagtctgtaccgcacctttgccaccaccgaggcgggcatctggctgaatgaacactgcgcggaatacgggttcattatccggtatccggaaaacagcgaggacatcaccggctatatgtatgagccctggcatatccggtatgtaggggaggaaacagctcaggccatcatgtcccaggggatcacgctggaggaatacctgggcgtagcctgagccttcgacgcatatcgacagggacaatcgtctatactcaaacagtatcaaggaaaggaaaggtgagatccatgctgaaccggggtctggtgctgggcgggggaggttcccgcggcgcctatgagatcggagtctggcgggcagccagggaactgaagatcgactttgatgtggtaaccggcacttccatcggcgcgctcaacggagcgctggtggtgcagggggactatgacttcgcagtggacatgtgggaaaatatgaactacgaagcggtgatgaccaatgtcaaggcagaggatttcaccacgctggacggcacccggaaggcgttccggactgccctgcgggagatcgtagcggatggcggcatggagatcggcccattggaggagttggtgcgcagccgtctggacgaggagaagatccggcagtcgcccaaggaattcggtattgtcacggtggagatccccagcctgaaggcctctgaaatggccaaggaggatattccccagggacagatggcggattatctgttggcatcggcggcctgttatcctgccttcaagcgccgcaccatcgacaacaagagctatgtggacggcggctaccgggacaacctgcccatcgaccttgccatcgagctgggcgccaatgagatctgggccgtggacctgcaggcgctgggccatgtgccccagaagctgatgtatgatattccggtgcggtacatccgcagttactgggatctgggtatgttcatcacctttgatccggcacgcatccgccgcaatatggagctggggtacctggataccatgaagaccctgggtctgctggacggctttgcctactccttccgggaggggcagatggcccggatctgtgaccggttcctggagggctcggaacgggccatgaaggctctcaccacagcggaaaacccgctgactgcgccggcggcggcagctctggaactgcggctgtccggggcgctcaaatggggtgcccggcggcgcaattcggtgaaggtcaacctgatgcgtcaggcggagctggcagctgagctgctggatctcgacccggcctgcatctatacagccgagcggttcaatgaggagctgatccgccggttctcggaggaggacagccaccagcccggagagatggaacaggcgctgcgccgggtgcatgagaacccgtccaccgcttcggagatcttcggacgcttcaagtcgatgactggacgggagcggctgcacatcgtcacccacctggtctatggggcgctgtcgggcagtgtgcccatgccggcagcccagctggcaggcgctgccttcccccgggagatgtcggcggcgatttatctgtggctgctgggctgcagcaccgacaccggagaggagccgctgctccgtccggcccaggcataggaggaaaccggacccatgaaacggaccctgatcctgtacgcatcgacccatcacggcaatacccgccggctggcagaggccatgacggaggcggcaggggcagagctctgtgacctgctccatgacccattgcccgacctgtccggctatgacctgatcgggatggcatcggggatctattacggaaaactgcaccccaggattccggaactgctccggcagctggaaccccgccccggacagagggtgttcctggcctatacctgcggcatccggtaccgtgcctatgagaagccggttctggaactgctgcggcagaagggaatcgactgtgccggctgttatgcctgccggggctatgataccttcggcccgttcgggaaaatcggcggcattgccaggggccgtcccagcgcggaggagctgcgccggggcggggagttcctgctcggcctcaccggcgccaaagcccgtgcataaaaagaaacaggacggctgtatcagccgtcctgttttggcgttctgagggatcagaagtagtcagagaaatagggcttttcgatggggatcaaccgctccagataggggatcaggtgatagtccacctggatgcgctcgttttcatagaggtagctcggacgcttgtagcccatcagcatggcggtgagggtctggatatccatctccaccatggcggcgtcctcttcgcagtcggcacagggctcacaggtcacttcgccgtccttgacgcagagcaggaagtccccgtcattccactccgccatgcggtcgtggatgcgcagatgcagccgcagatcctcccggaagttctcgaagggatagcgggagaggaattcccgtacatcaatgatccggcccatcacattgggttcgatggtctcccggatctcgctgtcctccagcaggaaggccagcggttcgccggtgtagttgtagccccgtacatcggtgatcatcgagaagtgcgccgagatgtagttccacaggccgtgccgggcctcctggttgaggtacaccagctccttgatgttgaaatgttcgttttcaatgctgtacgccacatagcccagcgggcggtgcttttcgttgtagtagatggcggcagtcatgtcctcggtttcccagcgccagtattcgtcccaggccaggtcgtcccggatcagcgccccatggtgctgcagcgcgaagtactcatagacattcttgagatcctcgctctccagcggcacccgttccaccatgcccggcaccggtttgcgccggggcagctgggtatccttgatgtggaagctcagtttatccgacaccacttcccagcccatcttccggtaaaagggaatggaataggggcagagaatggagatatactgccgtttttcccgcatgtggcgcaggcattcgctcatcagcgagtggatcaggccgcgtccggcatattccggataggtggctacgccggtgataccgcccatctcgaaccgttcgccttcaatgttcatctccatggggtagatcacaatctgggaggccaggttttccccatggaaccatcccagcacaaaggcgtttttcagcatgggtgccttggaatatttcatttcatcttcctgccagccggttttgagcatttcatccgaagtcacctggaaggcatatttgagcagggaattgaactgctccagatcccggtcgcccagttcccgcatggtaaacagatcgcggttctccatattgtccctcatttcccgcagccggcagaatcagtccggccttgctttgacttcattatagtatagcgcggcagggaaaatcaaggcgaaccctgcgggaaaatcggcagggatcggctggaaaatgccctggatgctctctgacacccgggaaacgcctgttcccggcatgactctggggaaaaatatatccggacatggaaaaagtggggaaaattcactatacaagcgtcaaatctatggtatactgaacttgtgataccaaattgacaagggggaaaaccgtatgcaggaatccatccgccatgcggaacagttgctggaaaaagcagaagtagtcacactggcagtcaacggagaggacggctgtccccgggcctatgtaatgaccaaattgcccggagagagcatccgggtctttccgttcctggccaaggagggctcggaaaaggtccgggctctggaaaaggacccccgggcctgtgtgagttatttcgcgccgggcggcagtgtaagcctcaccggtacagtacagctgatccgggagagcagtgccctgagggagctctgggttccggaactggaccggattttcccgatgggaccggagagcggagaactggtgctgctccggtttgaatcccgggcagccaccttctgttttatggggaaagtggaggagcagccgctgtaaaaagacagcatcagccctccggaaatcgaggatactatggacagaaaatcaaaagacggcatgccgcgctatcagcagatcgcgctggatattgccacacagatcgtcaaacagcagtataaggtcggggaccgcatctatgcgcgttcctcgctggcaagcaagtaccatgtttcgcctgaaaccgcccgccgggccatctgccttctggcggatatggacatcgtggaggcggaaaagggcagcggcgtggtgatcctctcggtggacaatgctgcccggtacctgcagcagctcaccggcgtggagaccatgaccagcctgcgccagagcatccggcaggatctggacaaccagcttctgctggcccagcagctgcgggagaagatgtccgatctcatggaccgggcagagcgcttccaccacctcaacccgttcaatccctttgagatcacggtggaggtgggctccatctgcgagggcaagaccctggcggatgtgaacttctggcagaataccatggcgacggtcatcgccatttcccacaatggggagctgctgatctcgcccggaccgcacaaccggatgcaggcgggggacattgtctactttgtgggcgatgagaatgcccccagccgggtggaccggttcctgcggggcggaagatagcggggcggtcccccttgcgggagggccgggatttgggttataatataataactgcggtgcagctgttatatcttaatagccggacaatctgcaggcgctgcccgggggagtgtccggatggtcgattatatcctttagacggctctgctctcgggcagggccgggattttcccgggcgttttttaagccgggaacagtgcaacagagcggaggaaacaactatggatgtccgggtcggcgatatactcacaatgaaaaaaccgcacccctgcggtgcgaaggaatttctggtgctgcgttcgggaatggatttccgcatccgctgcaccggctgcggacacgaggtcatggtgccccgggtcaaggcagaaaagaacatccggcagatcacccgggaaggcgtgattgtctatccgccggaaaagaatcccgctgggaaaccggcggcagacaaaggagaacagtaaattatgtttgaaaagctctcgtctgtggaagagcgttatgaggacatcagcacacggctgagtgatccggcggtcatcagtgacaatgagaagtaccgttcgctgatgaaggaatacaagaacctgacccccattgtggagaagtaccgggagtaccgcaaggcctgtgcctcccatgaggaggcagccgagctgctggaggagggcggtctggaccgggatttccgggagatcgtcgaggagcagtaccgggagagccaggaggagatggaccgcaccggtgaggagctgaagatcctcctgctgcccaaggaccccaacgatgacaagaatgtcatcatggagatccggggcggcgccggcggtgaggaggcagcgctgtttgcccattcgctcatgcgtatgtataccatgtatgccgagcgcaaccactggaaggtggaggtgctcaacctcaacgataccgagctgggaggcgtcaaggaagccagcttctccatcaccggagagggcgcctattcccgcctgaagttcgaaagcggcgtgcaccgggtgcagcgtgtgcccgaaaccgaaacccagggccgcatccatacctccactgttacagtggcagtgctgcctgaggcagaggaagtggaagtggagatcaatcccggcgacctgcaggtggatgtgttccgtgccagcggcgccggcggacagcatgtcaacaagaccgagtcggcgatccgtatgacccacctgcccaccggcatcgtggtggaatgccaggacgagcgcagccagttcaagaaccgggaaaaggcgctgaagatcctgcgcagccgcatctatgagaagaagcagcgggaagcggacgagaagatggcagcccagcgcaagctgcaggttggcaccggtgaccgttccgagcgcatccgcacctacaactatccccagagccgggtgagtgatcaccgcatcggcctgaccctttataagctggacgccattctggacggcgatctggacgaactcatcgacgccctgctcaccgcctcgcagaccgaaaagctccagcagcaggaggaattttaatcgtggaaacgatggtatataaaaccgataccgaaccggagctccgccaggcagtcaaggcggcgggggaactgctccgggagggaaaactggtggcgatccccaccgaaacagtctatggcctggcagccaatgccctggacccccaggcagtgaacgccattttcaaggccaagggccgtcccaatgacaaccccctcatcgtgcatatcgccgatctgtcggcactgcccgatgtggtttcggtggtgccggaaaaggcccgggtgctcatggagcgcttctggcccggcccgctgaccatcgttctgccccggaatccccagatccccaatgaaaccactgccggtctggatacggtggcagtgcgtatgccgtcccatccggtggcccaggccatcatccgggagagcggactgcccattgcggcgccctctgccaatctgtccggcctgcccagccccaccacagcggaacactgtgtccgggatctcaccggcaaggtatcggctattgtggacggcggcccctgcaacttcggcgtggaatctaccgtcatcaccctggccggggaccatccccgtctgctgcgtcccggcgccgtgaccctggaacagctggaagccgccattggcgcggtggaagtggaccatgctgtcaccggtcagctggaggagggacaggtggcagcctctccgggcatgaaatacaagcactattcccccaaagcactggtctatctggtgcggggcagtgccgagagcttccggaagtatgtcaatgcccttccgggagagaatatctatgccatggtctttgccggggaaggcgagggactgcgcaagccgttccgggagtatggcgcggaaaccgaccatctcatgcaggcccgggagctgttctggctgctccgggagtttgatgacctgggcgcgcaggccatctatgtccgctgtccgtccaccgatggtgtgggactggcagtctacaaccgcctgatccgggcggccgctttcaagtttatcgatctggactgacccttgggagggagaaacatgaagcagaataccgtggtgatcggcctgaccggtcagaccggagccggaaaatccacagtgggggaatcactgctgcgccggggtgcggcctgggtggatgcagatctcattgcccacgatgtggcggataatgagaaggtctgtctggcagacctggcactggagtttaccatcgacatcctcaatgtggacggtacactcaaccgcaagaagctggcggatattgtctttcatgacaaagccaagctccgccgtctgaatgagatcatcttcccctatattatccgggcgatcgaagccgagcttgcccgtctgcgggcagaagggcaccgctatattgtgctggatgccccgaccctgttcgagagcggctgtgaccggtactgcgatgtcatcatctcggtggtggcagatgaacagctccggctccagcgcatcctgggacgggacggtctgacccatgaggaggccgaagcccgtatccaggcccagcaccgggagagctattatgtgcgccggtcggactttgtcattgaaaacaatgataccgtggataccctctgcctgaaggtggcggaagtgatgagccgtattgaaaccggtgagcgtccccgtcagcagcggcaggctgaggaggcacagcaggaagcccggcactgaaatcaaaccatacagtcaggagtggcacgatgaagcaaagaagaagccggagagggtttggcgttcttttctggctgcttgcggcagccgtggtcgtgcttggggtccgttttgcctcggaccgctattaccgcatggcatatccggtggagtatcaggcactggtggagcagtactgtcaggaattttcggtggagccggcactctgttatgccgtgatccgtaccgagagcagcttcaatccggaggcgacctcatccataggcgcccggggactgatgcagctcaccgaggagaccttcgactgggtgaaatcccgtctggagccccagtcggataccacctatgacgccatgtatgagccggagaagaatattgagtacggaacctatctgctccatgcgctgaccgagcagttcggcagtgtgaacaatgccctgtgtgcctatcacgcggggtggggaagcgccaccagctggctggaaaatcccgagtattccgctgatggagagatacacacaattccgtatgcggatacagcccggtatgtggaaaaagtggggcgtacctgtcaaatttatcgcgagctttatggtgaataatcccccttgtcagtaggaattattcgcgttataatgaaactggaaagacgggaaaactaggaccgggatttgagtaaagtcacggtttttataatgtataaaatgcaaaaggaggagatcccatgtgcaaggaaaaaacaccgggcgagctgctggcagaagagcttttctaccgcaccaagaatgcgggggaggagctggatgccgctgaactggcccgggcagatgcgttctgtgaggagtacaagaccttcctcgaccatgcaaaaatcgagcgggaagcagtgcgcaccaccgtggcaatgctggagaaagccggctatactgcctttgatcccgaccggagctatcagcccggcgaccggatctaccggaatgtacggggcaaggcactgatcctggcaaccatcggtactgaggatctggaaaagggcgtgcggatggtgatcagccatatcgactccccccggctggacctcaagcccaatccgctctatgaggacggcggtctggcactcttcaagacccactactatggcggcgtcaagaagtatcagtggactgccctgccgctggctctgcacggcaccgtggtgcgtaaggacggcaccgtgctggatgtagtcatcggtgaggacgccggcgatccggtgttctgtgtaacagatctgctgccccatctggcaaaggatcagatgaccaagaccctctctgagggcatcaagggtgagcagctcaatgtggtagtgggttcccgtccctatccggacgagaaggtcaaggagaagatcaagctcaatatcctcagcctgctgcatgagaagtatggcctggtagagggtgacttcctctcggcagagctcaccatggttccggccggcgcggcacgggatgtgggttttgaccgcagcatgatcggttcctacggtcacgacgacaaggtatgtgcctatacctctctgcgggcggcaatggatgtggctgcccctgccttcacttcggtgacagtattcgctgacaaggaggagatcggttcggacggcaataccggtctcaactccgatttcctgaagatctttgtggaagatctgtgtgcggcccagggcgcggaaagccgccggaccctcaccaattccacctgtatgtcggcggatgtgaatgcggccttcgatcctaccttcccggaggtagctgaaaagcgtaataccgcttacctcaaccatggcgtagtcatcaccaaatacaccggcgcccgcggcaagagcggcaccaatgatgcgtcggcagagttcatgcactatgtacgggatctgctggaccgcaccggtgtgatctggcagaccggtgagctgggtgctgtggaccagggcggcggcggtaccgtagcgatgtttgtagcccacatgaatgtggaggttgtggatgtcggcgtgccggtgctgtcgatgcacgcaccgttcgagctggtttccaagaccgacgtttatatgacctaccgggcctttgtggaattcctcaaggcgtgacccatcagtcccttctggaagatacagtatattgaatcggaaaggaagatttgatttttatgctgattaaagttctgctcctgctgtgcggcgtgatggccattacaggcgtgatccagtacatttattactcggtgaatatgcaggccggtgccaaccgcttcgtatttacgctgggatttacggttctgctggctgcacctctgatttatcatctgatgatgggggatgttacccggctcaccccatttaagctgatcctgatggcatatatcccagtcaccttcttctggatacgcttggagttcctgcgcaggtctcaggcagtccatgacgatgaggaactgttctgatttctgaatacccgttctgacaacgcccttctgcccgagcacatggacagaggggcatttttctggaaaagcggcgcaaatcgccagcggactgggaaaaaaccagccccgcccatttttacagcaaaaaagaggcaatgtcaggaatttttcagcttgacattgcctctttggcgttatataatattatactgtatcagaatggacagctatgtcttttacgagaaatagtataccacatagcttccaaaaaatcaatatgttatcgcaaaaaccacagaaatttcccgaaaatttttgtggtatttgaccaaccgtaaatggatgaatggagtgattatgcctatggtgaatgtaaaacctgtaaaactgggcaaaaatgtccggatgagtttttccaggataggcgaagttctcgagatgcccaatctgattgaagttcagaagaactcctatcagtggtttcttgacgagggcctgaaggaagtattccacgatgtttctcccattacagattaccagggcaaccttgtgctggatttcattgactatcatctcgatgatcagcccaagtacagcattgcggaatgcaaggaacgcgataccacttatgcggctccgctgcgggtgcgagccagcctgctcaaccgggaaaccggcgaagtaaaggagcaggacatctatatgggcgatttcccgctgatgactgacagcggtacctttgtaatcaatggtgctgagcgtgtcattgtatctcagctggttcgttcgccgggtgtatactattcttcttcccgtgacaagaccggtaaggaactgtttgccgccactgttatccccaaccgcggcgcatggctggaatacgaaaccgactccaatgatgtgttctatgtccgcatcgacaagaaccgcaagctgcccatcaccacctttatccgtgcgctgggtatcggtaccgatgaggagatcctgggtctgttcggcaatgatcccaccctgcgtgccaccattgagaaggatactgccaagagcgtagaggacggcctgctggaagtataccgcaagctgcgtcccggtgagccgccgacggtggagagtgcccagacccatctggacaacctgttcttcgaccccagacggtacgatatgtcccgggtaggccgctataagtataataagaagctggcaatcggcctgcgtctggctggtcagacactggctcagccggtgattgatcccatgaccggtgagatcctggcagaggcaggcgagaccctgacccgtgaaaaggctggtcagatcgagcgtgccggtgtagcggaagcgtacatcaccatccacgatgagccggtgaagatcatgtccaacggcatggtggacatcgctgacttcgtgaactttgactgcgaggaatacggcatcaatgagaaggtccgcttctcggtgctgcgtgagatcctcgagcagaatgaggatgaggagagcctgcgggaagctatccgcacccgtcgggacgacctgatccccaaacacatcatcattgacgatatctttgccaccatcaactatatgtgcggcctgatccagggcgtcggcaccatggacgatatcgaccacctgggcaaccgccgtatccgttcggttggtgagctgctgcagaaccagttccgcatcggcttctcccgtatggagcgtgtgatccgggagcgtatggctacccagacccaggatatggatgtcatcacacctcaggcgctgatcaacatccgtccggttgtggcttccatcaaggagttcttcggctcctcgccgctgtcccagttcatggatcagaccaaccctctggcagaactgaccaataagcgtcgtctgtcggccctgggtcccggcggtctgtcccgtgaccgcgccggattcgaggttcgagatgtacactacacccactatggacgcatgtgtcccattgagacccctgaaggcccgaacatcggtctgatttcctacctggcatcctttgcccgcatcaaccagtatggcttcatcgaggctccctaccgccgtgtggacaaggccaccggcaaggtgctggacgaagttgtctacatgactgctgatgtggaagatgagtacgttgtggcacaggccaacgaacccctcaccgaggaaggcaccttcgccaacgagcgtgttgcctgccgttaccgtgatgtggttatggaagcggaccgtagccgtgtggacttcatggatgtatcgccgaagatggtactgtcggtagcgaccgccatgatccccttcctggagaacgatgacgcgaaccgtgcgctgatgggcgcgaacatgcagcgtcaggctgtgccgctgctcaagaccgagggcccgattgtcggcaccggtatggagtacaaggctgctgtggattccggcgttactgttctggcgaagcatgacggcgtagtcaagagcgtcagcgccgatgaagtggtcatcgagaccaccgagggcaagaccgagaactatgagctgatcaagttcctgcgttccaacgccggtacctgcatcaaccagcgtcccattgtcaatgtgggtgagaccgtgaccaagggtcaggttatcgctgatggtcctgccaccgccaacggtgaaatcgccctgggcaagaacatgctcatcggcttcaccacctgggaaggctacaactacgaggacgccgttctcatcaacgagcgtctggtcaaggaagatatttacacctcgatccacatcgaggaatatgagatcgaagccagagacaccaagctcggaccggaggagatcacccgggatattcccaacgtgggtgaagatgtcctcaaggaactggacgagcgcggtattatccgtgtgggcgccgaagtgcgtgccggcgatattctggtgggcaaggtaacccccaagggtgagactgagctcaatgccgaggagcgtctgctccgggccatcttcggtgaaaaggcacgggaagtgcgtgatacctcgctgcgtgttccccatggcgagtacggcatcatcgtggatgtcaaggtattcacccgggaaaacagcgatgaactggcacccggcgtcaacatggtggtacgctgctacatcgctcagaagcgtaagctgcaggtgggcgataagatggcgggccgtcatggtaacaagggtgtagtatcccgcatcatgccgcaggaggatatgccttatctgcccgatggacgtccgctggacatctgtctgaaccccctgggcgtaccgtcccgaatgaacatcggtcaggtactggaagtgcatctgggccgtgccgctgccgctctgggctggaaggttatgactccggtattcgatggcgccaacgagcaggatatccgtgatgcccttgccgaggccggtctggacccggatggcaagaccgttctgtatgacggacgcaccggtgaaccctttgataaccgtgtaaccgttggttatatgtattacctcaagctgcatcatctggtagacgataagatccatgcccgttccaccggtccgtactcgctggttacccagcagcctctgggtggtaaggcacagttcggcggccagagattcggtgagatggaagtttgggccctggaagcctatggtgctgcctacactctgcaggagatcctgactgtgaagtcggacgatgtagtaggccgtgtcaagaccttcgaggccattgtaaagggcaagaatgtgcccaagcccggtattcccgagtccttcaaggtgctcatcaaggagctgcagtcgctggctctggatgtgcgcgtgctggataaggagggcaacgagatcgacctcaagcagtccttcgacgacgatgacgatgtaggtctgaccattgcagacgacatcgatctgggtgagaagggagtcgaggtggagagcgaactcagcgatgggtttgacgtatccacccccgatctggacgatgatgataccgatgcaggggatctgttcgccagcttcggcatggatctggatgatctctccgacgacgacaacttctaaggaggcagatatatggaattcaatgtattcgattcgatcaagattggtcttgcctctcctgatcagatccgggaatggtcctacggcgaagtaaagaagccggagaccatcaactaccgtaccctcaagccggagcgggacggtctgttctgtgagcggatcttcggacccaccaaggactgggagtgctactgcggcaagtacaagcgcatccgttacaagggcaaggtctgcgaacgctgcggcgttgaagtaacccgtgccaaggtgcgccgggaacgcatgggccacattgagctggctgcacccgtatcccatatctggtacttcaagggtacttcctcccgtatgggccttctgctcaacatgtccccgagactgctggaaaaggtgctctactttgcctcctatgtagtcattgatccgggcaacaccaatctgaagaagtacgcgctcctctccgagaaggagtatatggatatgcgcgaggcctatgaagatgagttcgacgccggtatgggcgccgaggccatcaagaagctgctggctgagctggacctggatgctctctccaaggagatcaaggacgagctcgccactgccaccggtcagaagcgtgccaagctgctcaagcgtctggaagtggtagaggccttccgtatttcgggcaacaagcccgagtggatgatcctggatgtggtaccggttatccctccggatatccgtcccatggttcagctggacggcggacgtttcgccaccagtgacctgaacgatctgtaccgccgggtcatcaaccgcaacaaccgtctgaagaagctgctggaactgggcgcaccggacatcatcgtccgcaatgagaagcgcatgctccaggaagctgtggacgccctgatcgacaacggccgccgcggccgtccggttaccggccccaacaaccgtcccctcaagagcctttcggatatgctcaagggtaagcagggccgcttccgtcagaatctgctgggtaagcgtgttgactactccggtcgttcggtaatcgtagtcggccccgagctgaagatgtatcagtgcggtctgcccaaggagatggctctggaactgttcaagcccttcgttatgaagcgcctggtagaccagaaggttgccaccaacatcaagaacgcccgcaagatggtggagcgtgccaccgtcaaggaagtatgggacgctctggaagttgtcatcaagtcccatcccgttatgctcaaccgtgcgcctaccctgcaccgtctgggtatccaggccttcgagcctgtgctggttgagggccgtgccatcaagctgcatccgctggtatgtaccgcattcaacgcagacttcgatggtgaccagatggcggtgcatgtaccgctgtctgccgaggctcaggcagaagcccgcttcctgatgctggctgccaataacctgctcaagccttcggatggccgtcctgtaaccgttcccacccaggacatggtactgggttcctactacctgaccatggtccgtgagaatgagcccggcgccggcaaggtattccgtgatactgccgaagccctgatggcttacgatgccaaggtggtgggcctgcatgctcccatcaaggtgcgtgtcaccaaggagatcggcggcaagaaggtatcccggatcatcgacgccactgtgggccgtctgatcttcaacgatcccattccgcaggatctgggctatgtggaccgcagcgattccgacaagcagtttgatctggaaatttccttcctggtcaagaagaagcagctcggaaacatcatcgaccgctgcatccgtgtgcatggcaccgcccgtaccgccgaggtgctggaccgcatcaaggcacagggcctcaagtactccacccgcagcggcctgaccgttgccgtagtggatgcggttatcccgcctgagaaggccgacatcattgctgaggccgataagaaggtactggatatccgccgtcagtatgaccgtggtttcatctcggacgatgtccgttatgagcgtgttgtaaagacctggaacgaagccacccagaaggtgcgtgacgctctccaggagaccttcaagggcgacaaccccatctatatgatggcggactccggagcccgaggctccatggaccagatccgtcagctggctggtatgcgtggtctgatcgcgaacacctccggtcgttccatcgaaatccccatcaagtccaactaccgtgaaggtctgaatattctggagtacttcaactcctcccgaggcgcccgtaagggtctggcggataccgcgctgcgtaccgctgactcgggttacctgacccgtcgtctggtcgatgtatcgcaggatgttatcatccgcatgaaggactgcggcacccatgagggtatcatggtacagtccatcatggataacggtcgtgtcatcgaggatctcagcgagcgtctgttcggtcgttacctggcagatgacatctatcatcccgagaccagcgaactgctggtatcccgtgacaagatgatggacgagaatgatgccaagaagatcattgacgccggttacaccgaggtcaagatccgtaccccgctgaactgcgaggccaagaacggcgtctgcatgaagtgctacggcgccaacctggcaaacggtcagccggtatccatcggtgaagccgtaggtatcgtggcagcccagtccatcggtgagcccggtacccagctgaccatgagaaccttccacaccggcggtgttgtaaccgcagccgatattacccagggtcttccccgagttgaagagctgttcgaagcccgccgtcccaagaacgctgccatcatctcccatgaggatggtatcgtatccttcgagaaggacgccaagggcggcgacaatgtggttgtcaccaatcccaagaccggcgaacgcttcgagaagctggtggtatacggttcgaccctgaaggtttccgagggcgactacatcaccaagggtaccccgatcaccgaaggctcggtagagcccggcgagatcctgcaggtgctgggcggtctggctgtacaggaatacctcatcagcgaagtgcagaaggtataccgtacccagggtgttgatatcaacgataagcacattgaggttatcgtgcgtcagatgatgcgcaaggtgaaggtagacgatcagggtgacaccgagatgttcaccggcgagatcgtggataagagcgagttcctggctgccaacgaaaagatcgctgagctcaatgctcaggacggcggcgaccggagaatggctacttccacaccggtgctgctgggtattaccaaggcatcgctggctactgagtcgttcatgtcggcggcttccttccaggaaactacccgtgtcctcaccgaagcagccatcaagggcaaggtcgatccgctggtcggcctgaaggagaatgtcatcatcggtaagctgatcccggccggtaccggtctggtggagtacaccgagatctacgatgaaactcctcacacccatgcttccgaagaatctgccgagcctgtggctccggctggcgaataatcgcccgattctccggcaaaaataactgcatcacagccggtctgtatcaaacagaccggctgttttgatgacagttgtccgccggttcgggatcatagggaagtgtgctatgaaaaatctctattttacacaaattttaggtgaatttcctgttgacaagcctgtatcacacttgatataattggtattcggatggtgccttcgggcccgtctgtctgtatgggcaaaatttgtttgtacaggaagaaaaaaaggaaatttgaagtaaggaggtgcaatatgccaacctttaaccagctggttcacaagggccgtcagactcttgagaagaagtccacagcgcctgctctgcagagaggatggaacgcacagaagagaatcgctacaaaccagagctctcctcagaagagaggcgtttgtacagcaatccgtactcagacccccaagaagccgaactcggctctccgtaaggtagcaagagtgcgtctctcgaacggtatggaggtttcttcctacattccgggcgagggccacaacctgcaggagcacagcgtcgtgctgatccgcggcggtcgtgttaaggaccttcccggtgtgcgttaccacatcatccgtggtaccctggatactcagggtgttgccaaccgtatgcaggcccgttccaagtacggtgccaagcgtcccaagaagaacgccggcaagaagtaagcattaaaaactaaaggttcgctattgtatcgttcgatatagattccaaaggaaaaatatttcgaccgattcttagctgacgggagtttttagactaacgagtaccaatgatatcattatgtgaaggagggaagcgaagtgccaagaagaggtcaagttgctaagcgcgatgtactggtagatcccctgtacaattccaagctcgttacccgtctggtaaacagcgttatgctggacggtaagaagggtgtcgctcagaagattgtttacggcgcattcgacattatccgcgaaaagacaggtgaggagcctctggatgttttcgagaaggctctggagaacatcatgcccgtactggaagttaaggcccgccgtgtaggtggtgctacttaccaggttcccatggaagtacgtcccgagagacgtcagaccctgggtctgcgctggctgacaacttatgcaagagcccgcggtgagcgcaccatgcaggaaaagctggctggtgagatcatcgatgccaccaacaatatgggcggcgcttgcaagaagcgtgaagatacccataagatggcagaagccaacaaggcatttgctcattacagatggtaaatctttaatgtttgtgccgctgctctgtgcggcggcatgaatatcgttttttattcagggaaagcaaagagtaaggaggacagtatgccgagagacgtttcactggaaatgaccagaaacattggcatcatggcccatatcgatgctggtaagaccacca

SEQ ID NO: 1704 - DNA, 9077 bp, Unknown
  16S sequences of unknown bacteria
tctcgtgagtgggatggtattctctcctactcagcttaagctcattcccactctttgttcgggaagaacactgttatcttcgtgccttctccgacgcggcttgtgaggtctatctgtcctccgaggtactgcacggcgtgctttactatagaaagtccaagtccggtgccgcccgtcgcctttgagtggctcttgtctacacggtagaatctttcaaaaacccttgaccggtgctccggtgggattccgattcctgtgtcgctgacggtaagctctataccgccattcttcgggtgagtagataccgtaacgctgccgccgtccttgttgtactttatcgcgttctcgcagaggttgtagattatttcgctgtacagctgacggacgccgtatatctcggtcggctcgcagtcgaggtttattataacgttcttcttttccgctgtgtcacggagaagtgccgctgtgtcgcttgccatctttgcgatatcgaggttttcccacgcaagctccacgttttcgtcaagctgtgacagccttatgatatcctcgatgagagtgagaagtcttgccgcttccttgtaaatcctgtcggagaagtctttcatgtcctcgggctttaccaaaccgttttcgataagctccgcactgcccatgatcgactggagcggcgttttcagctcgtgagatacgtttgcggtgaattcgcggcggtttctctcggcaaataccttgtccgtcacgtcgaatatcagaagcacgatgcccgtgaatttcccgtcggagagtacgcggcttgcgttgagctgatattctcttccccagcgtgatactcttgactccgcttcaccgtttgcctgcgctctctcaataagctcatgtgtctcgcggcttctgtcgagtgtgaggaagtcctttccgatgcagcccttttcatgctcgtagaattccgcgctgtccggctttactccgaggaagaacgacgctgcagagggatttatgctgattatctcgcctttttcggaggtcagaacaagtccttccttcatgttgtgcgtaaccgcttcaaattcgctgcggcttctgtcgaggtcgtacatctggcgggcaatttgtctgtgctgcttttcgatatggctgagcacgggggcaagctcgtcgtaggtgttgttctcaagcggcttgtcgaggtcgattgcgctaagcggctctacgatcttctcggacagcctgtgcgcgagtacggaggagagaatgaacgcgagaagaagcacgacgataagcggctgtagcattccgaaaacaagcgcgggaacagtggcgtggcttaccgaaactctgagcacactaccgtcggagaggagctttgatatatatatcgtctgctcggtcagggtggaggaatatcttgaagcttctcccgtaccgtattcgcgggcttccttgatttcttcacggtcggcgtggtttcccattttttccgcgctctcaaccgaatcgtacagaacagtaccgtcttctcccacgagagtaatgcggcaactgtcgtcgttcagtccttcaagataggctgctccgctcacttccacaccctctgcggcaaaagcaagctctgttctgagctgatttttctgcacaccgcggaagtagtcgtacaatacgccgattatcataacgagggatgagagaagaataacaagcgcgacggataaaatagatttgaatatttttttagtcatttattcccgacctccatcctgtagcctacgttgcgcaccgtctcgataagctcgctgtacttgcccaatttttggcggagcgtccgtatgtgcatatcaaccgttcttgtctcacctacatagttcagtccccagacctcgctgaaaagctgctcgcgggtgaaaactgtccgaggatgtgacaaaaacagctttagtatttcgtattccttgtaggtgagctgtattttttcgccgtctaccgatactgtgtgcgcggaggtgtcaagcatgattccgccattttttaatatgtgcggagactcggcgtgactgcacctgcgcataacggcttttactcgcgataccatctccatcataccgaacggctttacgagataatcgtcagcgcccagatcaaggctttgtattttgtcgtattccatacccttcgccgtcgccattatcaccggaatgtcgcaggtgtcgggagcggatttcagcctttgcagcacctccactccgtccatgcccggcagcatcacgtcaagcagtatcagcgagggcttttcgtttttcagtgcttcaaagaattcgtttgcgtcgggaaagcctcttgtctcaaagccgacggagcgcagggtgtacagctcaatgtcccgaatactcgcgtcgtcctctacacaccagatcatatttcgctctctcctttgtgtactcccgtgacggagaattcgacccattccgcaatgtttaccgcgtggtcgccgattctctcaaagtattttgctatcatgagtaagtcaagcgcgtattctccgtcgtcgggcttttccgcaattagctttataagggacgacttaactttaaggaaatattcgtcaactatgtcgtcgtgctttattaccgtgtcggcaagagcggtgtccttgtttacgaacgcgtctacgctctccgtcaccatctttattgtcgcttcagccatgctttgaatgtcagcgcactccccgcccgttctgccgtcaaggaatgtgattatctccgcgatgtccgccgcctggtctcctattctttccatgtccgttatcattttcagtgcggctgaaacctgtctgaggtcgcgcgctacgggctgctgctggagaaggagttttaatgcaagtgtttcgatggagcgttccatgtcgtcgatttcactgtcgatgggagctaccttagccgcgagaggaacgtctcctgttgtaagagccttcgccgcaagagcaattacctcttcacagagcgcgcccatttgaataagctcccggttaagcagggaaagctgttcgtcaaatctgtttctcattatccaaaccttcctgtgatgtagtcttctgttctcttgtcttcgggagactcaaacattttctcggtgtttccgtattctataaggtcgccgagaaggaaaaacgcggtgttgtcggaaattcttaccgcctgctgcatattgtgggtaactatgattatagtatacttctttttcagctcgattgcaaggtcttctatcttagaagttgaaatcgggtcgagggcggatgtgggttcgtccatgagaagcacatccggttcaactgcgagagcgcgcgctatgcaaagtctctgctgctgaccgccggataaaccgagagccgactttttcagtctgtccttgacttcgtcccagattgcggctccgcgaaggcttctttcaactatgtcgtcgagctttgccttgcttctgacgccgtgagttctcggaccgtacgcaatgttgtcgtatatgctcatcgggaacggattcggcttctggaataccatgcctatttcacgtctcagctcgtttacgtcggtgtcgggggagaaaatgtccttgccgcggtatcttatgtcgccggttatcttaactccgggaacaaggtcgttcatgcggttgagagttttcaaaaatgtcgactttccgcatccggacggtccgatgagcgcggttatgcttttttcttcgatgtttatgtttatatttttaagcgcctgagtctgactgtaccacagacacatatcctttaccgtgattatttcactcatgtgagcctcctcagatgtttttctttttcttaaagtatttgcctaccagtgtcgccgcgagatttataataaccgtgagtatcataagtattgccgcgatggcgaacgctacttcaaattcaccgttttcctttgcgtagacgtagagagctacggtcagtgtcgcgcctgcgcttgtgagtccgtcccagattccgttcagcgcgtgagcaaagccggcagtgaatagaagcgccgcggattcaccgaggatacgtcctacagagagaatgcatcccgttattatgccgtcaacgcagctcgggaggactacggtcctgattactctccattttcccgcacccagaccgaatgcgccttcacgatagctctgcggaactgtcttaaggctttcctgcgtcgtgcgcattacagtcgggaggttcattatcaccagtgtgagagaacccgcgagaagtgaggttttcattccgagaaattggcagaagaacagcattccgacaagtccgtagataattgacgggattcccgagagggtctcggaggcgtactctatgattccgaccagctttttgttcgacgcgtactcgtttaagtaaatagcagcgccaactccgagagggagaactatgacaagcgtcgcgagaaccacataaagcgtgttcagtatgtcggggagaatgcctatcgagtcgtcaaggtagctcggctttgtggaaagcagcttccatgagatgttcggcagtccctttacgagaatgtagccgataaggaataaaacgagcgcgcaggtcatagtgaccgatattcccatgagagctttcatgagagaggaatatgcttttcttttagttttgatattgtttttcataatcataccttcacactttaggatactctgaattaatcggatttttgcgatgaaaggctaaaatatagggacttttatcgcaaaaataacctttaatcagaggcttcctttctcttgcgcgagtgcttttcttttgtgccgcggcttctcttgaggaaaaagttgagcagcgcgtttattaacatgatgaagaggaacagcacaagcgctatcgagaacaacgcctgtctctgaagtcccgccgcgtatgacatttcgcttgccacggcagtcgtgaggaaacgcacgctctggaagagggagggcatattcggaacgttgcccgataccatcatgaccgccatagcctctcctatcgctcttcccacgccgagaaccacagccgccgcaataccgctttttgccgcaggaacggacacgcggaagtacgtttctatgggatttgctccgagcgcaagggaagcgtcctcgtattccttgggaacagcgtcaagtgcggtcagcgaaacctttataattgaggggagtatcattatcgcgagaacgattatcgccgcgagaaggcttgcaccgtccggtatgttaaagagctttcttattccgggaacgagcaccatcatgccgaccagaccgtatacaacggacgggattccggcgagaaggcttactgccgattcgataacggttctgactttcggctttgctatctttgcgagataaaccgaggtgagaaatcctatcggaactcctataactatcgcgcctgccgttccgtagatactggtgaggatgaacgggagtatgccgtattcaggctcggctgcggtggacgcccactttgtgccgaagaggaattttataagtcctatctttcttatcgccggtattcccgctatgatgagatacaccgtgatgagcagtacgaacgctaccgtaatcagaccgaatatgaggaatattatatggataatatcttccgtcagttttttatgcctgtcggcgaaggatttgttgtttttcactgtgaccgcctttctcttcctaataataacggcagaccgaagccgaacgactccgtgcctgccgcctttttattgtttgaatcagtgagcggctactgcgcctgccttagagattattgaagctgctgcggaggacattgcgtagtcgaagaacttctgagctgtgtcggagagctttgtgtccgcctttgttacgaatacgaacggacgctggatgaggtatgtgccgtcttttactgtgtcttctgtaggtgtaacgccgccgaccttgagcgcctttactgtgtccttaaccgatgcgagggatgcatatccgatggcgttcgggttgtttgctactgttgtgataacgtcgcctgtggaggtaagctcctgacggtacttgcaggcgtccttggtgccggtgatggattcaaagccgtctcttgtgccgcttcccgcttctctgcctatcagaacgatttcaccgtcagcaccgccgacctcgctccagtttgtaatctctcctttgtagatggaagctatctgatctacagtgaggtcttcaaccgtgttcgaggtgttcacgatgattgcgattccgtcgtatgcgagaacggtttctgtaagtccctgagccttttcgtcgtccttgagcgcacggcttgaaagtcctatgtcgcatctgccttcgagaactgctgtgatgccggagcctgagcctgtcggattgtaggtgaaggttgtgccggagttttcagcttcaaatgcttcgccgagagcgccgacaaccttttccattgatgtggagccgtctgtggatactgtctttgcctcgcccgatgagcaggatgtaagtaatgcagatgaggcgcaaacgatagttccgagtactgctgcgagaacgcgtgtgaatgtctttttcataataacttctccttcagattgtttctgactttcattttagaacccgccggattctttttatttcttttcccttgttacgcctatataatataacttttatgtaaagtctgaaagattcactatgtcaaatctatgtaaaaccgctttacatttcattttttccactttacaatacggtttattcaggcttttgtttgtaaaaaggcactctcagagaagaattattaaaaatccgagaggaggatttaaaaattcacaaattactgttgtatttgcttcctcggcgaattataatatagttaacgaaaataacagttcccgcgcaaaggagacttattcaatgaaagagataatccgcggttattataaaggcgaacgtccgctgttccatgagcatgaccttaaaattgtcgacactatctttgacgagggcgaatccccgctcaaggaaagccgcgacatagagctttacggcagtatgttcaaatggaagtacccgctttggtattcaaataatattaaagcagacaactgcacatggttcgagatgggacgctccggcgtgtggtacacgaatcacatttccgtgaaaaataccctcatcgaagcgccgaaaaacttccgccgatgtaccgacgtcactcttgaaaacgtgtcaatgcccaacgctgccgagaccttctggagctgcgacggtgtggttctgaattccgtcactgcaaagggcgactacttcggtatgaattcgtcaaatgtcaaggcggacaacctcactctctacggcaactattccttcgacggcggaaagaacatcgaagtgcgctcgtctaagctgctctcaaaggacgcgttctggaactgtgaaaacgtcacggtttacgacacgttcattgtcggcgaataccttggatggaacacaaagaacctcacgtttgtaaactgcaccatcgagagcctacagggactatgctacattgaaaaccttacgatgaaaaactgcaagctgataaacacgacccttgcttttgaatattcatcggttgacgcggacatttcgggcagcataaacagcgtgttcaatccgaagagcggaagaataaccgccgacaagatagacgagctgattcttgaagcggacaagatagacccttccaagactattatcacttgcagatgaggagagaggcatgaaatacgattttgacactccggtaaacagaagaaacacggattcattgaaatgggacgtagctgaaaacgagcttcccatgtgggtggcggacatggacttcaaaaccgctcccgagataaccgaggctataatcaagagagcgaagcacggcattttcggatataccattgttcccgacgaatgggctgacgcgtatataaactggtgggataagcgtcacggactgaaaatggagcgcgactggctgatattctgcacgggcgttgttcctgcgatatcctccgttgtgcgcaagctgaccactcccgccgaaaaggttgtggtgcagactccgtgctataacatattcttcaattcaatatataataacggcagaaatatctatccctcgccgctgaaatacgacggactgaactactctattgactttgccgacctcgaagaaaagctcgcagacccgcagactacgctcatgatactgtgcaatccgcagaaccccgtaggaaagatatgggacagggaaactctcgcgaagataggagagcttgcggcaaagcatcacgttacggtgctgtccgacgagatacactgcgacctcaccgacccggacaagggatatgttccgtttgcgtcggcttccgagacttgcagaagcataagcgttacctgcatagctccgacaaaagcgttcggcattcccggacttcagacggcggctgttgtggttcccgacccgtatctcagacataaggtgaaccgcggacttaacaccgacgaagtagccgagccgaactcattcgcacagattgcggcaatcgcggcatttgagcacggcggtgagtggcttgacgaggtaagagaatacatctacgagaacaagaagcgcgtttcacagtttctgcgcgacgagattcccgatatagtcctaactccatccgatgcgacataccttctctggctgaactgctcgaaattcacctccgacgcgggagaatttgcggacttcataagacacgagacgggactgtatgtgtcaaagggcggacagtacggcgacggcggcaaaacattcctcagactgaacatagcctgcccgagagtgacgcttgaagacggacttgcacggctcatggaaggatatacgaagtacatcgcaaggtaaaaacggacgcttgcggaacggttcacagtaccccccggattttttgaaatatgtacagtcgtcaatgataagttacagaaaactcaaaaaataaagacgcaagcga

SEQ ID NO: 1705 - DNA, 4658 bp, Unknown
  16S sequences of unknown bacteria
atgggaagggtgattttgttaaccgaagcctggagaattgccagagcgtcggtaacagcgatgccctcttcgccgtcaacatcggcgttcttaagaacggtctcgtcaagagtgatcttgccgaccgagtgctgaagaaccataagagcgtctgcaacggtgacttcgccgtcgccgtttacgtcgccgtaaactacgtcggaaagcttgtcgaaatcttcacgggcttttgcaagcgttgcaagacccttgatgtgaaggtcggccttttcctgaccgaagtactcgatgaagctgtcgcgggtctcttcggcggtgacgatagcgtcctcgctgtccttggtgatggggaactcgatggcgttgatagcctcatcaacggttgcggcgttctcgatcatggtgtcatactcttccttgaggttcgcataaacgttctcggcagaggtcagaacctcgaagttgtcaaccatggaagaaacatcgccgtatttctcggcaagagcattgtaggcgtctctggcggcggtgatgagctctccgctgtcctcgctcttgtcgggatcgtatttaacgtcgccgatagcggcgatcttgtcctcaacagccttgatttcctcgtcgggaatagcggccgagaaggaagcctcaacaacggtgaggttggcaagtccggtggtatagagctcggcggtgtactcgccgtcggcctctacggtgaagggaactgcaaggtcaattgttccgtcgaagaatccgccggtagtgtttccgccgttggagtccttaatggaacgggtaagatcggccttggtgatgtccttggttgcaacttccgcaccctcggcattcttaacctttgcggtggcaagaaccgcgtcgtcggcgcagaaaacgccgtcaaaggagaggctgtagtttgcggaatagctgcctgcggcaaagttcatcttggtgccgccgagagcaagcttggcagcctcgaagactccgcgatatacgcgaaggccgcggggaagctcatagttgctgttttcgatgtagggattccagttgccggcctcgtcggttccggtgcggataccgtccatatcgttggaggggctgctttcgccgctgtcaagaacagcgatgggctgtgcaaagaaggggtcggcggtagcgtcataaatggaaacgctgtagagtctgaaatcggtgaaaccgcgggtatagatacggaactcgccgtcatatccgttggttgcctcgggaagagtgaggtctacgctgatgtcgaaataacggttgccgtctgcggtgtatttgaaaccgttttcgacagcctgctcataagcggcgcgaagggtttcgttggaaataccgttggagattgtggggctgccttcggcatcgcttacccagcagtcgacgcaaaggccgttggtggtttcggcaccgagggatactccgctccagtcaagagacagaacataggtgtaggtgtgtccgccggcaacggtagcgttggtaccggtggagatgtagccgtatacgccgtaaccggcagcgcctacagatttttgacgtgaaagaaccgcatgatcggcatcggaaacaagaccgctctctgcaaaattagcaaactcggtaagtccccagctctttacggtggtgtagtttccgtcggccgaagcaacaacggccatggagcaggccagcattgcaaccgcaagcacaacggaaagcacttttttcaagcttttcatttgagatttcctcctaaaaaattttctcgacagattttacctgccgacttcacgttattataacattgtaaagtcgaaaaatcaatcgcaaatcttattatttttaaaaaaattcacaacaaaggacagacctgtccttttaattcccaaaaagcccttgaagtttacccgcgcataatctataataattcggataagactaaccttttcggaggaaaaacaatgtatgattcccgcgcggagatagatcttgaccgcattgcccataacgcaaagaccataaccgaaaggtattccgactataaatattttatcggaattctcaaaagcgacggctacggccacggcatgagggttgtaaacgagcttgaaaaaaacggcgtcaattattttgccgtcgccacccttgacgaggcgagagagcttcgccgctttaacgccgatgttcccgtgctgctgctcgagcctgttgacatttcccgaatcggcgaggccgaggagctgaacctgaccctgccgatacacgagctttgctatgcaaaggagcttttgtcacttaaaagagaaaaggggcttaaatgccacattcaggtcgacagcggttttaaccgcctcggaattaaggataaaaacgagtttcttgaggtttacacgctgctgaaaaattcgaaatatactccggagggcgtttatcagcatttcgccacggcgggaatattcgacccgaagtgggacgcccaaacggcgcggttttgcgaaataacctcccttgtgaatcttgaggaaataccgatcgttcatatgggaagcggggtgtcgctgcttgctcatccgaaaattccctttgcaaacggcatacgcatgggtcttgtcatgtacggatacaacattgcgccctctcctctcggcagcggccttaaggacaggctcagagccgcaagaaaccgttatttccgaaaaaaatataatatatccgagaccttttgcggcgtggacattgaccttttgccggccatgtcgctcaaaacccgcattttgcagataaaggacgttaaaaagggcgagtcggtcggatataacgccgctttcaccgctgacggcgacattaaaatcgcaatactgtccgtcggatataacaacgggatcggccacaaaaatctcgggcgcaacgttgaaataaacggcaaaaaatatccggtaataggcgaactcggcatgaacatgattgccgtaaaggtcgactcatccgtcaaaaagagcgacgaggccgttatgctcggagagggaataaccctcggaatgttctcacgctcggccgatatggggctcggcgaaagccttatgaacgtcggaaagaacaacccccgcgtatacattaaaaaaggagaataaaaaatgcccatgtcaagagccaaatggcttatgaaaaaaatcaaaggaataaatcacgacaggcttaacaaacaccttgacgtcatggtgaaaaacacagggaagtcccgtgcgtatatcaagtgggacattttccgcaattttctgaccaccggctgttcctacaccgattatttccgcggagactatataaacctgacaaaggagcagaagaaaacctttgtcaccgccaaaaagttttacaatataattcactatttcaacgaccccgaatatattgtgctgcttcacgataaacttgttttcgacgacttctttgaaaaatatataaaaagggatcattttaatctccgctgcggtaccgtggaacagctcaaggagtttttaaagggcaaggacattatttttgccaaggatcccaccggcgaatgcggtcacaacatcagcaagcttaaggtggccgagcatacccccgaggaaatattcgaaagctgccgtaaaagcggtcagctgcttcttgaggaggccattattcaaagcgacgacatgaacgccgtcaacccctattcggtcaattcctaccgtgtggtcaccttgcttaaagacggcaaggctcacgtcatcgccaacgctctgcgggtcaatcagaacgacgccaatgttgtgggctgcagcgacgatatttattttgccatgaagcccgacggcaccgtcgacggaaatgttgtggacgactacggaaatgtctatacagagcatcccctcacgagattcaagtttgccgacatgaagataaagggagtgcagcaggccttcgatatgtgctgcgaggcggcagaaaaaattccgcaggtcagatatatcggctgggacatcgccttttcggtcaacgggcccgttattgtggagggcaacgaataccccggtttcggcgtgcttcagttttataagctgaaggattcccacgaagggcaccttaaggatattgaaaatgtcgtgggtgacgagataaagaatataaagatgtaaacgcgtcgggagcaagaggccgggggttcggttttttgtctcccgatttttttgtcccgtctattgacaaagagccgtaaaaaaagtataataatgccacacgtttccgtagctcagctggatagagcgaccgcctcctaagcggtaggtcggaggttcgaatcctctcgggaacgccaaaaatcctgttcactttagtgagcgggattttacttattacttcttacctcttcaatcttactttaaataaagtttgatacgggatttttgggaagtaataagtaaaaagtaataggtaataagttaggtgtgcctacggcacgaattataatgcaaggtttgcaccttaataaacacagcaaaaaagtaaactaaataaactgcaataaaatgtttcaatccacatatcaatgagacaaagctttgattttgtgccattttgccacgcagctacaaaaagggaacggcaattttcgaaagaagattgcc

SEQ ID NO: 1706 - DNA, 4108 bp, Unknown
  16S sequences of unknown bacteria
aaacgcgggcggccatgggaacggcagacacgcctgccgaaccgataagaggattgacctttccgccggtgaatatatacatgagcttgccgaaaagcactccgaaggcggtgcccatggcaaaggcgaaaagaccgagtgccacaaccttgagggtcgcgggagtcaaaaagcttgctccgtttgtggtggcgcccaccgaaaggccgaggcagatgactattatgttcataagctcgttttgagcggtctttgaaagcctgtccacaactccgcattccttcataaggttaccgagcatgagcataccgaccagcacggcggcgcttgggaggatgagcgaaacaacaacggtgaccattatggggaaaatgattttttcctttttggaaacgggacgaagctgttccataacgacggcgcgctcctttttggtggtgagcagtctcattatgggcggctgaataaggggaacgagagccatataggaataggccgcaacggcgatggttcctacctgaatactcgaattttcatttaaaagccgcgaggcgacataaatagcggtggggccgtcggctcctccgattatgccgatcgagccggcctcaagagcgttgaacccgagcatggcggcgccgataaaggcggcaaaaataccgatttgggcggcggctccgagaatgaggcttttggggttggcaatcagcgggccgaaatcggtcatggctccgacgccgaggaaaatcaggggcggataaattcccgccttgaccccgagataaagacaatccataagggtgacgtttcccgtcttgaaaagctccacaaagccgggcaaatcgtgataatgcaccgaaagcgcctcttcgggattaaagaaaggcaggtttgcaagcagcattccgaaggcaatgggaagcagcagcagcggctcgaaccctctgcctatggcaaggtagataagcacacaggcaacggcaagcataacgaggtttttccacccgtcgccgccgaaatcgtttatcatggttcctattcccgactcggtatagagctgtttaagagcctcgccgaaggtggaaaaaatgctcatcagcgacgtgaaggccgcgtaaagcgttatactgaactccattttttattcctcctaaaagggtctcatgttgtcggcgagtcccgccgcctgccaaggagagcggacgccgaaattctttgcgggacgaaccgagcgcacggcatattttttcccgtcgcccgaaagagccgaaagcgccgccgcggttatgaccgccacaagctcgtcctcatcctcgcggctttgctcaaaagggcggccggcttgtgcctttacggcctccttttttgcggggacgggctcgcttttgctcttttttccgccgccgaaagcctttccgaacagcgtgattatcatgatgagcaaaaacagcaccaaaaatacgattacgatacccgtcagggtgacgagcatggtgttttcaaaagaaattccgccgaacattttcttcgctccttacttttttgctccctttgcgccgaaagcacccttttcaagaatgtttgtgtcgtaagtgaaggtgagatttttacggtctctgtccctcttttggccgagggaaatcatgcggtcaagaagttccttatattcaattccgctttccttccaaaggtagaaggccagagaaccgggaatcgtgttgatttcgttgatataaaccttgccgccgtcgccctcgtcgattataaaatcaattctgacaacgccgcagcaatcgagatatttaaaaagtctttcggaaatatcctgaatttccttggtcttttcgtcgggaattttcgcgggaatgattcgcgaaaggcttgccatgccctttgaggaggactgactctcgtatttgtcggaaaaggagagaatttcgtcgctcatgaccggctcctcgcacaccgacgccttgcaggaattgccgtcgcccagcaccgagcagtttatttcccgaagattcacaatggccttttcggcaagtattctcggggcaaaggaacaggcaagatttatcttttcctcaagagccgttcggtcggaggccttggaaattccgattgaggaaccgaggtttgccggctttattataacgggatagccgagttctctttcgattttgtcaagcagagcgtttttatcctcgaaaaagcttctcgccgtaaagccgaaaccgtcgatgacgggaaagccctttgagcggcagacgtccttgaagagaattttgtccattcccaccgccgaggaaacgacattacactcggcataaggaattcccagcgtttcgataaagccctcgattgtgccgtcctcgcagtttgtcccgtggactatcggaaaggcaaaatctatgttgacggcgtttttaagcttgaaggctcccctcttttcgggaatcattttaaccccgtcgccttctcttaaaaatgtcacgcgggagcagctttcaagcagctttgagagatttttatatccctcgatgtcctttaaggcctcccccgtgaacatctctcttttttttgagacataaacgggaatgacgttatatttttcggcgtccatggaggccatggcctgaaccgccgagatgaccgaaatttcatgctcgacgctggcgcagccgaaaaacacagctaaattcattttcataagtctaacctctttatttcaaatagttgtcgggaagatcgttttcaagcagcacggcgcagtttttgtcaagcgtcggcgcaagctttgccatggcctccttaaaggacgaaaccacaaacactctgtttttgtcaaagccctgtttttcaagggcgtcggtcatgggttttgagcgcatttttccaacgagatatatctcgtcgcacacctttcccgccgcgtcgccgagggcgaaattacattcgtattccttttcgcccagctccacaaggccgggggtcacgataatttttttcatgccgtcgaaatgagacagtaccctgaccgcctcaagacagcccgagggattggaattataggcatcgtcgatgagaacggctccgtttatgaaggatttcatttcaaggcggtgaggcgttggtttaagagaagaaaccgcaaagcgaatgtccgagtcctccacgcaaagctcgcttgcaagggcggcggcacccgtgatattctgaacgttgtgggagccgagaaggcgggtggaaacgggaattctgcggtcgggaaaaacgatgtcgaaactcgacccggaggaggagcacacaacgttttcggcataaacgtcaagaccgccgtcggtgccgtaaaggcaggtgttattataggcctttgcccgttcctttatatattcgttgtcgccgtttaaaaacatttttccgttcttttgcgaaacggcgtcggcaagctcgaatttcgtgtttattatgttttcaatgctgccgaaggtgttgagatgctggggtccgaccgaggttataagccccatgtcgggatggacaatatcgcagatttcctttatgtctccgacgtttttggcgcccatttcggcaataaatatttcggttccgggggtcattttctccctgacggtgcggactattcccatgggggtgttgaagctttcgggcgtgaccgtgacggtgtatttttccgaaagaatacgcgccaaaataaactttgaggtggttttgccgtaggagccggtgacgccgacggtcaaaagattcggaatcgagccgagaattttcttggcgtcgtttatataatggttggaaaccgcccgctcaatcggcctgtttataatgttgacaagggcaacaacaagctctctgcacaaaaacagcaggcagcagacaaaggacatataaagcccgatattttttacaaagcaaagtccgaagaaaacggccgaaacagcaccgtgggttatcatcatccgctttacccgcatggtgaacacaaggggctttatggactttttctgaaccgaccttgaacccaaaaaggccttcaccgccgctccgaggcaaagcagcgaaagcaaaacccccacagcggtcgaca

SEQ ID NO: 1707 - DNA, 20711 bp, Unknown
  16S sequences of unknown bacteria
gagggctttgcccgcatatgcacaaccacgcgtttgacgcgtggctgtgttttttggcggaggacacgggactcgaacccgcggggctgttacgccttacttgatttccaatcaagccccttagccactcggtcaatcctccgaattttcgtatgctacagagacaacttcataaaagtgacctgcgcaataactaatttaccataaagatatcatttttgcaagcgttttataaaaaggacagttattttatttaattgaggctgaaataatttacaattatgcctattgacgaaatggtaaggaagtgctaaaattatctaagtcaggcttccgtagctcagctggtagagcagcacattcgtaacgtgcaggtcgccggttcaagcccggccgggagctccataaaggtggctgcactgagaaaattgtttcggtgcagtcattttttataaaaatgtgcgttttaaaaaaaggagaatagaatatatggctgtgataagcggaaaagaagatatgaaaagcagggtagagaaaacgctggaaagaaagatgagcggagcatacaactgtgcgcaggcagtactttgtacatatgcggatcttctcggactcgaggaaacggatgcttttaaggcggctgcgggaatggtgaacggtatgactattggctcaacatgcggtgcggttacagcaatggcaatggctgcgggatatgcggcaagcgacggcaagctctcggaaactgaaacaaaaaaagatgcgtttaagctgacacgtaaaatgcttggggagtttgtagagaaaaattcgacagttttgtgcgctgagcttaaaaagggcaacgatccggtaagctgtctttcgtgcatagcggacgcagcggagataatcgaaagagaaattttcggagttgaaagtggtgaagcaaacgctgaaagcgatagccggcagaaagaagcagcaaagcaagaagcagcaatcgaaagctacgggctgcaaaagtgaaaaattcgcaagaaacaggaaaaataagaaaaaagattaaaagcggcagcgattaaggccttaatcgctgccgctttttaattttcgcttttattctgtaactttagtcgttaatttcatagcttgaggtcgtccagtgatctatgatagcgtccgtaagagcagggagatccttttctttgaacagtttgagcaataatttatggctttcgtttatctttttagtcgattcctgtacgccttccataagagaaaggaatgccgaagctctcgacacgccatgcagtactgagtgaatcagctcgataagacgcttattgccacatttgttaagatatatatcgtgaaattgatgctgcaatgaattataagctgcgatatcattattatcgatagctgcgctcatatcatcgatgcagcgctgcatactgtcgtagtcatcctctgttaaattatcaagagcaagttcggcggcatatgagtcgagcctgccgataatttgccaatcctccagcgcggtttcttcgttgtattctttaataaaatatccttttctcggaacacttacaagaacaccatcagaagcaagctgcaaaaatgcatcgcgaacgggcgtgcggcttatatcaagctcttttaaaatgtcggcttccgtaagcttctgccccggaataaattctccatttgttaatttttcaataatatagtcgtaaacctgctcgcttatagtttttagttttctcatatgtacctcgtttatttatcattcaataagcctattatgtaatgcatacataagtatacaacaaaaaaggaaaatagtcaattaaaatttaagatatagaatacataatatttaatttaaaatataatatacaaaatgcttgactaagttgcacaggtagtattataatgagtactaagcaaaaaaagacgaaatagtcagtcaattttgccgactaataatttagaacggagggaaaggctttgagcaaagtaagtattgacaggaaacgctgtaagggctgtggtatttgtattagagaatgcccgagaaaagcaatttcatttggtgaagagctgaatgagaagggttacaagacagtgataattgatgatgagaaatgcgtagggtgcggggtgtgttatcatatgtgtcccgattgcgtacttgaactggagggttagaaaatggcaaaagcaaagacacttatcaaaggaaattatgcgattgcggaagcggcaatccgtgcaggctgcacgttcttcgcgggatatccgattacgcctcagagtgagattcctgaatatatgagctcgagaatgccggaaataggaggcgtatttgtgcagacggagtccgaaatcgcgggcatatcaatgatatacggcgcggcggcatgcggcagaagagcgatgacgagttcatcggggccgggattttcgcttatgcaggaaggtatttcgtatatggcatcggcacaggtaccttgtgttattgtagatgtaacaagatacggctgcgggctcggagatatcaatccggcgcagggcgattatttgcagctggcaaagaacggcggtcacggagattacaggtgtgttgtacttactccgggctctcttcaggaatgtgttgattttatgccgcttgcgtttgaaatagccgaaaaatacagaaatccggtaatagtcgctcctgatggcagtatcggtcagatggtggaatcggtagattttccagatgatatcacaaagcacgatatagataaatacgactggacaatacaccatacaagaggtgaaaagcataagacattctgtcctgatttctattacgatataacgcttgacgaaagcgtggagcttgtaaaagcaaaaatagacgcgatggagaaaaacgaagcgagagctgaggaatttatgactgaagacgcggagctcgtactcgtatcttacggcacaacttcaagaatcgtcaaagaggcggtaacagaagcgagaaagcagggaataaagctcggacttataagaccaaagactatatggccgttcccgacatttgcgtttaaaaattgcagtcctaaaggctttcttgcagtagagcagtgcgtaatgccgcagcttgcggaagacgttgcgcttgcagcaagaaagatagcgcctacatattcgtacacgacaggcgcggggtatccgagagtgagcaatataatagatatagcagagaaagctcttgcaggcgagctgaaggaggtgtagcaaatggcaaatgtattaaaaaaacctgaactcataatagcagaaaacggattttgcccgggatgcggtcacagcacaatggcaaagcttctttgcgatgtatttgaagaaaccggagttgcggacatagctatcggggctgccgccgtaggctgcggatgcatgatcaaagcgacaatgggaaacgactgggtacaggcgcagcacggaagagcggcagcagtagcggcaggaatgaaaagggcgcgccccgataatttcgtattttcatatcagggcgacggcgacgcaggagctatcggtattgcggaaacaatatatgcagcaaaaagaaatgaaaagattacgactatattcataaacaacggtgtatttggaatgacgggcggacaaacggcgccgacatcgcttgaggggcagatagcgactactgcgaaaaacggtgtcgattacgaagtattcggcgaaccgctcaagcttgcagagctgataagtacatttaatgtgggttatgcagcgagaggaagtatagcgaatttcaaggagtatcagacgacaaaagggtacattaaaaaagcgatagagtgtcaaaaatcaggtaaaggatattcgtttgtagagataatggcaccgtgcccgacaaactggaagctttcggcgacagatgcgcttgatcatatagagaatgtaacttcaaagtattttaagcttggtgaattgaaaggttaggtgtggagatgttaaacaatataatttgtgcaggtgtaggaggccagggcgcgcttacactcgggatgcttcttgcggaagcttccgcaatgcagggcaaaaatgtcacatatgtgccggaatacggttcacaaatgcgcggcggcaacgcgagcgtaaagattaaggtcagcgatgaacctatagtaaatccgtttatggaaaaggtcaacattctcgttgcgcttcatacactgccgatacctatgtatatagatcttgtacaggagggggctacggtgatagccgaaagcgagctggtacacgaaatagagcttccggcaaatgtaaaacttgtgcatataccggccaacgagattgcggagaaaatgggaaatccgcgcggcatgagtgcggtaatggccggagctgtcgtagcccttgcggatttatttccgtatgaggacggtgtaaaagcggtctctcagtattatgaagaaaagcatattcctgttgaaatcaacagagacgctttcatcgaaggatacaattatattaaaaataaaaagtaataattgttttgggagggaaagtaatggaaaacactattagcaaagcaagaatatacctgacgctgtttgcgcttggctgtgccggcggttcaatttacattataccgtacataaggtctgtattctatgatttgcagcttcaggttaccggaatgacaaacacacagtctgcatttttaatgtctgtatatgctgcgttcggtatgataattggcgtacctgtaggtatgattgtcgatagacttaaccttaaagacggcatcagatgggcgttgataggcacgacgattgtaaccatcgtctattcgtttacatatacatcatatgtgggctcaatgcttatatggtgcgcgatatgcgtatttacttcaatttactggccggcattctcaaagattttgagtattgtcggacaaaagacggataagacaggcgaaggaaaatcagggcttgcatttggaatttactatgccttcaatggtataagcgcagctgtgattaactcgatttcactttgggcctccacacagtttgacaatccttatgccgcatttagagcgcctatatttgtagcagcggcgggaacacttattgcagcgattttagttcacttccttatggatgacgagcttgtaaatcttgccgagcaggcaagggcggctgaaaagaataacgcgccgaaagagaagacaaaaatcagtcttgcggaatatgtgtcaattctcaagattccaatgacatggatgatgctgattgtatgccttgtaggatatatgctgtattcgcttcagagctacttcacaccttatctgacaaatgttgtaggcatatctgcggcagagtcgggaatattcggaattataaggacatatgtattcctcgttcttgcaatggtcggaggctttatggcagataaggtgttcaagagcccgtccaagtggatggcagtggcttttgctataatggccgtagtagtagcaggtatatttattataccaagcggcgcaaatccaatgcttattggtttctatacgctgcttccttcggcatttgtgcagatgacatatacgatcaagtattcgacaatcaacgaaacaggaataccggcacatttgataggaacgacaacgtcgctcgcgtcgactattgcgggacttgtagaccttgtgcttgcgccgtttataggatggtgccttgatacaaaaggtaacgccggatatgatattcttttcataattcttataatatctctcctgctcggttccgtatgcgctatggcaatcgtcaagagcaataaaaagcgacttgccagtcagaaaattgcgagctaaataataccataaattgtaaaattttgtattatgacatacaatacaaaatatatagtatgagttagacagcaggcaaacagtattaaaagagagaggtactatcatgaaaacagcagaaaaattagattcgttacagctttattgcagcattcgcatctgttcaaataggagaagaatgaaatggaaaaaattcttgttataaattcaagtccgaggaaaaacgggaattctgaaattctctgtgacagactgatagaaggtgcagaaagcaaagacgcgtgctgtgagaagataaatctgcgcgaaatgaacataggctactgcattggctgcgacgcttgcaggagaaatgacggcacttgtgttataaaagacgatatggaatggattttccaaaaaatgcttgaatctgacatcgtggtgcttgcaacaccggtttatttctttactttgtcggcgcagcttaaaacgctgatcgaccacctgcataacggttataagaaaatggcaggaaaaaaattttgttttattgcaacagtgtcagttcccgagcctgaacgtcttgaaaggacattcgattcgatgcgtggacttctcgactgcatacctgattcagaggagcttggtgtggtatgcggcaataatgcctggcttgctggtgaagttaaggcgacaaaagcatatgatgaagcatatgagcttggagtaaggattgctgaatagagaaagataacgctgatttataaattattattgtattaaataatggcgtgtattgtaatataaagtataaaatatacattattacataacgctcataaggagaggagttttattatgaaaacagcagacagattagaatcgcttcagctttcaaagataagaatgctcagcgctaaggtggctgaaatgcaggcgcagggaaaggaaatgcatatgttcacactcggacagcctgactttccaacgccttcatacatttcggaggcgtgcaaaaaagcgatcgacgatgggtatacgacatatccggattacagcggtactccggcgttcagacaggcggtatgcgacaagtacgaaagagagaatggcttgaaattcgacgagcagcaggtaatttctacatgcggcgcggcacaggcggcttatcttgtgctgacatcgtttttaaatccgggagacgaagtgctcatccctaatccgatgtacaacatttacgaaaaaattgctgaaatctgcggcgcggcagtaaagacatatgctctcaaagaggagaacgattttcaaatcgaccttgcggagcttgaaaagctcattacgccgaaaacgaagatgatggtaatatgctctccgaacaatcctatcggcggcgtgcttacacgcgaaaatctcgagggcgttgccaaaattatggagaataaagatatcatcatctgctcggatgaaatttatgagagactcgtctatgacggcgtaaaagctgtatcaccggcgttgattccaagcctccgtgaaaagacaattatcatcaacggattttccaaggcattttcaatgacgggctggagagcaggttatgttattactcctatgcagtatcaggaaaagctttatattcactgcggtttccaaatttcaggaattccggcattcgttcttgaagcctgtacaacggcgctaaacgatgagccgaaatacaatactgttgagaaaatgcgcggtgaatttgaaaaacgccgaaactatatggttgaagaaataaataagacaaagcatttctcatgcctgatgccaaagggagctttctacatattcatgaacattaagaaaacagggatgacatcagccgagtgtatcgactggctcatagtaaattacggagtggctatggtaaccggaacgatcttcggctccgagggcgagggcttcgtaagaatctcatacgcggcgtcaatggacgaaataaaagcaggctgcaagcttcttcacgaggctgacgcggcgcttgaggctatgggaaaataaaactgcaagcaattattgatatacgcttatcaattttgtttaaattctcaataattactccaaaagagcgtgccttgcaaggcgcgctcttttactattatttactgttacttttaaagctaaagtcgatatgttacagagtattttagagcctatacgcaaggactggattaaaaataaatacggacgcgccaaaatgcgaataatacttctaatattatgaaaaaataataaggtataacagcaaagaattacagtggagtgttattttttatgagtaaattcgcatacggcgaagttagatatattataaaaggaaaaaacaaaatcgtcagcagtaaaaaagggcgatacaggttcggaagcaggattggaagacaaaagagagcaagcgtcagcataggcgcgcttgcaatggcagtaatttttctgctgtcggcatgcggagtgcgtgacagcggaattatcacggtggtgtcgcgagagtcagggtcgggcacgagaacggcttttactgaaatattcggtatagaggtgcgttctaaaagcggcggtatggaggatgcaacttttgagctttcagaggtgacaaacagcacttcggtaatgataacaacggtaaagcttgataaaaacgctataggctatatttcacttggaacgatgaactatgacattaaagcggtgtccgtggacggcgtgtttccgagtgccgagaatataaaaaacggaagctacaaagctgtgcgctcttttgcgatagtgacaatgaaagataggttgcagtcagcgctcgagcgggattttacggagtttgtaatgagcgatgagggccagagcataatcgaagaagaaggatatgtcgggcttgcgggaaatgcggagagcgcagaaataaaagacagtcaggctgccggcaaaagtgcagacagtttggcgggtacagaaggcattgagggaaacagcgggacgtccaagcctatacgcgggcggcttacgatttccggttcatcgtctgtagctccggttatggaagcgttgaaagaggtgtatacaaaagcaaatccgggtgcggaaatagaagtgcagcagagcgacagcacgcagggaataatggcggtacgtgaaggaatatgcgacatcggtatgacatcgcgcagtctgagtgaaagtgagatagcggacggactcattgcctcggaaattgcgcgagatggaatagttgtaattgtaaataaggagaatcccgtagcaggatttacaagcgacgaaattaagaaaatatatatgggagaaatcagtaattggagtagtattgaatcgggcggcagtagttatgaataatttcagagaaaaagcaatgaaaatagtatttatggcggcggcgtgtacatctatcgcttcagtggcactgatatgcttctttttatttacaaacggagtcccggcaattgcggaaatcggcttaggtgaatttatatgcgggcgtatatggaagccggaaagcggtatgtatggtatttttcctatgatagtaggaagcatctatgtgacggcaggagcgataataatcggcgtgccgctgggaatactgacagcgatttatatggcggagttctgcggacccaggacatacaaggtgcttaagcctgcgatagacctgctttccggcataccgtcagttgtatacggttttttcggactgatggtgatagtgcctgcggtgcacagactgacgggtgtgagcggcaaaggcgtgctttcggcctcggtactgctcggaattatgatattgccaacaataataagtgtcgcggaatcggcattgcgggccgtaccgaaaaactattacgaaggttcgcttgctctcggggcgacgcatgagagaagcgtgtttaaagtaacgctgcccgcagcggcttcgggtgtattggcgggagtggtgctcggtataggaagagcgataggagaaactatggcggtgataatggtggcgggaaatcaggcagtaattccgaggagcgtgctcggcggtgtgcgtacgatgacatcgaatatagtgctcgaaatggggtatgcagccgatcttcacagagaagcgctaatcgcgacggcggtggtgctgcttgtgtttattctcataataaatctttcattttcgtgtctcaaaaaaggaaaataatatatgaacacatatagagtaaaaaaacgaaaagagaagacagccgccgtcggaaaagatgtaggaaaagcggcgggaagagcgcctgacagaaatagcgcgcgcaggacagaggcattgcttctgaagataatggtatactgtgcggcagcgttaagcgcttccgtgattttcataattatcgcctatatactgataaccggtgtgccgcatttgtcgccagaactgttcgcagcgaggtacaaccgtgaaaatgtttcaatgctgcctgctataataaataccgtagttatgacagcgctttcgcttgctatcgcggtgccgctgggtgtattttcagctgtttatcttaccgaatatgcgcggcgcggcagcaggctggtggcgcttgtgcgcattaccgcggagacgctttccggcataccttccatcgtttacggacttttcggatttctgatgtttgccgtatattttgggtggggctattctatgctcggcggagctctcacgttggcagtaatgatactgccgctcgtgatgcgtacaacagaggaagcactgatgtcagtgcccgactcgtaccgggagggtagcttcgggctgggagcaggaaggctgcgtacggtatttcgcgttgtgctgccgtcggctgcgccgggtgtgctcgcaggcgttgtactcggtacaggcagaatcgtcggagaaactgcggcgctgatctatactgcgggtacagccgcaggtgtaccgggaaacattttaaaatcgggcaggacgcttgctgtgcatatgtacgcgctgtattcggaagggctttatatggatcaggcatcggcgacggcagttgtgctgcttgcggtaacggctcttataaattttctttcggctgtaatcgctcataagctgataaataggtaaagagcagtgtctgtttgatgataaatacgaaaaaccgtatatgcggacgaaaattcgtacgcatatagaatttgacaaaaaggaggagcgatggtagcggcaaaggagaaatttacaattgaaaatctcaatctttattatggagcgtttcacgctcttaaggatataaatatgaaaatccccgcaaaaaatatcacagcttttatagggccgtcgggctgcggcaaatcgacgcttctaaagacgctcaatcgcatgaatgatatcgtgcagagctgccgcgtgagcggaaaggtgctgcttgacggagaagacatatacggcgatacagacgttaataaattgagacggcgagtaggaatggtgttccaaaagccaaatccgtttgctatgagtatatatgacaatgtggcgtacgggccgcgcacgcatggtgtgaaaaacagatctgagctcgacgaaacagtggaaagttcgcttaaaagcgcggcgctttgggatgaagtaaaggacagactgagaaagagcgcgctcgggctgtccggaggacagcagcagcgcctttgcattgcaagggcgctggcggtcgtccctgaggtgctgcttatggacgagccgacgagtgcgctcgacccaatctcgacatcgcgcattgaagatttggccgcggagctgaagtcaaagtatacaatagtgatggtgacgcacaatatgcagcaagctgtgcgcatttcagactacacggcttttttcctttcaggagaagccgtggaatttgggaagagcgagaaagtcttttcgatgccgcgcgataagcgcacggaggattatattacgggacggtttggttaaacgcaaaagtgaaaggaagtagagcaatgagaaataaatttgaagaagatttggcggtacttaacgcggagcttgaaaaaatgggaaagttgtgcgaggaggcgattgcggcggcagtagctgcactcattctgcgcgacacagatttcgccgaaaaagcagaggaaaaagatgcggaaattgatagaatggagcgtgagatcgaacatctctgtatgaagctgcttttgaggcagcagcctgtggcgcgggatcttcgcgttatatcggcggctcttaaaatgatatcggatatggaaagaataggagaccaagcatctgacattgcagagatagtaaagcgttcagttgagaaatcggcggctttgtacgaaaatccgtccaaaatatacgaaaaaccgtccgctgcgcatgaaaatccggaggcgcgatatgaaaaattagaaggtggggaaagcttggcagagtacgaagcggagaccgaccgcatagcgagcggcatacacataaaggatatggcggaggccgctataaagatggtaaacggcagcgttgcttctttcatagccaaagacgcagagctggcaaagaatgtgatgcttcaggatgacatcgtagacggactgtttgaaaaggtcaaaaaagagataatgctgcttataaaaagcagcgatgtatcaagcgaacgcggtctcaatcttcttatgatagcaaagtatctcgaacgcataggcgaccacgccgtaaatattgccgaatgggtggaatattcgctaaccggacgtcacaaaaaagacgatccggagcgtcaaaaagcgacctcgtttttttagctgcgcgtgttgattaaaggggcagaaaatgttaaaatattatattaaaactttttgcacggttggaacggggatggatttattatgaacagtaaaaaatataaggatactatatatgagacgcgcgatataaacaatatcaaggaattgtttgtaggttcgtgcgatctctatgctcataagacggcgtatcttgtaaaagagaagccgggcggcaaatatatgccgataaaatattcacgcgtaaaagaagatgtggaatgtctcggtacgggattttacaagctcggactcaggggtgaaaaaatagctgtgctcggagaaaacagctacgaatgggtgatgacatatattgcgacggtgatcggaagcagcgtcattgtacctattgataaggagcttccagcaaacgaggtggccaatctccttacacgcgccaaggtgagcgcggtagtttattccaagaagagtgaaaaactgcttcatgcggcgcttgagcagatggaagaggaaacggcaaacggtatcaaatacagaatatgcatgaaatcagatcacggcgcggccgaaaccgatctcgatactgttatggaaataggaagaacagcgctcatatcaggcgacaggagctttctcgacaatgaagtcgatagcgacgctatgtgtacgcttatgtttacatcgggcacgacaggaatggctaagggcgtaatgctcagccagagaaatatcgcggccaatgtgcaaaatatgtcgaaatatgtaaaaatagacgatgatggtatcggcctttccgtactgccgatgaatcattcctacgaaatgacctgtcatatttttacgggattttatcagggaatggccatagctatatgcgaaggacttaaatatatacagaaaaatcttgtcgaatcaaaagctacagtcatgcttggagtgcctctcatttttgaaaatatttataagaagataatgaagcaggcatcgtcaaagggcaaggccaaaaagatgagaaaaatgatggaaaggtctaaaaaatacagactttataatgaccagaattttatcagaaaaattttcaagtcggtgcatgagccgctcggaaacagcatcaggctgctgatagtggggggtgcggcgatgaatcctaaaataatagaagattttcaggcactcggttttccgatgatacaggggtacggtatgagcgagaatgcgccgataatagctgtaaaccgcgataagtgcagtaagcctgcgtcagtgggtccggcaatgccgggaacggaaatcagaatcgacagtccgaacgaagacggcatcggggaaattgtcgtaaaaggaccgtccgtcatgcttgggtattatgaaaatccggaagctacagctgaggcgataagggacggctggctctacacgggcgactacggatatttcgatgatgaaggctatctttacatatcgggaagaaagaaaaatgtaatcgtcacgaaaaacggcaaaaatattttccccgaagagatagaatatatactgagcgaagcggattttattgcggaagtgcttgtttacggtgagattgacgaaaaaacgggcgatacatttgtcaaggccgagatataccctgattatgggcagataaaagaagaattcggaaagctcacggatgaagaagtcgaaaagcttataaagcatgtggtatccgaggtatgcgatgtactgccaacttataagcgcgtgacgagagttgcggtaagggatgtagaatttgaaaagacgacgacgagaaaagtaaaacgaaatcagaagaagctggagaaaaacgcgaaaaatcaggacaaatagcgaacagaaaaaggagcaccgaaatggcacatgattccggatatatagtgcgaaaagcaaaagaaagagaatgggcagagaaatttgtcagcgaaattaaaaacagcagcgagcctacggtaaaatacagaaactcaagacccataaccgatataaaaaatatgatagacacctcttgcgcggagtttgccgagaatacagcgttttgggtgaaggacaaaaaaggcggcgagtatcgtcccataaaatacaaagaggcgcatgatgatattaacggccttggtacggctattatagcagcaggctttaaaggcagacgcatttctgtgataggtgagaacagttatagatgggcggtttcatatctggctgtcgtatgcggaggcagtgttgtcgtaccgctcgacaaggagctttctgcggacgagcttaaaaacattattaaagaagcaaatgtgagctgcataatctttgatggcaagtacgagcaaatgtttaaagcgatgaaggatgagggggatacggaacttgatcttctcatttctatggacgcagatacgagcagcaaggaaatgtttgcgtggaaagatatggtggaatcaggcagaaatatggtgctttcgggaaacaaggatttcatcgaagctgagataaacaacgaagaaatgggcgtgcttctttttacatcgggaacaaccggcgtgtcaaagggagtaatgctgagtcataagaacatagcggccgaccttatggcagcgcctacagtgctcaaggttatgccgagcgacgtatttttttcgcttttgcccctgcatcacacatacgaatgtacatgcggttttttgatgccgctgtataaaggcgctgcgattgcgtattgtgagggactcaaatatatagtaaaaaatttggcagaggcaaggcctacatttttcctgggcgtgccggcagtatttgaaaatttatataagaaaatatggcagaatgcgaggaaaaagggcaaagaagatgcgctgaaaaaggcgataagtataaacaaaaagacgaagaaaatcggcatagacatcggcggcatagcgtttaaggaaatccgcgcgctcttcggcggccgcatgcgtatgatgatatgcggaggcgccgctataaatccggaagtgcttgagggactgacagctttcggacctactgcacttcagggttacggacttacagaggcatcaccgattggcgcactcaatccggatactaagccgaacagtggctccataggcagaaagctgcctggatttgatataaaaattgtcaataccggggaggacggtataggagaaatctgcttaaaaggtgataacattatgctcggctattacaacaggccggagcttacagaagaagtgatgaaaaacggctggttttatacgggagatctcggatatatggatgatagcggctatgtataccttaccggccgcaagaagaatgtaataataacaaaaaacggcaagaatgtatatcctgaagaactcgaatacaggctttcaaatattccgctggtgcaggaatctatggtatggagcaagccgtctgaagacggtgaggatatggtaattgtagcgtcgattattgtaaatagtgaggctcttttcgagaaattcggagaaagggagcttggcgatgaagaaatcgaacgcgagctgtggaaggaggtcgataaaataaatcttgaagttccgtacttcaagagaatcaaggctatcactctgcgcaaggaggaatttgaaaagaatagctcaaagaagataaaacgctttgctgagggcaataagaaataaggacattagagcggtgcgggaagcgtgcttacatttggttgaagtaagaaacggaggaaagaaaatgagtttgaaatctgaatatccgcagcttgaaattgacttaaaaaaacttagagaaaatattgaggcgatgaaattactgtgcgacagaaacggcatcgaaatagcagccgtaataaagggcttcagcggtattgcaaggtgcgtgcgcgagtacgaggatgcaggtgtttcctacattgcttcttcaagacttgaacagcttgaggaggcaaagaatgccggtataaagacgaagacgatgtgcataagaataccgatgatatcggaggcagacgatcttgtgagtgtagctgactgctcgctggaaagtgagataagcgtactttgtaaagttgataaagcggcggctgccaagggcagaatacatgaggtcatcctgatggcagaccttggcgatctgcgcgagggcttttggacgacggaggagcttatagaagcggcgctgattacggaaaatgagctcaaaaatcttgaacttgtaggaattgcgaccaaccttggctgttacggctctatcgaagcgacagcggcaaagatgaacgagctcattgaaagagccgaagccgtggaggctgtaataggaaggaaacttaaatatataggcggcggagcgacaacctcgcttccgaggctcattgacggagatatgccggagcgcataaatcttctccgcataggtgaaggcatcatctatgcgcgtgatcttccggacttctttaattgtgatatgagctttctcaataatgatgtttttacgcttaaagccgagattgtggaaataaagacgaaagcctctcatcctgtgggaaacatcacggtggatgcattcggacacaaaaacacatatgaggacagaggtatgcgaaagcgggcactcgctgcgataggcaaggtggattattgtgattttaatgacatatatccgcgtatgaagggcgtagaggtgataggagcctcaagcgatcatactattctcgatatagaggatgcggaatgtgagctcaaagtgggtgatatcgtggaatttgatattcgctatggttcaggtgtatttcttacaggatcatctaatgtaaagcgggtttttgtataaattatacctgtatgctgtcatagaggtagagggaaaatgagattgaaagacgggaatatttatataagctgcgagaactttccggcaggagcagttacctgcttttcgacgagactcggcgggaaaagtgcctgcggcatagagggaatgagccctgatccttggaaggggcagcccatagaaacggtaatcgcaaactgcagagtgctgggtgaggcagcggggtttaagcctgaggatatgtacatcacatcgcaggtgcatggcgataatataaaaagggtaagcaaagaggagcgcggtacaggcttgtttttgccggtcaaagtagatgcggatgcgctcataacagatgagccgaatgttgcgcttacgataagaacggctgactgtacgccgatacttatatacgatccggtgcgcagggctataggggctgcgcatgcaggtcacaagggtaccgcgcttgatatcgcgggcaagactgtacggcggcttgcagaagaatacggctcaaatccgcaggatatgcacgctgcaataggaccctgcataagcaaatgctgctttgaaacggatatagatgtacctgaagcgatgcgaagcgtactcggagatgcagcggagtctgcaattgccgaaaaggtgacgccggaaaagggtcttaaatattttgtggatttaaaggcgataaataaaatgctgcttatgcgagcggggataaagtctgaaaacatagaaatatcggagcactgtacgtactgtgagagcgatttattctggtcgcacaggcgtatgggggcgcttcgcggttcactggcagccgtaataatgctggtttaggcggttttatatgctaattactgtattttatttgacaatagtatggtaattagtgtaaaatgatatgataaaatataagcctgaaaggagaatcgacagatggcagaagaaattttactgacccgagaaggttatgaaaaaatagttgcggagcatgaggagctcatagcagtcaaacgaaaggaagtcgccgaaaggataaaggaagcgctttcttacggcgatatttccgaaaatgctgaatatgacgctgccaaaaatgaacaggctgaactcgaagagagaatacacaagctcgaaaatatgatgcgaaaggctaaaatcatagacgaatccgaggctgcgggcgacagagttacagtcggaaccaaggtaaaagtcaaagagatgggctcgggcgaggaaatggattttataatagtaggctcgaccgaagccgacccgtttgagggaaaaatatcaaatgaatcgctggtaggcgcggggctgcttgataaagagctcaatgaagtggttgaaattgctgtgccggacggtgttgtaaattataaaattattgcaatcggttaattttctaaatatacaaatagagagggaaataaaatgacagacgaaagaaatgtaaatgtaaacattgagaatgaagaagaattatcggaagagcagctgacggaacagaggagaataagaagagagaagttaagaaagctgcaggaaatgggcaggaacccattcctcatagagacttggaatgtagaaacatacagcaaggaagtaaaggaaaactttgaagcctgggaaggcaaaagggtttctatggctggcagaatgatggcaaatcgccatatgggaaaagtgtcgtttgtcgatgttctcgataaggaaggcaagatacaggcatatgtctctgaggatggaatcggtgctgaagagtatgaaattttcctcacgtatgatatcggtgatataattggatttgagggtgagatattcaagacaaagagaggggagatttccgtaagagttgaaaggctcgtactgctctcgaagtcgctgcaggtgcttcctaataagtggcacgggcttaaggatatcgaccagagataccgtcagaggtatgtagaccttatcatcaattcggaagtaagggagatgttctacaagagagctgctatcatcaaggaaatcaagagaactctcgaggaggacttcggatatcttgaagtagatacgccgatactaacgactattgcgggcggtgccaatgccagaccatttaacacgcatcataacacgctcgatctcgatatgaagatgcgtatatcaaacgagcttttccttaagagatgtgttgtcggtggacttgatagagtatacgagatgggcaagatgttcagaaacgaaggtatggatagaaatcacaaccctgagtttacatctatggaatgctacgctgcatacacaaatatggaattcgtaatggaagtaacggagactgtagtatcgaacgctgctatgaaggcaaacggctcgatgaaaataaattatcagggcaaggagtttgatctcactcctccttggagaagactcaagatgtcagatgcggtcaaggaaattacaggcgttgactttgataagatcaatactgatgaagaggcgagagaagcggcaataaagtatggtatggatcctgatgatgttaacaagtggacgagaggaaaaattctcgctgagatgttcgaggactactgtgaggatgtaccgggatatctcgacggaccggtatttgttatcggacatcctgttgagatttctccgcttgctaagagagaccctgaagatccgagaattacgagaagatttgaggcttatataaacggctgggaaatcgccaatgcgttctccgagctcaatgacccgatcgatcagtacgagagatttgcggagcagcaggcgcagctcgacagcggcgaggatgacgaagcgcacccgatggatctcgactttgtaaacgcgctcgaagttggacttcctccgacaggcgggctcggtatcggtatcgacagagtaataatgctcgttaccaacgcaccgtcgataagagatattatgctcttcccgacaatgaagccgttggactctgacaagaaggtttccaaggaagtttcggctcctgcggaggctactcagacggctcccgttgtggaagaaaaaattgatttttccaatgttcagattgagcctttgtttgaggatcaggtcgattttgacaccttctccaagagtgatttccgtgccgtaaaggtcaaggaatgcgaagctgtgaagaagtccaaaaagc

SEQ ID NO: 1708 - DNA, 10681 bp, Unknown
  16S sequences of unknown bacteria
gggtcaagcagaccgatatttgtcacggtcttactgtttgccggtttcttttctatgatataatgccggtctgccatcgccgcgatctgtgccagatgtgtgatacacagtacctggtgatttcgcgcgatgactgccattttctctgagaccttctgcgcggtccgtccgctgattccggtatcgatctcatcgaaaatcagggtctcaaccgcatccttgtccgccatgaccgccttgattgcgagcatgatacgcgacagctcgcctccggatgccacgctcgcgagcgggcgcatcggaagtcccggatttgtcgaaatcatgaagcagatctcatcctttccgttttccgtcggctctgagagctcctcaaatacaatctcaaaccgcacgtcgagaaaattcagatcgacgagcgcagcacggatcttttctgagagaattcccgcatactgcttccgaatcccggaaatctcgtctgccagacgggaaaactccttctgactgctctcatagtcccgctgcagctgctccagataggagtcataatcattcaaaatgtcgattcgtgcctgcttttcctttgcgtagtccagaatctccggaacagactgcccgtattttgtcttgagccggttgatgagatccagccgctcctccgtctgccgcatctgctgctcatcaaagctgaagctgtctgtatattccgcaaggctgcggttaaaatcatcaagcagtgtctcgatctcctccagcgagccggacagctcccccagcgacggatcatatgcctggaccgcgccaaggcatctcacggcacggccgatctcatcgcctgccccggaatagccgctcgccccggtcagactcccggcctcggagagcgcttccatgatcttctggccattcgccatcatccgataagatgcctccagctcctcatcctcgcccgggattagatgtgccgccttgatctcctgcacctcaaactgcagaaaatccagctccttggccctgctgccggcatcggaggaggcgtccgcccactgccgcttcgcctgcatgtatttccgatgcagcctgcggcactttacgagtctgtctccgagctctgcacgtgcaaaattatcgagaataccgagatgatttttctcgtagagcagtgactggtgctcatgctgcccgtgaatgtcgatcaggtctcccgcaagctcgcgcacaaaggagaccggcaccgtctcgccattgatcttgctcgatgcccgtccccctttgtatttccgcgtgatgatgatttcatgatcctcaaacggcagatcctgccgctgcagcttctcctctacctttggattctccgtgcggaatacgagctccacaagcgcatagtctgcatcctccggtacataatccttaaagtttccggttccgagtgcgatattcacagaaccgatcacaattgactttccggcaccggtctctccggtcatgatattcagtccttctccgaactcgacctcgacctccttgatcagcgccatattttttacatgtaaactgactaacatctgtcctccgtactctctccccgaagcattctgttacccgccacattccggatcctatgtcccatacgactgattgattttctcagtcgaagcagtagacttattttctccccacgacccggctgatcttatccatcacacgcagggtatcatccacgctgcgcaccgcacacatgatcgtgtcatccccggcgatacagcccgccacctcggaccaatgcatcgcatcaatcgcagccgccaccgccattgccatgccggacacagtcttaatcacaagaatgttctgcgccatatccatcgataaaaaaccgtccttcaggactctgaggtatttttcattcattccggccggctgcggctgcatcagggcgtatttctgccgtccgtcatttgtcgcgatcttggtcagtttcagctcgcggatgtcgcgggaaatcgtcgcctgtgtcacccgatacccctcccttttgagctgttccgcaagctcctcctgcgtctctatgtcatattttccaatcaaatccactatcttggcatgtcttcctattttcatcttcgcttcactcctgttccggttcccctacctgctcattttttcgcgaagaatctcaagaaaacttgtattcttcgtcttaatcatcagcgcctcccggttcgaccgatggatgaccacgcggtccccggcatttaatttgaccgaggtatctccatcaaaggtcgcctccgcaccgtcgatatccgtcccatggctcgtcccgatctcaattgcaatctccacatcatccggcagcacgatcggacgggcatttaaggtgtgcggtgcgatcgctgtcagcagcatcagggatgcctccggcgcaacgatcggacctccgactgaaagattgtacccggtcgacccggtcggtgtggaaatgataatgccatccgccgtaaatgagctcagaaatgccccgtcgacgtaaacattaaaatctacaacgcgcagccgcccgttccgtgtgatgacgatatcattcaatgcgatatctgccagcattttccgattctgatgacaggcactgccacagagcatcattcggtgctctatgctatactcgcccgtgatcagcttctccagtgccggacagatacttttccggtcgatctccgcgaggtatccgagcgttcccatgttgatgccgagcagcggaagctgccgctccaccagatccctggccgcctgcagcagtgtgccgtcccccccgatgacgagcacacactccacctcatccggcacacgggaagcatcggtatacttatatgctccgccgttatcccctgcttcatttgactgaatgtagcaggtcttaccctttttttccagatactgctgaatcgcctgtgcagtctccaaatccggatctttctgataatttgtaataatataaaatgtatccataaccgatccttatttatccaacgtgccatgcgcctgtgcaacgatctcctgcacatttcccgcaaatggctccaccgatgcggcatccggccttttcagaagatgcagcagatactcgatatttccctccggtcccttgatcggagaaaattccagctcccggctctccagcccgaccgtcgcagcgaagtcgatcaccttctcaatgacctcctcatgtaccttcggatcgcgcacgacgcccttcttgccaaccttctcccgacccgcctcgaactgtggcttgatcaggcagacgatctctccgtcctccgtcatcagctcccgcaccggcggcagcaccttcgtcagagaaataaaagaaacgtcaatcgagacaaaggctgccggctcctcgatctgctccggcgtcacataacggatgttcgtcttttccatgcagacgacccgcgggtcattgcgcagcttccagtcgagctgtccgtgtccgacgtccaccgaatagacctttaccgcgccattttgcagcatacagtcggtaaagcctccggtcgaagctccgacatccatgcacaccctgccctccaaagtcaggtcaaaatgactcatcgccttttccagcttgagtccgccgcggctgacatatttcagctgaccgccctttaccgtgatctccgccttcacgtcgatcatcgttccggccttgtcctcgcgctggccgttgaccagtacgtttcctgacataataattgcttttgctttctccctcgaagccgccagcccctggctgaccagaaggacatccaatcgttctttcatcgaaaactcctttacgcctgataccgtgccacgatccgcttgaagatcgactctgcatcgatgcaggtctcctgtttcagcacatctacattgccgtgctcaatatagtcatccggcagcgcaatctgcagcacctgtacatccgctcccgtctcattgtaatattccagtaccttttcgccgaagccgccgctcttcacattttcctccatcgtgacaatcatggaatgatccgccgcaaggtactgcagcatctcctcgtcaaccggctttacaaagcgtccgttcacgatcgtacagctgtagccgatgcccttgagcatctcccgcacctgcagcgccgtctttaccatgctgccgactgcgaccagcgcaagcccacactcgtcgtagagcagctctgatttgccatatacgaccggcgcacggaactcctgcagcccgtcgtaagcctctccccgcggatagcgtaaagcgatcggcccctcatagtcaatcgcatacttgagcatatctgccagctcccatttattcttcggcgccatgagacacatgttcggaatcgccgagagataagacagatcgaagataccctgatgcgtctccccgtcgctgccgacaagtcctgcacggtcaatcgcaaagacaaccggcaggttctgaatacagacatcgtggatcacctgatcgaagcctctttgtaaaaaggaggaatacaccgccatgaccggcttcataccgcccgctgccagtcctgccgcaaacgtcaccgcatggccttctgcaatgcccacatcaaagaaacggtcacggtacatattccggaagcgcttcagtcccgtgccatccggcatcgcagccgtgattgccacaagcttcggattcttcgcgcccatcttacacatcaccgtcgaaaaaacatcggtataaccggcttttttctttctggccaccggaagcccggtctcaatatcaaacggctccgccccgtggaaccgtgacggcatccgctctgccggcccgtatcccttgcccttctttgtgatgacatggacaaggactgctccgtttaccttttttgcatcgttcagcacccgtgtcacctgagcaatattgtgtccgtctaccggacctaaataggtgatccccatctcctcaaagaacatacccggcacaaggaactgcttgatcccctgcttcgtactgcgtatccccttgatcagccggtcgccgtataccggaatctgacgcagcgtattctcaagcccattcttcagcccggtgtaggaatctgccgtgcggatattgctcaaataagcagaaataccgccgacattttctgagatcgacatgttgttatcatttaaaacgatgataaaatttttctccagccgcgccgcattattcagcgcttcgtaggccataccgccggtgagtgcaccgtctccgatcaccgatacgactgtgtagtcctgcttctgcagatcccgcgcctccacatagccaagccctgcggaaatagaggtcgaactgtggccggtatcaaaggcgtcgcagtcgctctccttgcgcttcgggaaaccactcataccgccatatttacgcatcttatcgaagccgtcccgtcttccggtcagaatcttatgggtgtaggactgatgcccgacgtcccagatcagcttgtcctccggaaaattcagcacacggtgcagcgcgatcgtcagctccacgacaccgagattggacgccagatgaccaccgtttcggctgatcttttcaatgagaaacgcccggatttcagatgcgagctccggtagcttctctttgtctatctttttaatatcatttgctttttcaatctgctctaacagaatcaacgccacccttcctcatgcatcccgcgaaatcaggtttaagatcagctcgtgtaaaaactcattctcacatggaagctcctcaagcagccggaccgcctctttggaatagcgttccacatctttgcgtgcctgatccagtcctttcacggaaacataggtgattttatgatttttctcatcgctcttcgtcggctttccgagcactgcctcgtcaccggtcacatcgagaatatcatcctgtatctggaaggccatgccgacgttctgcccgatctgcccgaccttttctaccgtatccgcatctgctcccgccagtacggctccgatcatcatggatgcctcaatcagtgcacctgttttcagctcatagatgaactgcagctgctctgcactcaatgggcggtcgacatactccacatccacagactgtccgccgatcatgccggtcatgccggtctttgccgaaaggatctggaatgcctttccgactgtcggattgcccggctccaggtcaaatgcctgtgaggcagtctcataggcaaggttcagaagcgcgtcgcctgcaaggatcgccatcgcttctccgtagacgacgtgggtcgtcttttttcctctgcggtattcatcgttgtccatcgccggaaggtcatcgtggatcagcgaatgggtgtggatcatctccatcgccgccataaacggctcgatcacccgcttatgcccgccaaacatcacataggtctgctgcatcagaagcggacggagctttttccctccaaccagcatactgtagttcatcgcctccagcagcgtcttctgaaagccttcctcctgcggaagatacttttcaatgatactcctgatttctgtcacacgttttttcatctcatcattaaaattcatcaagaccgccatccccattcatgatcaaaatctttttctctacggtatctatcttttctttacagctctgtacgagcttcatgcccttttgatagagggcaaaggattcctctaaagagatgtcgtcgccctctaacgtatctaaaatcgtctccagtcgctccatactctcctcgagcgtctcctgcccggtgctatttggctctgccatctctcatcctcctttttcttatgcgaaatccccatacactgctttttgcaatgaatcttaggaacttacctaattcgttattttttcccactatccactttggactctttcacttcctgtatccgggctgtcatccggccatccgccaggtagatctgcacgacctctccgggcgcgacctgcgatacggaacggatccgtctcccgtcctctgttaaaatgcagccgtagccgctctccagcttttcataaggagagagcctgcgcagacgctcttcgatgagtgccagctgatggcgagtctgctccagcaaagactgcatgacgcgccgcaggcgctcctcatactcatccagtctttgcttctgctgcatgagccgctgctgtggcttcgcatagcgcatccgcagctcgcactcccgcaagcggctccgcgcgtcctttatcatcctctgcataatgcgctgcagctgaagtgcatcctcatccagcgcctgcagccatgcagtgacgtctgccaccgcaagctccgccgcagcggacggcgtgggtgcccgcagatctgcaacgaaatctgcaatcgtcgtatccgtctcatgtccgaccgccgagatcaccggcgtatgacaggaaaagatcgcgcgggcaaccgtctcctcattaaatgcccacagatcctcgatcgaaccaccgccgcgcccgacgataattacatcaactccaagtgcatctagggcagccagtcctgccgccacactttcggctgcaccatccccctgcaccttcgccgggtaaaggatgatccggatacccggattcctccgcgtcgctatgttgatgatatcgcggatcgccgctccggtcggagccgtgacgactccgagccgccggacgaacttcggaatgggctgcttgtactccggtgcaaacatccccatctcttccagctcttccttcagctccagaaatttttcatacagctctcctgccccgtcctgccggatcttcgtcgcatagagctgatatttaccgtctcgctcatagacattcaccgccccgtccacaacgacctgctgtccgttggacattcgaaaagccagtccccctctggcaccggcaaacatgacacaggcaatcgcggccgaggcatccttcaatgtaaaatagatatgcccggaggtatgatatttcagattggatatctcaccccggacactgacccggttcagaacaaagtcctgtgtgaacatatttcgaatgtaggtgttgatctgcccgacggaatataccttctgcatagagcttacgcgagcttcgccagaataccgttgacaaaggccggtgactcatctccgccgaacttcttcgccagctcgaccgcctcattgatcgctacctttaccggaacatcttcgtcgtacttcatctcatagactgccagacgaaggatcgccagctctgcctttcccatacgtccggtcttccatccctttgccacctgattgatggcctcgtcgatctcggtgatcttctcacagatcccttcaaacttcgctgcgatgtagctgcgctcctgatcggtgcactccacatcttccaaataagcattcagctggtcctcaagctcgctgcttgtgtgaaattccccacagaacaccagcttaaaaatattttctctgatctcgcttcttttcattctgtctcccttaccgacccttctcgccagacagatatcccctgccgtctccggcatgtcccgccggaagctttgcccaatgtctgtgaccatagctaacgaagcacggcagttttatctgtataaacagaaggccgctgcaatccatctgtggtcctccgacctcatgccctgcagcagcctttcttcaggtcttattttgtattctcattgtccattgtgacatttacaatcttgacattgacctctgccacatcaagtcctgtcatcgtctcgatcgccgtcttgaccttttcctgaatctgtgtgcaggtcgacggcacgctgtagccgtagcggatgttgatcgcaagtgcgacccggacagtatcctcatccatcgtgatcttaaccccctttgaaaggctcttcataccgagcttctcaatcaggtctctcgtcacatttccggccatggaggctactccctccacctcagaggctgccagacctgcgatgatagcaactacctcatctgcgatccgtacctcgccgaatttttcttctgtctctattttatgtgtatgaacctctgcattttccatagaaaacctccatcttgtttaactgaacataacctgtggatattatagcaaaaaatatgtggtttggaaagtattttataatgcgttccgcacgtcatattccgtgaaaacagtccttagcaaataaatatgtggtttggaaagtttttttatagtgcggacgtttcgaccaagccacagacacattcgcttcgcgaactatccgctgcttcgcagctcctgtctgcggctaaacgtgcgttccgcacgggatataatggtcgaaactgctagcgcccaaactccgacagcaccagtccttcgtttcgatccaacaccatgcctaccgaccagctgttgatgaagaggagcagcgggcggcccttgaggtcgcgaatcttcttcatatctgatgtgccgacaaggcggttcagatcgatgtcctcgttctcgatccagcggatgtattcgtatggcagctcctctaagcggatgtctaccttgtattcattttccagacggtacttcagtacgtcgaactgcagcacgccgaccacgccgacgatgatctcctccataccggtgttgtactcctggaagatctggatcgcaccttcctgcgcgatctcgctgatccccttgatgaactgcttgcgcttcatcgtgtcgagctggcgtacccgcgcgaaatgctccggcgcaaaggtcggaatcccctcgtagcagaactttttgcccggcatacagatcgtatcaccgatcgagaagatgcccggatcaaagacgccgatgatatcacccgcataggcctctgaaatcacctggcgctcagatgccatcatctgctgcggctgggaaagacgctgcttgcggtctccctgtacgtggtagacttccatacccgcatcaaatttaccggagcagatacgcatgaatgcgatacggtcgcggtgtgcccggttcatattcgcctgaatcttgaatacaaacgcagagaaatcttcactcatcggatcgatgatgccgcagtctgcctttctcggaagcggcgaagtcgtcatcttcaggaaatgcttcaggaaaatctcgacaccgaagttcgtcagtgcggaaccgaagaataccggggagagctctcctttgctgaccagctcctgatcgaactctgccgacgcaccatcgagcagctcgatctcatctatcagctgtgccttattctcctcaccgatgaactcctgcagctccggcgcatgaatatcaacctccgtcgcatgtccaagcttcgtacccttctgcgtatccgtgaaggtcgtcaccttcccggtcgcacggtcgtaaacacccttgaaattctttccggagccgatcggccagttgatcgggcaggtcgcgatgccaagctccttctcaatatcgtcgagcagctcgaaggtgtcgttcgcgtcacggtccatcttattgataaaggtaaaaatcggaatatggcgcatgacacagaccttgaacagcttgcgtgtctgtgcctctactcccttggatgcatcgatgaccatcacggcagagtccgccgccatcagggtacggtacgtatcctccgagaaat

SEQ ID NO: 1709 - DNA, 32759 bp, Unknown
  16S sequences of unknown bacteria
cttttctatgaagaaaagtaggcaaaagtcatttagggctccgccctaaagacccaacgcgtcggtacgccccgtataatcggggcccccgcaaggtcgtaagaccttgtggggaaaggaggatgcaccgcagcggggagggctgcccgaagcaaagcgtagggtcagtccgacttaagcgaagatgttattttaattcggtttctgctgaatccaaaataaaatgcgccgcaggcaccttgggagcgtatctgcggcgccgtacggacgatgcttttgcatcgttcgtatccagccgcagcttagcgttagggggtcttggggcacagccccaagtgtgttttggttccttttacacaagtaaaaggaacgccacgccggcgaggcgtactagctaagccttgtcaaaggctccgccccgccgccaggcgcccactatcttggcctaaaaatccttttgcccacttttcatcacagaaaagcatccccccggcggcgagccgtacaggctttgcactctgcaaaatcttcgccccgccgtaggcgactacaaaccatcccccgccgggtaggcgtgctaactaagccttgcaaaaggctccgcgacgccgacaggcgagatgaaatgattgccttgatatttgccgtcaacccctcagtcagccttgcggctgacagcctctcgctgcggctcggtcacggcgcggctctgatatgccactggcatatcattcactaccgcgccgccacttcgttacctcttacacaggggaggctatgggttggagcgccgcttaccctttgcataagggagcctatgaggactcggcaaacagtgcagatatcgcatcgaaaaggtccatttgtatcgtccgaaatatctctacaaaatccattatttagagaaatattgccgccctatcccctaaaatccaccaaaaataaaaaaattttcaaaaaacggacattccatgcaggaacatccgttctcttttgcgtattatattagtagagggctttgcaaagtgtgaccgatcgtcctcccgggccctccctttctcgagaaggtgacaattgaatcatttggtgcaaaccggcgttttgggcggcggctttctttcctgcaccctaaatggaccgtacctccacctgcggcagcagggcgcctatgtcgctcatcacggggggctgtgttccggcccgtaccacctttgcggtagcggccgctaccgcaaatcgcagggtctcctcgggtgtgagcccgtgcagccgggcatagatgagcgcggccgtcatggtgtccccggccccggtggtattaagcacggtcacagtaggggccgcggcaaaaagtaccgcttcccgggtggccagcagcgccccctgcgcccccagggaaaccaccacctgtcctaccccgcggtgcagcagctgccaggccgcttccgccagggattcagtggttgccaggcggtagccgtacaggggctccagctcctcccggttgggttttatgcagtccggcttcgctgtgatccccaaaatcagtggctccccggcggtatccaggtaaacggcggccccctttttccggcactcagcggtgagatcccggtaccatccggccggtaaatcttgcggcagactgccgcacagcaccaccacatcccccggcaaaaggcgctccagcagctcctcccgcaggcgcccggcaggggcggcctcccccagcagaccgggggcgttcagctcggtggtcagtccatccccccgggaggagattttgagattgacccgggtggggtgaggggcggcatagacggtacagggcagctcctcctgccgcagcagtccggccagctcctggccggtcgtcccgcccgcgatggtcagggcaacgcagtcctcggcaaagacacgcagggcccttgccacattgatgcccttgccgccggcatagcggcagcgggaaagaacccggtgggtggcgccgggccgcaaatgctccacttccagtgtttcatcaatagcgggattgagggtgacggtgtagatcataaaaatcacctccggggcaaatttccatccccagtatagcgcataaacaggggagttgtccaccaaaagaaaagccctctccggagagagggcgggggagagccgcgttcaaacaacggctccctagaaaaacgcaagttattggcgatgatgttggaggacttttgcgatagacacggcggtgttgttccggctattttatctgcgatgaaggtgaatttttgtcctgaaggaagacctccgcggggaagggtgagaggtaaacggtgaagaagcggggccagcgggtgaagcccgctgaaaccgcccgtcgggcggtttggcctgcggccggcgtcccggattttgcaggggccataaaaagcggctttgccggttgatttttggtttgctgcgggtggcgccttttcgcaggagggcaacggcggttttacccggtctttgaattcttgccgcaatcggtacggcggcagcgggcgcaatcgccacagcagctgccggtatggccccggcggacggcccggagagcgaaaaatgtgccggtggcgattactgccagcagcagccaatcgagggggcccatcagaacagccctgtgatggcataggccagccagcctactagccatgctacaccgcattgcaggattaccacgccgactgttttcacggtggagccgagctcccggcggatggtggctatggccgccacacagggggtatacagcagggtaaagaccaaaaagctgatggcggcccggggagagaacatcccggtgacggccgcaccgcccagcaggacctccagggtgctgacgacagattccttggcgacaaagccagaaatgagggcggtggcgcagcgccaatcggcgaagccgaggggggcgagaaggggagcgatccattggccgatgagcgccagcagactgtaagagctatccgccacgacattgagacgggtatcgaagccttgcaggaaccagatgatgatggtggccaggaaaatgacagtgaaagcgcgctgcaggaagtccttggctttttcccacagcagcagccctacacttttggcgctggggagccggtagttgggcagctccatcacaaaggggacgggcttgccccggaaggcggtgtggttcatgatgagggccgccacgatgccgatgaggatgccgagaagataaagggcgatcatcaccagggcgccgtactgcgggaaaaatgccgccgtaaaaaaggcgtagatggagattttggcagagcagctcatgtaaggggtgaggagaatggtcattttgcggtcgcgatcggaggagacggtgcgggtggccatgatggccggcaccgagcagccgaagccgatgagcagcggcacgatgctgcggcccgaaagaccgatgcggcgcagcggcttatccatcacaaaggcgacacgggccatgtagccggtgtcttccaggatggagagaaagaaaaacagggtgacgatgatgggcaggaacaccagcacgctgcccacgccggcaaagatgccatcgatgatgaggctgtggaccaccggattgatgccgtaggcagtgagggcgccatcgaccagggcggtgagcgcatcaatgccgacggccaggagatcggaaagacgctggccgatgacatggaaggtgaggtagaaggtgagaaacatgaccgccaaaaaggtgggaatggcggtgtaccggccggtaaggatctgatcgaaccggacggagcgggcgtgctcgcggctttcgtggcacttggtgaccgaggcggcgacgaccccttcgatgaaggtatagcgcatatcggccagggcggcattgcggtccagcccggtttcgttttccatctggacgatgcagtgttccagcagctccttttcgttttcatccagccgcaggtccttttccagcgtatcgccgccctcaatgagcttggcggcgcagaaacgggtggggacgcccagccgttcggcgtgatccgagatgaggtggataacggcgtgcaggcagcggtggacggcggaatcatcggtgcagaaatctgtgaccttgggtaggattttgccccgtgcgacggtgagcgcctgggtgataagctccgatacaccctcgcccttggcggcggaaatgggtaccaccggaatgccgagggcgacgctcattttttgcacatcggtggagccaccgttggcgcgcacctcatccatcatattgagggccagtaccatggggacccgcagctccaaaagctgcaaagtaaggtagagattacgctcgatattggtggcatccacaatattgatgatgccatccggcttttgattcaggatgaaatcccgggtgacgatctcctcctgggtatagggccgcagcgaatagatgcctggcagatcgacgacggagcaatttttctcgccccggatatcgcccattttctgatcgacggtgacgccgggaaaattgccgacatgctgattggagccggtgagggcattgaacagggtggtttttccgcaattctgattgccggccaatgcgaagatcatatttccgcggcctcctttacctcgattttttgggcttcctccacccgcagggtcagctcatagccgcggacccttatctcgatgggatcgcccatgggggcgaccttttgcagggtgacgcgggtgtgggggatgaggcccatatccaaaaggcggcagcgcagcgggccatcgccgcccacggccgtgatgataccggaggagccggttttgagttcattcaaagtcatagtgataatcctttcccttgacatgtggcaattaaaattaggatagactaattttattataaggcggcaaaaatatcaagtatccgacagggatcgggcggtattttgggcggaggggcaaagcgggcggagggctttgtccatttgaggcgggactggcatttttctgtcggcggggcataccctctaaagagagagggggaataagtgatgctgggagcaatggtactgacgctgctgggcgggctgtggctgctgacgctgcatgtttcgacttcaggttcattcccgcggccgctgacggctaagcaggagcgggactgcctggagcggatgagccgaggagaccgggcggcacggaacgagctggtggagcacaatctgcgactggtggcgcacatcgtgaagaagtactacgcggtgagcggggagcaggatgatctgatctcgatagggacgatagggttgataaaggcggtggagacctataacttggagaagaagacaaaattcgcgacttatgcttctaggtgtattgagaatgagattctgatgtattttagggcgcgaaggaagacggcgggggatgtttcattggaggacccgctggataccgaccgggacggcaacagcctgacgctgatggagctggtgagcgatgaggaggatatcattacacggttggatttaacgctgaaagctgaaaaactacgggaggtctttggggtgctggagggacgggagcagcgggtgctgcggctgcgctacgggctggataaccgaccgccgatgacccagcgggaggtggccaggaagctggggatctccaggagctatgtttcccggctggagaagcacgccatagagcggctgcgggaggagatgggcaagtaaggggaaagcagagggacttgccgtttggaaaaaaatacgctatgatggggaaaagtatttttcccggaggtgccagtatgcatattcccgccatagctaccagtgagatggaggtattatcctttgccgaggcgatgcgccaaagcggccgggaggcggactacgataccggccggtggctgtatgtgccggacttttatacggagtaccgatatgtgctgggaaccaagggagagaaaccgcttatctgcattggggtgaacccctccacggcggagccggaccacctggataataccctgaaatcggtggagcggatcgcgctgggaaatgggtacgacagctttattatgtttaatgtgtacccgcagcgggctacccggccgcaggatatggcgcgggagcgggatgagcggctgcaccgggccaacatggaggctttcgagtatattttgggactgagtaaggagccgacggtatgggcggcctgggggaacattatagagatgcgtccctacctgaaaggctgtgtgcaggatatgatagcggccggggagcggcacggcgcccggtgggtcacggcagggaagcgctcggtgaaggggcacccgcaccacccgctgtacctgaagaaggacagcgggctggatccctttgatgtggcggagtactgcgaacggtgcatatgagctgcggcagggaaaaggcaggcgggcgcaccggagcgggaatgggctgcccgaagcgcagcggaggcgcggccctggggagcgcaggggtgcccgccgggggtggagagcgcgcggaagaatgaaaacagcaccgaggagcagttccacggtgctgattttgttattcgtttggttcctgcggcaggggaggagttttggcagcttccagctccttaaacttggcctgcatggtgggattgtttttcgtcaggcgcttgactgaaagctcctgggctttatcattggccaggcggagattattttcggaggagagcagggcgtccttggtcttttgcaggtggtcgatggttttatcgatctcctcgatggcggttttgaacttgcggctggccaaatcgtaattgcggccgaagcgggtcttgaagtcgttcatttcctcctcgaagtgggagatatcgatattctgattacggatctccgccaactgccggcggtattccaccgtatggagtgccgagccccgcagcagggtgatgatgggaatgaagaactgagggcggatgacatacatcttggggtagcggtagctgacatcggtgatgccgccatacagctcgctgtccggctccagcagggagaccaggacggcatattcgcagcccttttcctggcggtccttatccagttcccggaagaaatcctcattcttttttttgctggcggtggtatccatctcgtttttcatctcgaacatgatggagagaaattcgatgccatcggaggtggactcccggaagatgtaatcgcctttgctgccggtgcgggcgtcgttgtccttctcaaagtaagcgttggggaaagcggcggaccgcagacggttgaattcgatctcacagtgctgttccagcgtttctcccaccattttggtggaaaggcgggttttgaggtccttataataggcgatgacctcatccttgctgctgagctcccgcttgtagctttcccgcagctcctgctccttttcccggctggcggccgcggcttccttcagctgatagctcagcttatcgatttcccgctgactttcgatcagttcgtcccttttctcggaggtcactttttgaatggccagctcccgctcggtttgggctgcgttcaggcgggcctgtagttcagtaatggtctgatcccgggcggaaagatcggcggtctgctgctccagggctttctgtacggccagctcccgctgggcctgctgggagagaagctgggccttcagttcttcgatctgccgctgcagctgggcctcggactgctcctgagagcgggcggcctgagtgcgtaccagggccagatctttttctttttcggcggccagctgcttttcccgctgggccagctcccggtgaaattcttcatcccgtacctgacccacgatggctgcatagccggattcatccacggtaaagacttcgccgcatttgggacatttgatctcgtgcatagccgtacctcctggtgaacttactggatgtggcccatggcgtggcgcttgatggcttccatggaggcatcgctgatgacatgctctattttgcaggcgtcctccgcagcggtcttttcgtcaacgccaagtttgaccaaaaagctggtgagcaggcgatgacgctcgtagatcttttccgccacggcctggccggattcggtgagtgtgatgccgccatcttccgccacatggatatagcccccctgccgcaaaatgccgacagcgcggctgacactgggcttggagtagcccatttcctctccgatatcgatggcgcggacaaagcctgtgcgttgagagagaacaaggatggtttccagatacatttcgccggattcctgcagggacataaggggcaccttcttttcttggggatatatttatttaaggatagcataaaacgcggtcggacgcaagggaagcggggggaagaaaaactccctgcccgaaggcagggagaatggagctggaaacgtgacttgaacacgcgacctgctgattacgaatcagctgctctaccggctgagctattccagcatttttgagattactaaagtattctatcataccagctggaaaaaatcaatcaaaattcatgcacagttcatttactttcgcggcagtgggcactataataaaaatataccccattttaacggagaacgaacagaatgaagagagtaacggcgctgctgctggcagcgatgataataacaaccggcctgataacaccggccatggcggcggaggatgatgtgccggaaacctacagcaatgcctatgtggtgatggacgccaagaccgggcaggtgctgctgcaaaaaaacatgtacgagaaggagtatccggccagcattaccaagatactgacaacagcgctggggctgacctacgccaagccggaggaccgcatcaccgtttctcaggaaacggtaagcgatgtatggaaatggggcgagaccacccacctggcgctggagccgggggagatcattaccctgaaggatgcgctgtacggggcgatggtggaatccgccaatgactgcgccaatgccatagcccaggcggtgagcgggagcctgaccgactttgcggagctgatgaaccagcaggtggcggcgctgggactgagcgatacccactttaccaacgcgcacggcctgccggataaggaccactataccactgcctatgatatggcgcgcatcacccggtgggcgatgacggtgccgggctttgaggaatatttctgcgcgacggagtataccatccccaagaccaacaaaaaggatgtggcaagaaacatcggtacccaccaccatatgttggtggaaagcgcttactactatccctacgctaagggcggcaagcttggttggaccaccgaggcgcagcatacggcggtgacctgggcggagaaggatggactttctttgctgtgtgtggtgctggactgcagcgacaagtggggcaagtacaaggacaccatagcgctttttgattattgctttgagcggtacagtatggtttcggtaaagaccgatgagatagcggcgtatgatatcccggtggggagcctgaccaatactgccgggatggtgcatatagcggcgaccggggacctggatgtgctggtgccgaagggaacggcggtagagagcatcgcgctgaaatataatatccccagccggtacaaggtgggggaacgcatagacccgcaggtggagctgtggtgcggtggtgagttggtgggaactttcccaatggagtacactgtggagacctatgcccccgtggaggatgtgccaaaggatgatgtcacgacggccggcagcggctctgtggtgctgacggtgctgaaatggattggcatagtgctgggggcgttgatcgtgatcctatttgtgctgcgggcgtactttatggcgcggcggcgccgccgtgccaagcagcgcaggcgagctcagcgccggcgcatgaactgaatattcggcaaaaaatatagggcgggccgctgggcctgccctatatttatgcaactgcacaaatatggggaaaatgcatcctttgcggcaaattgactggacaactttcccccaaatgagttacaataaaacagtatgcaaagatgaagtaatgggcgggtggatgcccgaaggagaagaagacatggatatttttgcgcttctgcggctggtactgggcctggcctttttcctgttcggtatgaatgtgatgtccagtaatctggaaaagatggcgggcggtaagctggagcagctgctgaaaacaatgacagcgagcccctgggtgagcctgctgctgggcgcggccattaccatagcggtgcagtcatcctcggcggtcacggttatgctggtgggtctggtcaattccgggatcatgaaatttggccagacgctgtatgtcatcttcggcgcgaatatcggcaccacgctgacggcgtggatcctctccctttccggcattcaaagcgggaatgtgtggctgaagatgctgaagcccgaaaatttctcgcccattttagccatcatcggcgtagtgatgatgatggtgtgtaaaaacgataagaaaaagagcattggtacggtgctggtgggctttacagtgctgatgtacggcatggtggtgatgagcgacgcggtaagcccgctggcagagatgccggagttttcggcgatcctagcggggctgcgtaacccgttactgggcctggtggtggccaccttgtttaccgccgtgatccaaagctcggcggcctcggtgggtattctgcaggcgctggcgctgaccggcagcctgacctatgagatggtcattcccatggtgatgggcctgaacattggtacctgcgccacctcgctgatttccagcattgggacaagctacaaggccaagcgggtggcggtcatccacttttccatcaaggtcattggtactgttatctgcctgccgttgtacctgttgatcacctcggtgcttcagcttgattttatccatattgcagtgacaccatggaatattgccatggtgcataccatctataacctggctattaccgccattttgatgccatttaccaagtacctggtgaagctgggcaagtggctggtgaaggccaaagacgaaacggcacctaaggactccatgcagtacgcgcccgacctgctgctgctccgctccccttctgtggcgctgcaggagtgtgaccactataccttccggatggccgggacggcaagagattcgctggaacgggcgatctcgctcatcggcgcctacaatgagcaggacgccgaggtggtactgaagcaggaggacacgctggatctgtatgaggaccggctggatacctacctggtgtacctttcggcgcaggcgctttcccagcaggatagccgccgcgtggggaaaatgcagcacgccatcggggactttgagcggctgggcgaccacgccgtgaacctggtaaaggccggcaaggagctggagatcaaatcgctgtttttctcggaggaggcccggcgggagttgggggtgctttccgctgcggtgcgggagattttgcagttgacaaccgattgctatatcaataccgaccatgagatggcccaccatgtggagccgttggagcaggtcattgacgcactgaccaaggagatcaagcagaatcatctggcacgcctacaggcgggccgctgttccatcgagctgggatttatcctaaccgacctgctgactgactatgaacggatttccgaccactgctccaacattgcggtggcggtcatcgagctgcagcacgacgcgctggactcccaccgctacctgaacgaaatgaagcgtgacagcgatgcgttccgggagatgtatgtgaaattcagggagaaatatacactgccggaatcggcctatattgccagacaggcggcggaataccgctgagcatagaggaggatcgcagggtcctcctttttttacccaaataggccggtgtgtcccaaattaagataatgttaatattcccggatggaaataaggcggccgcgatgctataatacctcttacagcttttttcgccatactgtaaatgaggaaaaggagaaacctatgacgatcttgacgcccattttgatctgtctggccgtagcggctatcctgggagcgctgtggctgtttgcgccggaggccgccctgcaggcgaccatctcggtgggggtgatcgcggctttgggcatcagcggcgggatcattggggagctgctgccccgccggtggtttcactgggatcgcttcccctacaagacctgcgcatgggagaaaaacggcaagatctatgaaaaaatggagatccgcaagtggaaggacagggtgccggataaaagccgctggggtgggcatgaatatgccaagaccattcgtgggcagaacgacgccgaaaacgctacccgactgctgcaggaaacctgtgtggcggagctcatccactgggtactgatgctggcgacgccgctggtatttgtctttgctcatggaccgatggcggtattggtagtgctgctgtatgggttctctcacattccgtgtattatcatccaacggtataaccggccgcggctgtgcgccctgctgcggcgctgccaaagaaagggggccgaaacgacatgaaagttctcatcctgacctgcaataccggtggcggacacaatgccgcggcggcagccctgcgccgggagctggaatcccgcgggcacacctgcgcggtggcggatgctctttcctttgggcccaagcatttttcggaggcaatcagccacctgcacaccatcgcctaccggtatttccccaaaatatacggggcgggctaccgcaaaaaagaggagcgagtgctgggggaggatgagacctcctttgaatacaagatgaatgccatttgtgtgccgcagctgtaccgctacctgctttcgggtggattcgatgccatagtgacgccgcatgtgttcccggcggagatgctgaccagactgcgccggaaatatgaatataaaaagccgttttactttatcgctaccgattacacctgcagtccttgtgtggatgagatcacgcctgattactgggtcattccggatgagaggctgatcccggaatttactgcccggggcatcccggaggatcgcttgctgccgctgggcatccccaccaacccggcaatggccgcccatgtggaccggaatgtggcccggcggttgctgcacctgccccagcagggggagatggtgctggtgatgagcggctccattggctgcgggccgatgacgaccctggccctgaaactgctgcgccgactgcccaaggatagctttgtggtggtcatctgcgggaagaacaagggcgacctgaaggagctgcagcggtatgccaaattcctggagcggctgtacccggtgggctttaccgaccggatggatctttactattcggcggccgacctggtagtgggcaagcccggcgggctttcctgtaccgagatcgcccaaaagagggtgccggcagtgctgatgctgagcgtccccggctgcgagagccgcaatctggagttctttacccgctatgggatggcactggggaccgaaagcgtgcgggataccctttctgccgtgcggcggctgctgggcagcgcagccatgcgcaaccgcatgatgctggcgcagcggagtattccgcagggcgcggtggcggcaatcacggatctgatagaaaagggaatggtacctttgcccgcaaaagaagaataatgctgcataaagaaaagggagccttttggctcccttttttgcgtggggttggcttaattgcagccacagccgcagccgccgcagccgttcgtgctggtatcgccgcagccgcaggtgcggtaggcggagatgttggtggcattgcctccggtgagccacagccacaccagaatgagaatgatgatccaccaccagttattgccgcagccgcagctgccgccgcatccacaagaattgcagcccatagtgtaccctcctattattcaaaaaaggttagttgcagccgcagccgcagtcaccgcagccactgcgtccgccgccgcatgtattacagccacagccgccgccatagccgctcagtccgccgctgctcagcagccagatagcaagaagaatgatgaccagggtggcgtcattcaggcagatgccgaagagcccgcggttgctatcggcagggcagcaggtattgcagcagttaccaaacatagcagagatgcctcctttacattgggatcaccccatcttatgtcgcggggagattttggtgcggcgtttaagcgactggatgcagccaatattaagggcagaacaaaaaaggaagggagaccctatgaatcaatacaatggctttacaccgcgggcggccgcggcattggagggcgcccagcgggcggcgcagcaggcagggcatacctatatcggcagtgagcacttgctgctggcgttgctgcgagagggggccggagcggcttatacgctgctttttcagcggcgtgtaacagcgggaaagaccgagcgtgccctgctgcaaatggtgggtaggggacatcccaccctgctggagtcggaggaaacgacggtgcattaccgcgccgcagtggaagaagcgctgcgggaggcccagatgggcggatttttgcaggcggggaccgagcacctgctgctggcgctgtgcggacaacaggattccggggcggtaagactgatgaataagctcgcagtggatatccccaacctgaccattgccctgcgggagacgatacggctggagcagtgtgagcagaataacgaccggcagatccccaaagtggtgggaaaggcccagcggcagacccgcagtgtgatgctggaccgctttggccgggagctgactgagctggcccggcagggacggctggatccggtcattgggcgggaacaggagacagagcggctattgcagatcctttcgcggcgttccaaaaataatccctgtctgatcggtgaggcgggagtgggcaagaccgccgtggtggaggggctggcgcagcgcattgcggagggccgggtgccgctggctctggcggataagcggatcattactctggacttgccagcaatggtggccggtactaagtatcgcggtgactttgaggagcggatccggtccattatggaggaagtggcggcggctggggatgtgattctttttattgatgagattcataccattatgggcattggcgcggcggaaggcgcggtagatgcggctaatatcatgaagccgaaacttgcccgcggggaattgcaggttattggtgccaccaccatagcggagtaccgcaagaccatcgaaaaggacggcgcgctggcccggcggttccaaagtgtgctggtggaagaacctaccgaggaacagacaatggcgatcctgcgggggctgtgcccacgctatgaacagcaccacgggatgatcattaccgaggatgcactggaggcagcaatccggctttcggtgcggtatttcccggcacgctttttgccggataaggcgctggacctgctggatgaggcggcggccaggctgcggatccaccgggcaggcatgctggagagcggaatgagagcatcccggcggctgatgctgacccagcgggaggtacaacaggcggcgggggcgatgaccgggcttgcggtgggacagggactttcggccgagcggctggaaaatggcctgcggcaaagtgtggtggggcagcaggaggcggtggagacggtaattcatgccatcctgcgcagcaatgctgggctgcgggatccccggcgccccatcgggagttttttgttcctggggcccagtggagtgggcaagacccagttgtgctacgcattgggcaaaacgctgtttggcagtgaggagaatatcatcaagctggatatgagcgaataccgggagccgcacagtatttcccggcttattggggcgccccccggttatgtggggtgtgaggaagggggcatcctgactgaggcggtgaaaaaacacccaatgagcgtggtggtctttgatgagatagaaaaggcacacccggatctttacaatttgctgctgcagattttggaggacgggcggctgaccgacagccagggcagattggcggtcttcagcaatacggtggttatcctgaccagtaacctgggagcggaggcgatgctgcatccgcagaggatgggctttggcgatgccggggcggacgcgaagacgatggtgctctccaaactgcgggaacagctgcggccggagctgttgggtagactggatgagacgattctgttccagccgctgagaaaggaagagctgcggcagatcgcggtgcagctgctgcagggggtgcaaagccgcctgcgggagcaggagatcgggatggaatttgaggacacggtggtggaacagattgttgcgggggcggaggagggtccctatggggcgcgcccgctgcggcggctggtacgcaccatggtggaggatccgctgacggaacggctgctggccggggagctgcgtgccggggacatcctgtgctgcggctgggagcagagcaccctgcagatgcacgagcggataccggcggcgcagtgagtgaagtttctgtatggagcgggccgacctgcggcttttgcggattgtaaaaagatgtcgctttacagatgcggcgtctttttttataatagaggtggaatgacaaatgctattttggacaggcatgaaaatgcatgagaaaagacgatatgaggctacggatatgcgaaggattacagaggcgctaaaccaaatcgttcacagtatagaatgtaaaaatgttttggaaattgcttgcggcagtggagaattttccctcgaagcggccagtattgctcattctgtaacatgcattgatttagacgatagtcgcttgctgccatcggtaagggatgcagaaaacatagtttttctactgatggatgccattaacttacagatggcaagtgatagcgtcgatgttattgtgttctataatgcacttgcgcatgttgaaaacgagttagaaaagattttgaatgaatgttatagagttttacggaaaagaggggagctatattttatcagctcttttggaattgataaaatcgctgtagaagccacactgttgccaatgttaaagaaacaaaaaatttatttcagcttgagtcaaacaaaaaattttataattgtacaaataggtgcttaattcagtttgagtaattcacacaggatataacgctaaatataattgtccattcaatatgtttggcgagaaaatacaacataaaaggagtacctactatggaaaacaaaatctttaccttacataaaaccgttaccgaggcagataccgctgcccatgtggggagcggcagcctacctgtattggcaaccccggttcttattgcgtggatggaagcggcagcctgtggctgctgtgccggactgatggaggaaggcaccaccagtgtgggaacggagatgaatatgcgacataccgcggccagcccggtggggatgaaagtgactgttacggcggaactgaccgcagtggatggcagaattttttctttcaaggtttatgccgaagataccgccggtgccatcggcgagggcagccatacccgtgccattatacgggcggagcgttttatggaaaaggccaatgccaagctggcccagtgagggaattcccatgatgagtgcggccgctacaaaaacgaagccccgtgtgatgagtcggggcggtatcattgcctgcatggtgctgacactgttgacaccggtgggtttgctgctgatccatctggcgcgcggcaatgccgaagaagtggagcatctgtacagtcgtggattttatcatggtatggcaacggctctgacagcgctgactgggagggtgcccttttcggtaatggaggtcatcctgcttttgctgggggtcgctgcgctggtgtttcttgttctttggatacgggaagccatccggcagaaaggacgctggtggctggtatgcttaaagcggctgtggatcatagtttcggcggcttcggcggtattcttttggtttattcttaccggggatcttaattactaccgtattccggtggggcagagtctggggttgcaaaccgaggcaacggatgtgaaaacgctttggtcactctgtcatctgctggcggggcaggcggcggagctgcggccacagtgtgaggaagatagcgagggggtatttgcttcttccgtgacctatgcggaattggcggagaccgctactggtgcggtgacggcactggatgagatctatggggtacagctctttgacctggcgggacagacccgccccaaagccatgtatttttcagaggtcatgagctatattcagctgactggtgtgattttcccttatatttcggagccgaacatcaatgtgcaccaaccggcctatgggatctcctccaccatgtgccatgagctttcccacatctgcggctttatgcgggaggatgaggcaaattttatcgcttatctggcctgctataatagcgataatacagagctgcggtacagcggtgcgatgatgggacttatccatgctacaaaccgcctgtaccgctatgacccaaacgcctggcaggagatttatacgctgctgccggaaggagtgctgcgggatctggcggccaacagccgttactggaaaaagtatgaaacgccggtaggcgaaacggctgaccgctggaacgatgcctacctaaaggccaatgaccagaccgatggggtgcagagctacggccgtatggtcgatctgctcatcgctttttacagggcgcagggattgatttgagcagtatatttgccggttcctgcaaaccgagagaggccgaccctgtgggttggccttttttgcaagttaaggccatgttaaatttcatttttggcttgacaaatgccgtgggcaggcctatacttgcagatatattttttacgcaaaggagtgcggaacgatgagtaaagtgttcattccggcaggttaccacagctgcctttccctgtacgatacccaaaaggccatcagcctgatcaagcgggtgtttgaggatactctctgcggaaatctgaatctcagccgggtatcggccccgctgtttgtggaggcttccaccggcttgaatgatgacctaaatggagtggagcgccccgtttcctttgatgtgccggatatcggccgggatgcacaggtggtgcactccctagccaagtggaagcgcctggcgctgcaccgctacggcttccgtcccggcaagggcctttataccgatatgaatgccatccggcgggatgaaacgctggataacattcactccatctatgtggaccagtgggattgggaaaaggttatcacgccagaggagcgtaatgtggcctatctgaaggctacggtacagagtattgtggatgcgatcgtttccactcagcgcaccctgcgggccatatatccgcagctgaatacggttccggacctggtgccggaggtcaccttcatcaccacacaggagctggaagaccgttacccggagctgacccctaaggagcgggaaaatgccattacgagggaatgcggcactgtattcctaatgcagattggcggtaagctgcgcagcggccagccccatgatggccgtgccccagactacgatgactggaccctaaatggtgacctgctggtttataaccgagtgctgggaacagcattcgagctgtcctccatgggcatccgtgtagatcctgcggcactggaccgccagctgaccctttccggctgtgaaaaccgccgtacattgcccttccaccggatgctgctggccggaaagctgccgctgaccattggtggcggtattggccaatcaagactgtgcatgttcctgatggggaccgcccatatcggtgaggtgcagtcttcggtgtgggatgacgataccatgcagaaatgcgaagccgcgggtattatcctgctgtaagttctttaataaaaagaccgtccggttttgtgccgggcggtttttggcattccactttgtgcagatacaaaaagagggcacctgtgggtgctctctttttgtgagaaaatatatttaggggaaaacattgaggggacgaagatattatttagcgagggtggtaatgaggttatacagggcacgaatggccaggcccagggtagctacagcagcaatgccgcccagtacattacgaatgatagagttggtgtagttgcccagcagttttttgctattggcaatgaccagcagcagaatagcgataaaggggagaatgaaaccgctgatggcctgggccgctacgatgatggcagcgggagaggtatttaccatggccagcacggtgccaaatacgataacgatgatcgccagcagcttggccttggtgcaggaggaaccgccctcccagtggaacagggcgctgaagatggtcttgaaggtgaagccgactgcgatagcagaggacagaccggcggccagcaggccgatatcgcctaccacacgggcccaggaacccagtaccggctccagagatttagtgaaggtcagggcgccattgacggaagtgccggtcccatacagcacagtgccactagtgataaggatagaagcagtgatgataataccgataatgatgttgaaacgaatgtcaaaacgggcatcgggcagctcctcaatggaagtgtacttgccctgagaggtgatggagtgcaggatgaggttcatgccaataagggtggtaccgatgagcgccatggtattcatcaggccgccttcgggaacgacaggaaccaaaccggttacgacttggcccaggttgggggcaacagcaatagcggtaacaaggaacagaacacccatgacgctgacgaatacctgcatgatggtctccaagaccttattggaggctaaggcggcgataagggcgataacgccgatgatgagagcggagacccactggggcataccagtgatatcctgcagaccggcggaggcgccgatctcattgccagactggaacgcgaagcaggagataccgacggctaagccgacaaatatctggacaaacaggcgccagccgcggctttcgggcttcagggcgatggctgcatcgatgacattcttgtgagaagcgatggcgatgcgggaggacatttccatgaggacgatgagggcgatgccggagaagacaacggcccacagcagagcatactggaacttaacgcccaccagggtagcggtggtaatggtgccagggccaatgaatgcgctggtaataatagcggcaggtcccatatttttcagcttttgcataaaagtctttttttccattagagtttacctcctaagtgaacttcagatcacattttggttaagtgcttgttggcacaggacctgcgcccctcacgcacggtctatgccagcttgcactttagcagatttgaacggtagaacttatttggtttggttgaggctcaactttcaaggcgattataccaacttgataaggcattaacaatggttctgtgcacgaaatatcgcctatagtggtgggcaatctgcacaatcaattgaaatttgttaaagaagaatcaaagaaatgcggaagaattttgttgatgctgcatattgtttcctccatcgccacaaataatttggtgaatttattgccgactaatagaaaatggagactttgtagtgctgtgctaagataaataatgaaatggcctgttgtgcaccatgcatattccaaatcgttttttttagataccggaaacgatgacgaaaagccaggaaagtggcacaatgaaaaagcaaaccagcccaagtataagtgggctgcccctccccggcacccctccgccgcggtaatgcgactaaatacgaaagaaattggtgaatgatatggaaagaatagaacaagccaataaggaagcgctgcggcgcatcctcagtggagaaccggaactcattgatgtgtgcccggccggggaagtgatcccggagttagataaccattccatcggccatgcgggcccgcccattgcctggaaagagatgtgcggcccgatgcagggtgctattatgggagctgcagtatatgaagggatggcttccaccttggaggaggcggcagaaatggccgcttccggtaagattcattttatctccaatcacagtatgcactgtgttggccccatgactggtatgattaccagctccatgccactgtgggtggttcgtaataagacctttggcaattatgcttatagcacttttaatgagggcatcggcaaggtcatgcgctttggcgctaactccacggaggttattgaccgcctgcgctggatccagaatgatttgggccctgctatgaagagagcgctccaggaatccggcccgatttccctcaagcttatcatttctcgtgcgttggcgatgggtgatgagatgcatcagcgtaatgtggcggcatcctcgttgcttacccgtgaactggccccttaccttgccaatgtggtggaggacccggccaagcgctttaagatcctcagcttcctttccaccaacgatcagttcttcctgaacctcgccatggcggcgggcaaggcaaccatggatcccgtacgtgacattcctcattgcagcgtagtgacagcgatgagccgcaacggaactaactttggaattcaggtcagcgcgctgggcgacagctggttccaggcgcccgcctgtatgccggtcggcctctatttccccggttattccgaagcggatgccaaccccgatatgggcgacagtgccatctgtgagacctttggaatcggtggctttgccatggcatcctctcccgcggtggtgcgctttgtcggtgccggaaatatcagcagcgccatgaagtattcccgcgatatgatggagatcaccgttggggaaaacgatgcctatgtgatgccgaccatggactttaccggtaccggcacaggcattgatatccgcaaggttattgaaacgggtattctgcctgtcatcaatactggtatggcgcacaaaaagcctggtgtagggcaggtgggtgcgggtgtcgttaagcctcctatggagtgctttgaacaggccctgtatgcactggccgagtacgaagggataaccgaagaataatcgcaacagataattaataaaggagataaccatgagcgatctgaaggaaatgatccggcaggccaatgaaaccgccgtgaataaactgaaaaacgcccagccctactgggtggatatcaaacctgcccatgaggtgctgggaattgacaagtacaccctgctgcatgcaggcccacccattgcgtgggaggagatgtgcggccccatgcgcggagccattgttgccgtactgaaatatgaaggcctggcggaaaatgatgaagaagcccttgcgctggcaggcagcggtaagataaaatatgaaccgtgccatcaccacaatgccgtaggtcccatgacgggtgtgacctcctattccatgccgatgatctgcgtgttgaataaggagaacggcaattatgcctattccaccatcaatgagggcaccggcaagggcatccgctttggcagctgcggccaggataccgtagaccagctggtgtggctggaaaaggtgctgggcccggcgctgaaggatgttgtccacaccatgggcgggattaacctaaagatgatcatttctcaggcgctggccatgggggatgagctgcatatgcgcaataatgccgctaccaatctgtttgtaaagaccatagcggaaacgctgtgcgaggtggtagaaagccgtgcggcgcttacccagattatgcacttcctgacctggaacaatgaccagtttttcctcaactttgccatggcggccaataaggcctgcgccgatgcggcacatggcatcgagcattccaccatggtgaccgcgatggcccgcaacggcgtcaatatcggcatccgggtgagcggcctgggcgaccgctggtttaccgctcccgcagcggatgtggcaggtgcttatttcccgggctattccgcggaggacgccaataaggacatcggtgacagcgccattatggaaaccggcggcattggcggcatggccatcgctactgcccctgccattgttcgcttcctgggtgctggcaagtaccaggacgctgtgaactacaccaacaacatgtacgaaatcaccctttcggagcaggatcagtatgccatgccggatatggatttccgtggttcgcccatcggtatcgatattctcaaagtagtggaaaccggtatttcccccatcatcaataccgctattgcctgtaaacgccccggtgttggtatgatcggtgccggtatttctaaggcaccgctggaaatgttcgaagaggcgatggtcgcctttggtgaagcgcacggcctgcaataataacaaagtgtttgattagccggcaggcgtcgggcccctatggggaaccgacacctgctgtgctatgctttaataaagagaaagaacggagtatactatggaactcagtccaatcctattatgcctgctggcagcagtgccggtactgttgctcattattctgctggtgggctgcaagtggagcgtgggccgcgcggcggtcgtttcggtcgccgtagatgctgtaattgctctatctgcatttggggcgcatccgctgcaaattctggtcagcgccgccaagggcgcatggagttcactcagcattattctcatcatctgtccggcaatccttatgtacaatattgtccgggaggctggcgcatttcgtgtcattcgtgcgggcattcagcaggcaacacccaataagcttctgcaaattctcatcatcggctatgctttcgcggcatttttgcagggtattaccggatttggcgtaccggtggcgatctgcgcgccgctcctcatcgaaataggtgtttctccgctctgggcgcttgccattgcccctttgggcgaggcgtggggcaacaccttcggtacgctcagcgctgcatgggatgcgctggcggcgcaggcgggcttgaacgaagccatgcccctttactggcaaagtgctttgtggaccgctgcgctgctcttcgcaatgaatcttgtttccggattactggtctgctggttttacggcaggggcgcagcacttcgccgcggattgcccgctgtactggtgctcagtctggtgcagggcggcggggaactgctgatgagtcaggtcaataccacactctgctgctttattccctgctgtctggcgctggtggcttcgctgctgctggggcggctgccgctttacaataccccttgggaactggaaaacagccgagccatggagccgtcgcgcggaacgcttttgtcggaacaggcgccgcagggcatggggatcctgcacgccttttccccttaccttgtcatgacggccttttcactggtctgcctgctcattccttcggtcaagcgggcgttggcgggtgtttccgtttcgctccatattcctgccgttgtcagcggcggtacagccattaccgaggaggtcagcggcttttcaccgctcagcctcaccaatgccggggtgttcctgtttttggcggcaggcttcgggttcttctattttcggcgtcggggctggcttacagcgggcagcgggcagcagatcctgcgggacagcctgaaaaaagcatggccatcctctgtttcggttatggtgtttctggtgcttgccaatattatgagcggcaccggccaaaccgctgccttggcgggtggattttccgcggtatttgggccgtactatgcggcgctggcagcgctggtgggaatgctcggctcctttatcaccggctccaatatgtccagcaatatcctgtttggcagcttccagatgacgacggcagaactggtgggcttgcagcctgcccctatcctggcggcacagaccgtgggcggcagcgccggcagcctcatcagccccagcaaaatcgttctaggagctacaacagccggccatccggaaatggttggtgctatcatcagaaagctgctgccggtggcactgctgttctccctcaccgccggcgcggtagtattgcttagcggactgatgctgggctaaaaaaatattggtatacaaaaaagactgtgggtatgatatacttaacttatatcatgtccacggtctttttataggagggggatatcatgtataccatcggttcattcctgcgggaagaggagctgaccggattaaagcttatgacggataccgccgatttgcaggcggaaatcaccaatatcaatattatcgataatcccgattcctacgattggctttcctccggggattttttgctgaccaccggctattttcttcgggatgatgaggctatgcagtgtcagcttgtacgggagctttcggaactgggttgtgtggggctggccattaaaacccgccgctatttggatgtgattccggaggcgatgctggaggaagcgaaccggctgggcttcccgctcatcaatatcccggtccagtatcctctcagcaagatctgcaaggtggtgtttggccggctttccggcggcggggtggaaaaggccgaccgctttgtttcgctttaccattccatcaccgagagcatgctggaggcagatggcgtttcccggatgctgggcgtccttagcgactttatcggtaatgcggtgctgctgctgggggccaagtgggagctgatggcctatgccgaaaatgctggaaacccaatgccgctttcgcggtatctcccactgcaaaagggggaggttattttcccagagagtattaccggcaatatgccttcggatttttccaaatatgccaaggccatcaaacgggtcttttccgctggggaggagcgtgcggtctgccgcatactgccggtttccggcggtaatgccctgtttggctacttggtggtgtgggagaccggccgcaaaatgcaatcggtggaatatctggccttggagatcgcggcctcttccttggcgctggagcgcttccgcacccgccagatcgaggagatccggatgcatatccggcaggacttctttgacgatttgctcagcggcaagctccattctgccgaggaggtgggcagcattgccgggatgcacaatatggacgccgaggggacctatctctgcatggtcactaagctggacagcgccgcccgcgggaccgaaaactatgtggagatgcaggatgccttcctgcgcatcaaggaccgtatgatcgcccagatcggggaactttcccgcgaggagggccgcagctgcatctctattcatcgtggcagccttattatcacctttctgcgcattgtccataccgaaccggaccagcgcattagtgaggaaaatcggcggtttatccagcggctttaccaccgtctgcatgccatcacacagcagtatgtcctcaatatcggtgtgggggagccgaccgcccgtcttatcaatgtgcgccgcagctttacccaggcgcaggaggctatccgggtctccggcaatttgcgcagcgtggcaggggtgcatttttacgaggacctcatcatctatcagctgcttagcagcggagtggaaaatgaaaaatccgccgagctttatacgctgtctatccgcagtctggtagagtatgacaaacagaacgcgaccaacatggtggaaacgctggactgttactttgcctgcaactgtaatgttagcgaaacagccaaagccctcttcatccatcgcaacaccctcatttaccgcattgataagatcaaatctattctggggagggatctcaaagattccgaagagcgtctgctgctgcagctgggcctgcgggtctatcaggtgcggcagattcgtgaagcggccgccaattcttgagcttgaccgcgggaatgtttttctctctactgccatacaaaagagcaggagggggagtttgcatgaaaagatggatgaccctgctgctggggtgcctgctgctgtgcaccgcctgtggaaaaaaggaactgttagaatccattgcactgcgggaagataccaccccggagcagatgatagaagagctttcccagcggtatgatttgccggaaagtatgctgctggaatctgccgcggacctggcagcactgctgcaaataaaggaaaagtacctgctgttgggttgtgggcgtattgcagccccggaggacaacccacagcaaatactattggcgcaggcggccccgggcaaaacggaaaaggtgactgccaccctgcaaaagcgtctggagacagtacagcgggcatttcccgggtatccttcggcgcaggccgggcgggtcattacagcaggggattatgctcttttggtcatcgtcaccgccgatgatatggatactgtgcagcaggagattatggattattttatcggagggaaatagcaagaaaaaatggttgcacacgaacttaaattcgtgtataatatcctagtaggccatgacaggtcgtgcaaaggcagcctttgtcatgcggaaatctggtcctgtgcgacgcagtgctgtgaaccatgtcaggcggggaaccgagcagcattaagcagtatttgcgggtgccgcagccaaccgggtttccgtgtgataaaggttgccttttcattttgcgggaaaggggagaaaacggaatgtaccaggcactgtaccgaaagtggcgtccccgcacctttgaggaagtggtggggcaggagcatatcaccaccacgctgaagaacgagatgatccaggggaagcctgcccatgcttatctgctgatgggcagccgtggcaccggcaaaaccacctgcgccaagctcatcgccaaggcggtgaactgccgcaacccggtggatggcagcccctgcggccaatgtgactgttgccgcggcgtggataacggcagcctggtggatgtagtggagattgatgccgccagcaataacggtgtggataatatccgtgacctgcgggaggaagccgtttttctgcccaatatcgcaaaatatcgagtctatatcatcgatgaggcgcatatgctttccgtcggggcggtcaatgccctgctcaagatcatggaagagccgccggagcatgtgattttcattttggccaccactgaggtgcacaagatcccggctaccattcagtcccgctgccagcggtttgattttaagcgtattgcgccggaggtcatccgggataggctgcttttcattgccgggcaggaggacatgaccttgacggaagaagccgcggctctcattgcccgcattgccgatggcggtatgcgtgatgccctttctctccttgatctttgctgggcacacgcccatgatatcaccgtggagaccgtcagcgaggcggccgggcttgtggggcaggattatctttttgagatcgccgatgccgccgcgacaggggattttaccggcgcaatggatgccatggagcgcctggccggacaggctgtggaatatgaccgcctgtgcagtcaattaatcagccattaccgcaacctgttggtggcagctaccgctcgcgatcccgaacaacttattgtctgcctgccacagacgctggaacagtataaaaagcaggcggcttcctttaccccggccgcgctgatggatgccatcagaacgctgcaggatacccaggccgctatggctcgcagcaccagccgccgggcggagatggaactggctctcttaaagctcagcgaccggcgggtaagccccagccgggaagcgctggtcgcccgcatcgaggagctggaagccaaactcaaccgtttgttggcggaggggatccgccccgctccggctccggcgcagcagtcggctgtcggaggaatgttccagccacaacaagaggaaccggccgaaccggagcaggtagcgctgccaggcatggagctgcccccgcagcaggaggaagcagccccaccggctgcaaagcctgccgctaccccggtggagccaatgccggaggatcagtggctgcaggtgttggatcgccttggcgtcatcaataagatgctggcaggtgccctgcaaagcagccatgcccatttccgcgggcagactgtccttatcgagtgtgataagcccatcttcctggagatgatgcgcagcaatgacttcactcgtcagagcctaaagcgagctatcgccgaagtgaccggtgtaaaatacggtgtggggccttacaccgctgcgcccaaggcaaccaccccgcagagctctccgttggaggatctcatcaagcaggcagagggaatgggcatcccggttaccagagaataataaccaaaaaggagaaccaatatgaaagcaagaatcccccagggcgccggcggcgccggtaatatgaaccagatgatgcagcggatgcagaagatgcaggaggaaatgacccgtgcccaggcggaactggaagaaaaggtctaccatgtttctgctggcggcggcaatattgaagttgaaatcaatggcaaaaaggaagtgacatctgttacccttaagccggaagtagttgatcctgatgatgtcgaatttttgcaggatctgatccgggagggcgtcaatgaggccatccgtgcctgcaccgccgatgcagagcagaccattggggccattaccggcggattggatctgggcttgtaaaagttgccgccccaaggaaaggagagaatcgcatggattccactgcagcgccgctgcaaaagctgattgagcagtttgcccgcttgccgggcgtcggccgtaagatggcccagcggttcgccttttatgtgctggatctgccggaggacaaggccaaggaattttcctccgccattctggaggccaaaagcaagatcaaaaagtgctctgtctgcggaaattttaccgaaggcgagctttgccccatctgctcggctaaagggcgggatacctccctcatctgtgtggtggaagacccccgcgatgtactggcctttgagcgcacccgggaatacaatggagtctatcatgtgctgcatgggctcatttcccccatggatggcatcggtccggaccagctcaccattaaggagctgctggcccgcatagccaaaggcgatgtcagcgaggtcattatggccaccaaccccaccgtggagggggaagcgaccgcaatgtatattgccaagctgctcaagccccttggcgtcaaagtcagtcggttagcctatggcattcccgtgggcggcaacctggaatacgccgatgaggtgaccctatggcgtgccatggagggtcgcagcgagctttgatcttccccttgacaaatcgaaattttgtgatatgatgtgattccaccgaaggaaaggagtgactgcgcatggcagaaaagcagggaatcaagcagatcgccgccaaccgtcaggcgcggcacgaatactttgtggaagaatccatggaagccggtattgagctgttcggtaccgaggtaaaaagcctgcggaacggcggcttgaatctcaaggacagctggtgcagcttcgaaaaaggggagctctttgtgcgtcagatgcacatcagcccctatgagaagggcaatatttttaaccgtgacccgctgcggcccaaaaagctgctgctgcaccgcaaggagctgaaccgtttgtatggtttggtaaaacagcagcaggggcttacccttatcccactccaggcatattttaagggcagccgggtcaagatagaactgggtgtgtgccgcggcaaaaagctgtatgataagcgtgccgatgccgccaagcgtgatgcccagcgggatatcgaacgcgccatgcgcggccgcggctaaaccaaaaagtgaatacgggggcgtaccggtttcgacggggatcgagaaacagggtaagcgagtagaggcgctcgacctctataaaacgggtaacttaaatataaacgctaacactgattacgcgtacgctgcttaattaagcagccgtccgactgcggaggaccacggccgcaggagggcgtcgatgagtggtgaacgatcacgggaagggctccgggcctgtgattgtatcaggagctactaaagccttcagcctgctgtccggcgggaggcggagggaatgttaaaagagcagctacactcgtagaaagccgtgcggactggttttcggacaggagttcgactctcctcgcctccaccaaaagtccaccgtaattttgatagaattacggcggactttttatattgatatgttatattgagtttgataaagtcagggtttatggaggtgataagaatgaaatatgcgcttgcagccgttggatttatcaatgaagatatcgagtataacaaagcagttcttgctgatacacttagaaaatgtgcgggaagggcggatgttgttatcttcggagaagcattccttcagggcttttatggcataaattttatagcaaaacatgatacaacagtatctatt

SEQ ID NO: 1710 - DNA, 32759 bp, Unknown
  16S sequences of unknown bacteria
cacgcaagaacgatatgaaattgtgaaatccgaacccgcgcaaagccctgtgcggcggacattttcagcggacgaaacggccggagcttccaaaaatttcgagtcgaggccgttatgaccacttcgatacttctccgtatatgtcaaccccggtttcccggaggtggacgcttatttagttttgtcagacaatcacttgggcacatatagataccgccgttaattatagaatagctaactctgtttgtcaaccgttctggcaaaaaatcttccggctcctgcgctgcctccgcaggagccggcttttatcttatgccagggcagataccacggcgtcgcccatttctactgttcccaagcgcttgcagccgtctgtaaagatatctgcggttctgcagccatcgttcagaacgctttccacagcctgctcaatggcgtccgccgctaccggttcgttcagcgaataccgcagcatcatggccgcggacaaaatggtggccagcggattcgccaaattctttcccgcaatatccggagcggagccatgaatcggctcatacaaaccgcgggtcccctcccccatggaggcggaggcaagcataccgatggaaccggcgatctgcgacgcttcatccgaaagaatatctccaaaaatgttggaggtaagaatgacgtcaaactgcttggggttgcgaaccagctgcatggcggcgttgtccacatacatatggttcagttccacatccggatagtccttcgcgattcgaatgaccgtttcccgccacagacgcgaggattccaagacgttggctttatcgatactatgtacctttttattccgtttacgggctgaatcaaatgccacgcgggcaatccgttcgatttccggcacggtatacatttcggtgtcatacgccgcttgcacgccattcaccgttttccggccacgctcgccaaaatagatgccgccggtcagttctctaaccaccatgacatccatgctgtccccgataatatcttcccgcaaagggcatgcgcttttcaaagggccgtagatttttgcggggcggagattcgcaaacagccccagagccgcacgaattcccagcaagcccgcctccggacgctgtccaccgggcagggtgtcccatttgtagccgccgacagcgcccagaagaaccgcgtcggacgccaagcaggcctctaccgtttcaccgggcaaagggttgccggttgcgtcgattgcgcagccgcctagcagcgcgtcggtataggcacagcgaaaaccgaaccgctgtcccgccgcgtccagcatctttaccgcctcggccacgatttccgggccgatgccgtcgccgcgcagcaatgtgatcgcatacgtattcattgtattgacacatcctctttttgaagaatcaagcgtgcaccacgttaggaataacatttaatagaaccagcaaaatcaccaaagcccccaaggcaatccgataccagccaaacggcttaaaatcatgcttcttgatgaaattcatcagaaaacggatgaccaccagcgagacaaggaaagataccacggtcgcgatgatcagggcagcccactcttggccgctgaacgacaccttgtcaatgacaagagctttgagaaatttgacgccactggctcccagcatgaccggaatggccataaaaaacgagaactccgccgccactgtcctggaggtacccagcagcgtagcgcccaggatggtcgaacccgaacgtgaggtgcctggaatcagggccagcatttgaaaaacaccgatgccaaacgccgatttataagacatctcctgaaagctgccgattttgggctgctttttccgggattccatccagataaaggccaccccatataaaatgagggcggcggcgatgaccaagggatacgatagcttggaatcgattaaatcgttgagcgccataccgacaacacccgccggaatactggctatcagcacctttccccacagacgaaaggtgtcccctttttccttctggctctttttgggagaaaacggattcagcttatgaaaatacaacaccacgaccgccatgatggagccaagctgaattaccactttaaacacattgaaaaaatcgggactgacattcatgggccaaatcgcatccagcagcagaatatggccggtgctgctgatgggcagccattcggtaatgccctgtacgatgccctgtacgatcgccttgagtatctcgataaaatccataatgagggccatacctttccccgtgaagcacggcggtattacaggtcaatttcgttaagcaaatcccgcagaaggatcacttcgtccgcagaaatcgtcacccctttgcccattttggcatgttcaggcgcccattcgcggatatcgtatttcggtgcacggtcattccaggatatcaaattcagctcctttgtccatccggagggagactgggacaagacgccgaactcttttacaatttcatacttcaattctgccatgggttgcactccttgttttgtttttatatttatatatggccaagacccctccagctatgcatgccggagaaaaatcagcctgtatatccggcgtcaaacagattgccgccacagcaatcgatggctactataaggggaaactcacgaatttccagccgtttcaccgcctcgcagcccaaatcctcaaaggcgattatctcgcaggccgtcacacttttggcggccaaagcgcccgccccgcccacggcacacagatacaccgcctgattacgggcgatcgcctccacaaccgcgggagcgcgccccccttttccgatggtggcggtcacgccgcaatcgtataaacgaggcgcatagggatccatccgccccgatgtggtgggtccgcaggcgccgatgggcagcccctcaggcgccggtgtggctcccgagtaataaatcacgctgtctttaagcgaataaggcaatggcttgccctcatcgagcaatgcaaaaatacgcttatgcgccgcgtctcgggaggtgtataccgttccggagagatagaccctgtcccccgcccgtaaggatggacagacggcgggcagctcgcttgtatggatatgccgctcggtcataaggattcccactttccggttcacgcgaatcagccgaaccaattttccaagatttctgacagccgcctctttcgcctggtcggaggcagaggcgtccgatagggccgccggatcggcggccgctccgattcgccgctttttaccgccgccgtgacagcgggaagcggctcatcgaaaaaatgccggttcggtcagcggcgccgaatcgcccggctcctcgtccacgggattgtcctcggaaatttccgcgcattccgtcaccgccgccgcggagcgttccaaatgccgggcccactcttccagccgcagttcagaggcggcgcttttctcttccagctcctgacgggcttttccaatctcttcacgggagacggccagctgtctatcgattccctccagcgtatcctcgatggtatccaggcagccgccggcccgggcataggtgctttcgagatagcgctgccccatagaccggatttccaccagaaacgccccgagatcgcccatcaagccttcataactgcggttggccgccagcagtctctcgattttcgcttccttttccgccatctcgttcttctgcgccgtcaatgcttcccgcagccgctcgttctcagcgcgcaggctatcggatttctcgtcgccgcccacccgcagctctttttctgtttcgagacgcgcctccagttcccgcagcttctcctggaacgcatcgctctcagccgcgcgttccgcccgttctttttccaatgcaatccgcgcctcgtcggcccggccctgtacctcggcggcagaatccaccaacaaacgcattccacctagctgatcccgcagttcctgattttcccggcgaagggcgtcgcccgccgcagccgcctgccgcagctgctctgtttcagcgagccgctcctcctgctgcttgcaggtctgcagggcttccgacagctgttccgcgttttgcttaagcgccaggtcgctttcctccagcttctgctgttcagcgcttaactgcgtgcgcgcttcttccagctcccggcgcgcttcctccacttcctcgccgtgccgggcgttgagctcatcgatataattcaaaacatcggccttgttgaatccgccgatccctgtgcgaaacgatccgatttcagccatgcctctcacgtccctttatctggcgttgaattttaaccattatactatatcatgggaaaaaagaaaagacaagcggttatttccccggtaagcttgagccgcgttccatcttgtggtagaataaaaagacatgggcggcggcccgattattcaacggaaggtggaggtgaccagtatgacaatggaacaggcggcagcacaaatccgtcttcccgacaccaaggcccgcgacgccgcccgccggagactggatacccgcgccaagctgccgggcagtctgggtctattggaagacgcggtcattcgcctggcgggcatacagcggaccgccttcccccggctggaccacaagcttgtggtggtcgtgtgcgcggacaacggcgtaaccgctgaagggatttccccttccgcccccactgtcaccgccgcccaggcggtcaattttgcccggggcggcggcaccatcaacgctttcgcccgtcggctgggcgcgccggttcgtgtggtggatgtggggatcgctacaccgtacacacatgaaggtgtggagcggagaactgtccggcgcggcaccgataatatggcggcgggccccgctatgtcggcggcggactgccgccgggctgtggaagtcggcataaccctggcggaagaagcggccgcaagcggcgcacagctgctcattcccggcgaaatggggatcggcaacaccacctcctccagcgccgtcgccgccgttctgctgcaaaagccgcccgaagagataaccgccagaggggcgggcgctcctgaacgggtggcgcataaggcggcggtcattcgaaaggcattggacgtcaaccgcccctgtcccgccgacccgctggatgttttagccaaggtcggcggactggacatcgccgcgctgtgcggcctttatataggggccgcggcctgcggcctcgctgccatgctggacggcgtcatttcctgtaccgccgccctggcggcggtgaggctggcaccggctgtccaggagtatcttctcccctcccactgttcggcggaacgggtaggaagcctcctgctggaagccctcgataagaagccgctgattaccgccggcctttgtcttggagaaggaaccggcggcgttttgggtgcggcgctgttggattacgctttggccgcttacgaacaggtggttggaatcgacgaaatttagggggagcgcgtgtggtgctgcaatcgctgatcattgccatatccatgtactcggccattcccatgccgcaaatcgaatggcgggaggacaatatgcgctggtcgctgggttgtctgccggcagtggggctgctggcgggcgggctgctttacgggtggtcggtgctgggtgctgttaccggcatgcagccggtgctgttcggcgcggtggctgtcctcctccccatcgttttgtccggcggttttcatatggacggtttcctagacgccgccgacggcattttttcccgccgcgaccggcaaaagcgtctggaaatcatgaaagatcctcactgcggtcccttcgcggtgctttgctgcggcggcctgcttctgctggagctgggcgcttggtgccagctggcgtccgtcccaaagcttctgcctctggcctgctgtcttttcactgtatcccgcagtctgacggtcatggcgggcagccgcctcccttatacgtccaccagcacgctaggcgtgctctttgccaaccgggcggcccgcggcgtggccggtctaggcatcgcggaaacggcggtttccgttgccgggttattcattgtcggctggctgtccgccggtgccggcggctgtatcgcggcggccgtgctggccgccgcggcggggctcctcttctggtggtacgcttccatggtccgccgggagttcggagggattaccggggatttgctgggcttctttgtggagctgtcccaaggcggcctgctgcttgtcctggcactttgttctttgtttctccgcgcattgtgatagaaaggtcttgattatatgcaattggaactcgtattcatccgtcacggtcagacagccgggaatgaacagcgccgctatatcgggcagagcgacgatcagcccttgtccgaagccggccgggcccagctgcaggaatggcaggccgccaaaaaatacccgccggccgacgccctgtatgtcagccccttagcccgctgtcaggagacggccagaattctctatcccatgctggtaccggtgaccatcccgtctttggtggaagtcgatttgggcatattcgaagggaaaacctacgagcagcttaaggatgagccgtccttccgacgctggatcgactcccgtgggatgacgccgcctcccggcggagagggcggaaaggaaatcgcgcaaaggctgatgggcgcgctgcggcaaatcgctgacgacgcgcagcgctgccatttcaagcgggcggccgttatcacccacggcggttgcattatgacactttttcaacagctggacgtcgctcccgggacggatttctatgcctacgccacgccaaacggcagcggatatacggccctgctggataccaataccatacagctgtcccgtatcactcctctgtctttgtaaaaatatttcaagaattttcgtactttttcgagcaaagcttgtcaaatgcgaaaaaattcggtatacttaacccagaatacttacaggactggaaaggcgtggtgaggaacatggcattgggcttccccctttatatcgacctgaacggcaataactgtgtggttttcgggggcggagactatgccgcttcctgcgtgaagacgttgctggccttcggggcgagggtgacggttatctgcccgatactcagtgaaaaaatgcgggagttggatgcagcaagtgaagccgtccgccatattccccgccgctattaccgcggggactgcaccaacgcctatctttgtgtggccgccaccaacgatgaaagtgtaaacattgccatttctgacgaatgcaaggcaaaaggggtgccggtcaacatttcccggccggccgccttcggcaattttattttccccgctgtgattgtccgggacgatatggtcatctccatcgccggcaatcagccgccggacgcactggaaccgctacgaaccgcgttggaaaatacgctgcccacgcttttggaaactgccggctgggggccggaaatcgatagctgatataaaaactgcagccccgacacacgatgtgtcggggctgcagtttttatattttgtttggtcgaatcagaagccgcgggaagcgcctccgccgccgaagctgccgccgcccccactaaatccgccgcctccgcctccgccgccgaagccgcctccaaaaccgccgccatggccgccgcggcccgagtgccaaaagatgacaggcggaccgcccctgcggcccggacggccgaaaaagaagccgcacaggataaccagagccaccaggataacaataaagacagtgccgccgtcgtcgttttcgtgcaccacgtcatcgatcggcgtatagctggcgtccggctccaggccaagttcgatcatcacctcgttgaccaaggaacgataggcgtccagcatgccgccggaataatcgccctctttgaatttgggcgtggcatacgtatccagaatgcggcctgccttaatatccgggatgccgccttccagcccctttcccacttcgatggtcacctgccgctcgtccatggccagcaggagaagcacgccggtatcctctttttctttgccgatgccccagcggttggccagttcataggcaaaatcgcgcacctcttccccatccatggagggaacggtcaccgccaccacctgggcttccgagcgggcaaacaactgcttgcccagattatacatctcgtcttctgcctgggccgacagcacatcggcaaaatcattgacaaaaaaccgatcggtgggctcaaacgcttccgcagcagcagccggcagggcggtgccggcaaataagaccaggctcagccccgccgccgcaagcaggcgcatgcctccgccactcctcatcctaaccatccattctcatcaaaggccccataggcttatcaatcgaaattcacctgcggattgctctgcgagccctccgaggcctggaaatacgccttcttatcatagccgaacagggaggccaccaccgagcccgggaatcgccggatagcggcgttatactctttgacggcctcgttgtattcctgccgggctctcgtaatacggttttcggttccttccagctgtgtctgcaaatctttgaaattctcgctggctttcaaatccggataattttccaccacgaccatcagccgagagagcgccgcggacagttccccgtcggcctccagtttggcggccgtgtccgtcgcgccggccagtttggcgcgtgcgtcggccagggcggtatatatgtcctcttcatgctgcgcatagcccttcactgtattcaccaaattggggatgagatccgcccggcgctgcagttgtgtttgaatggtgctttccgccgcactgatactctcgtccaaaacggcgaatttgttgttggccgaaacgccccagccaatgacgccaataatcagaagaaccacaacaaccactaccgagagaatggccatggtactttttttcataatttcgtccgtcctttctctgcagcctccgctgctaattgaaccgaaggcctgcatccaatagaatacccaaacgcgccgcttttttcaagtgttttggctacgaattcaccgcctcttcataattatgcggaactctcaagaaaattgtcatcggttcttcattgattcgaaaggaatccggcgggcggacataaaaattttgcatttccccgcgcatatttttttcccgtccggccatactaagcgatgcggagacctgtctctgcccgcaatatttttcacaactcctggaaaatggagcgaatgcttgataaagaaaggatggacgtttcatgctggacagactggctttgatcctggttgtcatcggagcgctcaactggggcagcatcggcttattccagttcgacatagtggcgtgggccttcggcggcgcgggttccgccgtcagccgtgtgatttacacccttgtcgccctggctggtatctggtgtatttccctgttcttccgggatcgggaagaaatcctcgaacacaacgattgattccgcgaaaaagcgcagccgtcattgctgatggctgcgcttttttgtggttttatttcattagcggggtcaacagcagctggaaggtaaaggcgtcgtcgttcagctggtggcgcggcgttaaaacggggccgcagctgttggaacctataccgctctgggcgtaatccaggcaaagaacggtatagccgctttcctgaagctcgaagttatgcgccgcggcggtcagcgcctcctgggtgtaggcagacgcattgaacccgaacggctccgccagggaatcggcccgcaggccgccgtccggccccgtcacatgcatgaaagagcaggagcagtgactgccgttttcctgcggcttgatatagtcctcgtgcatatcccggacgtgagaggtatacagccccaccgtgctggcccagcgcttgtcccgatagctttccaccgggccgcgccccagatacgtcacctgctccattctcgccggcaggaacagccgcaggccgaaccggggaaggaaaggcgtgtgcgggttctttttcacctcgaaacggcaggcaacgcggccggccccatccaccgtccagaaggcctcgatatccagaatccgctgcagatagacggcggaaatgctcagcacggaatggataacaacgctatccccgtcccatcctacctgcgtttcataggcgtgggacaccgtgcggtcgtagccgcatgcctgccaatgatgccggacattccgatcgttatcggtaggggcccgccacaggttataggtcatcggcttttccagcagggaacagttttccaccaccagggaatcgaacaagccggtcagcttattgtagacatagcggaaacccgcgccggtaagggtcgcctcctcgtcggtttcctccacgcggattgtcccgggagcgggggcgaacacggccggcacgaaggggcgcagctcaatttgctcgaacccgagcacatgcccggccggcgtaaaggggcggtccccttcctgcaccagggtaaaggtcacatagcagcggccatccgccggaacaggaatggacaccggaagcggccgttcctcatgcggcggtacatccagcgcggcgctgtccacccggccgccgcttacccggacgccctcccgggtcacttcccattccagtgacagcagatctttcagattggtgaagtccaagcgattttccagggcatagccgccctcctctgttttccggatccgggcgggccgcagcacgtttttatactccagcaggccggtatgcacccggcgatcgggatagaccaggccgtccatgcagaaattgccgtcgtgggggaattcaccaaaatcgccgccgtaataatattgttcccgaccgttggcgtccctccccatatagagggcatgatcgcaccattcccacacaaacgcgcctacgaacccgtcgtgcgcctggataagctccatgtagtcctctaaatcgcccgggccgttgcccatggcgtggctgaactcgcagagcacatagggcttccgatcccctttatcctttgcattccattcccgaaacctttcctgaatggactcaatggtcggatacatgttgctgtcaatatccaggttggaaaaatccgccggatagccttccagaatataatgctgcgattcgtaatgggtcaagcgggtgctgtccacgctcttgatataggccagctctgcttcggtgttgggaccgtaacccgactcgttgcccatcgaccataccacgacggaagggtggtttttatcgcgggtatacagcagtctggccctatccacaaaggcctcccggaatcgctcgtcgtggggcatttgcgggaagcaggcatcctcgccatattggttgatggtgccatggcattcctgatccgcctcgtcaatcacatagaagccgtaccgatcgcacaactcgacaaaaatgggggcgttcggataatgcgaggtgcggatggcgttgatattgtgctgcttcatcaaggccaaatcccgcaccatatgctccttcgaaacggcggggccgtcaaacgggctgctatcgtggcgattgactccgcggaacttcacgcgttgcccgtttaagtagataaccccttcccgagcgacaatctcccgcagacccacgcgaactgccagggcttcctctcccgtttccaacaaaagcgtatacagctgcggctgctccgcgttccaaaggcggggatgctccacaggaatgtggagcgccgtcccagtgcactgcccctgccccaccagcgagccgtccggcgcactaagggtatacgtcaccggcagaggaccccccagaaattccagggaaacctgcacatcgccgcgggtatacccatcggacagcggcgtggtaatggtgaaatcccggatatgggcagcggggcggcgaagcaggtagacatcccggaaaatgccggacatccggaatttgtcctgatcctccagataactgccgtcgcaccatttgaggacgaggacggtcaactcattatgtccgggccgcagcgcatcggtgacatcgaattcgctcgtggcgtgggacacctgggaatagccgataaaacgaccgttcatccagacgtagaagcaggagtccaccccttcgaaattcagataatgccggtagtccgccggcgtctccggcagttcaaaggcgcggcggtaaatgccgcagggattgtcgtggggaacatacggcggatcgcagggaaacggatagcgggtgttggtatactgcggcctatcgtagccctgcgtctgccagaccgaaggcaccggaatgggccggctggtacgccaaggcgcgtccgactcccagaaaggctctttcacgtcgtgaatgctggcgtaatagcggaaatcccagtctccgttcagcagctgaaaacggctggaagcggcgcgggcgtcgtccgcgcacgcttcttctccgctggcacagggtacatagtaggcgcgcggcggcatggtgcctatgtgcaggcgctggggatcttcaaaatacttctcgacgatcacaattcaccactccaatcaagtaagggatttttcttcattatactggcgcgtggcggttctgccaatgaccggacttgttcagaatatgcacaaatcgatacgatcgctctttacaggacgtctcgccggcgctatactgactagagagaaaaccctttattggaaaggtggtgccgtcatgctgaacatttcaggatatctgggccccagcagtgaaattcccatcgtggacgatcgggcgcctatcgtcatctccagctgcggccattttcgactcagccgggaggaatatctcatcacttcccgccctgcgggccgacccgactaccagctgctgtatatcgcggggggaaccgcccacttctggctaaaggaaaaggagcgtgttctcccggaaggccacacggttttgtaccggccgggcgagtcccagcgatacacctataaagcggaaagcatgcaggaaatttactgggttcacttttcaggacgagatgcggcggaatggctggacagcctgggctttagcggcgaacccatccgcgcggtgggggaacatatcgaatacacccgtctgtttgagcaaatgatccaagagctgcagctgcggcgggagcatcatacgcagatgaccgccctgtattgtctgcagctgtttaccctgatgtcccgccaggcggaagcaagccatttccccaagcgggacgagcaggtggaggaggccatccgcctgttccacgcccgattccacgagcctttggaaatagccgagatcgcccgtggcttcggcatgagtccctgctggtttacccggctgtttcatcggcagaccggtctgtcccctcagcagtatctgaccgatattcgcatcaacaaggcccgggagctgctggccaccaccaactacaacgtcagcgaggtggcggatttgaccggctatcccaaccccctgtatttcagccggatttttaaaaagcacacgggtgtatccccctcccgctataaacagccgtagaacccctctaaaagcaaacccgccatcccttaaaaggacggcgggtttgttatccatgggataggacgcgtttgacgctgcgcagcagggtcttgaaattgacagccagcaccaccaacagcagcagggcttcccacagaatccacaagggcgtttccgccaccaggatccagctttgcagggatacaatcagaaaattcaagccaaaacgggccacattccactggaaggggattagcgagtgggtatgcaccacccggataaggaaaaccgccgcatagctgatgcaggtggacagcgccgccccctgcgcccccattttgggaattaagaggaaattgcctataatattgagcaccgcgccgagaatggtggtgacgagagtggaaatgctctttttctccaccacgtagatggtgccgaaaaaggtcacgaagcaggaaaagcaggtggccagaatcagcatcgggatatactgccaggattcatagaaaccgctggaaactaggatcttggtaatcaccttggcaaacacgatcagaccggacgcggaaacaaacaccaccgactgatacatggagaagacccgggcaaaaaatttctgccgggccaagcggctggtttcagtcagaatggaaatctgccacgcgtccatgaatatacccacgagaaggatcatgatggtcgggattttataggacacggcatagaggccgttggccccctcgcccttgaaataggtcagaatataccggtcggacaaatcggtgatccaccaaaaggcgttggtgggaatcattggcagcgcatagcggagcatattggacaccgcgtcccgtttcaggtaagacaggcgaatataccgatgcagccgcgcactgataaacagaaacagcagcgacaggaaatccgagcaaatcatggccatgatgtagcccgtgacgccccatttgaacaccaccaggaacaggatatcgaacagcagggtggtggccgtccccagcacgccgcttaaggcgtacagcttgaccatctgcttggccttgacaaactgcgcgctgaggctgcgcagcatggagcagaggacaaacagataaatatacagcacatttcccttcatggcggggaaaatgtcggtcagcttgttcatcagcggggcgcagagaacaaatatcccgaagccaatcagtatggcggctaggcccgtggtgaacaccgagcgcttgtccgtttctccatccataccgaagcgcatcacggcgttggtaattcccaccgacaccagcggaattaaaaaattgcccgtctgcaccaacaggtcgacaatgccgtactgatcctgtgtcagtacgcgggtatacagcggcatgagaacaaacaccaacagcttggagctgaaggtgccgatagccagtatcacggtgttggaaaacagttgcttgtagcgattcaagggggccgccctcccgcttggaaatcggcggtgcgataccgcgccggaagccataccgatcgtatgtcctccggtaggataccacaccgccggaaaatgtcaagtcttgtcaggttttcgaaaacttgtaggcgccgaaagccgctcccgccagcagaaccagcccgatgggcagttccagtgtcagcgccagagaatccttggggaaaacagccagcagcgaccccaccaccaggccgagaatggcgaaataggtggcctgcggctgcttgcggatcaggacatccaccagcttggagccaaaaatcagaccgacgatgcagccgagccccaccggaatcagcatcccgacacagtgccaagtcgcgccgtcgataggccaggtaaacacgccggagatggaggtgagcaccgtggtgtacacgcccaaaacgagcatgacgaaggagccgctgatgccgggcagaatcatggcaaaggtactgatagccgacgcgccgaacaaaatcagcagatttaatggggtcagcgccagtaccgcgttcgattcagcgggcttgagcagcgcgatgaccaccatgaccaccagcgccaccaggaaggaaaccattcccttggcctccattttctcgcccctggcccgctggaaaatcatcggaatactgccgagaatcagccccataaaggtaaaattggtggccatgggataattcccgagcaagaactcgatggccttgctgaacaagacgatccccacggccgcgccgatgcccagcggaatgatgaagggcaaattcttttttacatttttcaggctcagcgtctcgatgaggcgatcgtatatcttcaggatcaccgccatggtgccgccgctgacgccggggataatgttggccaccccgacgatcgcgccgaaaatcacaaacttaaccatgtccattccgtcactctcccagacttccttttagggtttcccagtgcccgccgccttattcctccgtccggccgtctcggcgcgtctcccgctcctgccgggcgcgaaactgcttgcggttctgatggatcacgaagcaagagttggcaatggataccaaggcaaacagcagcagcaacgccttggaaatatcgttattgataaaattcatggcgccgttgaatttgtccacgataaaaaaggtgatgaacatcagcgccagaatgatgcccgcatggggcagcagctttcgaaaaatccgcatggatgctcctcccctctctattcgagctccgcgacataaaacatgtcgctgttggaacgcccgccgttggcgggctggttgtatacctcgcccataaaggtcatcaccgacgattgcccgccgtcgaaattgtacgcggctttgcagccgagagattcgaacagctgcgagagctgtaccatggacattcccttggaatacccggcctgccgcccctccaccagcaccgtgcagtaatggcctggctcgtaatagccgatggccgagcggggattggcccccttgacggtggaaacaaagtcatcgttggaggcaaaagccttcccgttcttatccagaagctgcggcccaaagctccatatctgataagctccccgctgcttggccgcttccatatccagctcttcggcggcgtaagtttccatcaccccgtcgctgtaaagcacacacgcatcctcgaacggcgattcccgatacaggatgccattgcgcaccaccgggcctatggtgcggttgccgtagtaatcgccattgatggccacaatggcgttcagcctctggctcatggattgtacgctctcgcgcagcccctggccgaacttatccttcgccagaccggcgcgcagattgtcgatgctgttcacataaatgtcggtgacaaaataaacaacgccgttttcctccacccgctgaatctccacggacacatccttgctgcggtagctgtttgccgttttcaccaccgtgtcggagaacttatctggccatttggcggcccagcccgtgggggaaggcggctgggtggcatcggtggaggacggggatgaggaggcgccggctccgtccgaaacgggcggacggctgatcggggtcccctggaagtcgctcacccgcggcagtacatggtgaaacagggaaaatatacacaggcaggcgccggcggccaccacgtcgatgagcgcgaccaccggaaccggcagcagttttctggttctttttttatgagaaggaggagtatgtcgcatagaaaaccctttctgacataaatcgacaattttacgtatattttaatcagaataccagatggatgttaagaaacgatgaacgggaaaaagaattgacagcccgacggctttggggttacaatagcagggatttccccgctggaaaaagcttgctctgcttattatgataggagtcttggttgatgtcaataccttctttaaaatcccccgaggatctgcggcgtctgcggctggagctgctgggcgtctcagtctatcgaaaagtgctcgtccaaccggtatccgccgcgctgctgaagctgatggaagcggcggtcggagaagatcccgctaagctttgcgagagctggggcgccttgtgctccacgctggcgcagaccgggcggctggacagccttcccgccgccgtggccgaggaggtgctgcgggacgataacgccttttccgccgcgctttccgcgggtgaggcagcggctcctttgctggaagcggcggccctgcgggatctgcgcgtcctgtaccgcgccgcccaggtgacggcggaggaactcgcgtccatttgggaagaaccggcaatcgtttccctgccgcgctggggctcggcgccggcccccgcccccatggagcggccctggggcggctcgcccgagacgcttgccgcctatcacaaagcccacggctgcggccggttcgtcagccatatcgcttttctctggcgggacggcgctttgctgccagtggagcacccggatcccatccgcctgtcgcagctgaaaagctacgaataccagcggcaaatcgcagtggacaataccctggctttcctcaacggattcgaggccaacaacatgctgctgtacggcgatcggggcaccggcaaatcctccaccgtcaaggccctgctcaacgaatacgcccctatgggcctgcgcatgatcgaggtgcccaaggagtacctgcgccagctgcccgatttgacaggctatctgtcggggctgcccatgaagttcatcattttcatcgacgacctgtctttttccagagacgacgataacttcggcgccttgaaggctgtgctggaaggcgggctggcctcccggcctgaaaacgtcattctctacgccacctccaaccgccgccatctgctgcgggaaaccttcgccgatcgggacggggacgaggtgcatcacgccgacaccgtgcaggaatcggtctccctgtccgatcgtttcggcatcagcctgacctttctgctgccggataagcagcgctttctggatatcgtggcgcagatggcggaggatcggggcctgcaggtggagcggcagacgctactcgacgccgcggaacgctgggcgctggagcgtggggcccgtacgccccgctatgcccggcaattcatcgccgacgcccaggccaggctggcccggggcggctctttataaagaaaggcggcgcgcatatggggctgttctcccgcaggaaacaaaagcagctggacaccaacaccgagcttctggccaaaattgacgggcgcattatccgctatgtaacctgccgcggtatcgacgaaaacggcaacccgatggaaaccgtcctgggcaaggacgggcggattaacaccctgcatgatcgcatcgttatttcctgcggcggcacggaggtgttccgctgcgacacagcgctggccaagtgcggcgagctgatgagcctggagggcgtagtcgtcactgggcccaatcaggtgaccgggcggacggagtccgtggtggcgtattacaaatattatcgataagcgaagaatggagcgatattatgcctattgttttccctggctttcgaaccaaagcgctgaccttcagctacgacgacggcacgctgcaggatcgccgcttggcagcgcttttccgtaaatacgggttaaaggccaccttcaatttgaattccggcgccttcgacgaggtacagcatggcagccacggcggcttttccgtcaatttttctcgggtgcacgcgggggaggtgcgggatctttacgcctcctttgaagtggcgtcccacacgctgactcaccccatcctgacggacattcccgacgaggagatccgccggcaggttcgggaggatatagcggcgatcagccgactgacaaaaaagccggtcaccggctttgcctatccctgcggcgcgtataacgagcatgtgatggatctgctgcaggaaatggggattcgatacgcccgcacggtggaagaccaccacactttcgctctgccggaaaattttctcgcttggcatcccacttgtcacgatcatgacgaagccgccatgccgctggccgacacctttgtgaacagcacggatgaagagcttcgcctgttctacatttggggccactccttcgaactggataaggatgatatggatcgctggcaggccatggaaaagctctgcgctttcctggcagaaagagaggacatctggtacgccaccaacggcgaaatttgcgaatacgtcaccgccatgcgcagcgtgacgcctaaaaacgggcagctcttcaacaccagttcacagcctctgtatattcgtcggaacggcgcggacgtgcttctccagccgggtgatcgaatagagctataacattagatgcttacgggatcaaaaaagttgccggaaaaatccggcaacttttttacctccatatcccttagaacaaaaacaccggcatatcggcccggcgagagtcgggctgcggcgtctcttcctccacctggggttgagcgggcttcgccggccgaggtaccggggaagttttgggcatcggacgcacttgggaggccggccgcgccgggcgggaagccggcggcttcaccgtttccggggaaaggcgcgtctccaccgcggcaatggccgcctcggcctcttccccgcccgcggctccgaaaaaatcgtgggcggcggcgaccgctaagcggcggcgaaggcggcggcattccagcgcgtagcgtgccgcgtccggcggggctgtctcctgcctttcttcccaattcagctgggccagcagccgcctggcatcggccgtgatttctccatattcttcttccctggcggcctgaatcgcgccgagcatggcctgttcgtccgcctcgctgtcgtaagccatggataaaagcgcggcggtgccgccgctggccagcacacgctcccgaatggccagcagcgcctcccgcagcccctcccgctgggggacgaccgcgacagccggctgaagatacaccgcccccaattctttgagcgccttccataccgccacccgatagcgggacgggttggccgggatgctgtagctgagtgcccaaaatttcatggggatccttcctttcataacgggaaagcctgttcgtattaacaccggttattttaccattttttccggtgcaagtcaatgtgcggacacccgcttttcttttgtcggaaaataaggtatactgatagggttatcaacgaagggagggatagtcatgctgcagctgcttctgggacgatccggcacgggaaagaccaggcgggtgctcgaggaactgacgcacctggcgcggcagcaggacgctcccaccctcgtgctgctggtgcccgagcagttttcctttgaaagcgagcgcaccctgctggaaacgctggggccccggctggccggacgcatccgggtgctcagcttcacccgcctggcggagaccgttttccgggaggtgggcggtctggcagggcggcagatggacgacgccacccgcgccctgttgatgagccaggcgctggagcaggtttcggagcagctggtgctctaccggcggcaagcggcttctcccgactatatccaatcggtgctgtccctgctgtccgaatgcaagcagtgcgccatcacgccccatcagctggaggaggtttccgccggcctggacggcaccctgcaaaaaaagacggccgagctggccttgattctagacgcctacgaagcgctggccgcgcagagtcacctcgacccgctggacagcctgacgctgctggccgaccgtctgcccgaaagccgcctgctggacggggcgctggtctatgtggattccttcaaggggttcaccgggcaggagctgcgggtgctggacggcgtgatgtccaaggcggcgcgcactacggtggccctctgcgccgacggcatcgaggattcctccggcggctacggcctcttctcgccggtcatccgcacggcctcccgcctgcgcagtctggcctatgagcggggcgttccggtggccaagcccatccttcttaccgaaaaccggagggcccgcagcgaggcccttcgcctgttggaggagggggctttcgccccccgtccccgcacgagcgaggagcccgccgacgcggtgacgatcgttccctgcggcgacatctatgaagaatgcgcctggacagcccggcggattcgccgcctccttcgggaggacgggctgcgctgccgggacatcgccgtggtggcccgcaatctgcccgcctatgaggggctgctggacgtggcgctggaagaggccggtattccctattacatggacaagcgggaggacattctcaccgatcccctcatcaccctggtactgtccgccctgcgggcggcggtggacggctgggatacggaggatctcctgcgcctgatgaaaaccggcctgttgcccggttttaccgccgatcggatagcggtattggaaaactatctgtacatgtggcgtatccggggaaacaaatggaaacagccctgggactggaaccccctcgggctgtcggtgcgccaggacgaagcctcgcagcagctgctagccgaactcaacgcctggcggaaggaaatcgccgccccgctggaacggctgcaggccgatttgtgcggctccgaaaaacccaccggtcggcggttcgccggggcggtataccgctatcttcaggccatccgcgcggacgaagcggtgcgcggacaggtaacgcggctggaggaagcgggggaacacgcgctggccgaacgcgccgcccggctgtgggatgtgctgatggaactgctggatcgcttcgccgcggcgctggccgatattcgtctgtcgcccaaccgccatctggagctgtttcgcctggtggccggcgtgaccgaccttggctccattcctcaaagcctggacgcggtgcaggtgggctgcgccgatcggatgcggttttccgcgcccgccgtcgtcttcattctcggcgccaacgaaggagtgtttcccgcctaccccgcctcttccggcattctcagcgacaacgaacgccgccagctcatcgcggcggggctgcctatggccgacgcgagcgactggcaggccgtggaggaacgattcttcgcctataccgccctgtccgccccctccgaccggctgtttatcagttttttgcagggcaacgcggccggggaaagcctgacgccctcctccctggtggagctggttgggcggattcttccgcaggcgccgacggccaacgtccgggacacctcagagatggaatccgcccccgacgcctttacatatatggcagagcgcaccctccgccccacgccggagtcggccgccatccgtcggatttttgaggagcaggaatcctatcggccccgtatctccgccatggagcgggcggcggcagggcggccggcggccttcgcggatgaacagctggccgcgcggttcttcggagacgatatgcgtctcagcccgtcccgcgtggaaaaataccacctctgccgtttcgcctatttctgccagtacggcttgaaggccaaggtgaggcggcccgcggatttggacgcggcggaattcggcaccctggcccattatgtgatggaaacgcagctgcgggcctacgtgcgggataaaacggattacgccgccttgagcaaggaacaggtgacggcggacgcggaacagcgggtgcgggactatgtggacgcggtcatgggcggcacggaaaacaagccccagcgtttcgcctggctgctcacccgccttatccgcacctgcggcagcctgctgtggcaggtggtgcgcgagctggcgcagagccagttcgtgccggtggcgttcgagctttccatcggccgtccggaagaggagggcggcgagtatgtcaagccgctggttctcaccctgcccgacggggccagcatccaagttcatgggcaggtggatcgggtggatgtgtttgaaaaagacggcgtctcctacgtccgggtggtggattacaagaccggccacaaggagttccgcctgtcggaggtggtggagggcatcaatctccagatgctaatctacatcctctcgatttgccagaacggcggcccccatatcggggacaagcccgccgttcccctgcaggaagacagccctatccagccggccggcgtcctctatctgccggccaagctgccggtggtccgggtgggacgagacgcggacgacgaggtgacggaaaaggaacgcaccaaggctatgcgtatgaacggcctgctgctggataatcccgaaattgtccgcgccatggaggcggacgccgccggcctgttcattccggcccgcatcggcagcggcgggaaatatctggcgggttcgtcggtggcctccctgcggcagttcgggctgcttaaggaacgtatcgaaaaactgctgtgcgagatggccgccaccctgcggcggggcgacgtggccgccctgccggcagccggaagcgtggatgcctgcgcctggtgcgactaccgcgccgtgtgcggtcacgaaccggacagcccggtacgccgcatcgccgaaaaagacgccgacgaggtctggaaggagctcgtccccaaaaccgccgactgaaaggaggccgccctgtgcgtcaatggacctcggaacaacggcaatgcatcgaagcccgcggcggcaccctgctggtttccgccgcggccggctccggcaaaacctccgtcctggtggaacggatcgtgcgccgcatcaccgaccccgccgacggcacggacgtcgatcgcctgctggtcgtgaccttcaccaaagcggccgccgccgagatgaagcagcggctgagcgccgagctgtcccgcctgattgccgaacggccggaggatttgcggctccagcgccagctgatgcttcttccccgcgccaatatcagtacggtacacggtttctgcagcgccctgctgcgagagcattttcatctgctcgatctctccccccaattcaaggtggcggaggaatcggaaaccgccctgctgcgccaggaggcggtaaccgaggtactggaggaatgctacggagagaaggagcccgcctttctagaactggcctctctgctcagctccggccggaatgacaagggcctcatccaggcggtggaacgcatttacggcttcatccagtcccacccctttcccgatcgctggctggaagagcaggagcgggcctatgccgccgacacccctgtggcggaaaccatctgggggctggccgtccgcgcccggattctcgatacgctgcggtacgcggccgcgctgctggacaaggccgtcgagctggccgacggcgaggaaaaaatggcggcggcctatggcccggccctgcggcaagcccgggaggacataaccctcttatgccgggaattgcctcacagaacctgggacgaaaccgccgcggctctctccgctttttcgttctcttctttcggacggctgttaaagtatgaggacgagggacgcaagcagcgggtaacggctctgcgcgacgaggcgaaaaaacggatccaagcgctgcctccccttctctgcggaacggaagcggaatgccggcaggatcggcaggcgctctatcctctggtaaccgccctgtgcggcgtggtgcgccgtttcagcgaccgttacgccgccaaaaaggccaagcgccggatggtggatttcaacgacttggaacacggggcgctgcggctgctggtcatcgagaaagaaaccggagaaacgacgcgcacccccctggccgaggagctgtcccggcagtttgacgaagtcctggtggacgaatatcaagacaccaacgccgcacaagacgcgcttttccgcgcgctgtcccgggacgagaccaatctgttcatggtgggcgacgtcaaacagagcatctatggctttcggcaggccatgcccgccctgttcatccgccgacgggacgcctatcccgactttacaggagaaaattatcccgccgccattaccctaggcaataatttccgcagccgcccgcaggtcaccgacgcggtcaatttcgtgttccggcagctgatgagccgggaggcaggcggcatttcctacgatgagcgggaggagctggttccctccgccccctattccgacggggcgggttacgaaaccgagctgctggtgctggacaccggcacagtggccgaggaggacaccagggacgcggcggaagcccgcctgattgccggtcggatccaccagcttctggacaccctgaccatcaccgataaaggcggacagcgccctgcccggttcggggatttctgcattcttctgcgcagcaaatccgcccacgcgcaggcctatgccgacgaattgaacgcctgcggcattccggcatggacggcggcgtccggcggcttcttcgccgcgcccgaggtgtccgtcgccgtgtcccttctgcgctttatcgacaatccccttctggacgtgccgctgctggccgtgatgctctcccccgcctttggctttacgccggacgactgcgcccgtatccggatggcggacaaaaacagccccctctatgtcgcggtgcggggcatgagcgccggggagggcgatttgcccgcccggtgcgcggccttcttgacccggatggatcgctatcgcctgctgtccgcctctctgccggcggacaagctgattcatcggctgtatgaagatacgggcctgctgtccatggcggcggcccagcaccacggcgctcagcgcgtggccaatctgcgcctgctccacggctatgcccgcggtttcgagcagagcggcttccggggcttgtcggctttcgtgcgctatctggatcggatggaacagcaggcgatggacatggcccccgcctccaccgtgtcggaaggcggcaacgtggtgcggattctcagcattcacaattccaagggtctggagtttcccgtggtctttctggccgggctgggcgggctgttcaatcccgattccacacgcggcgatctgctgctgcatgccgacgctggcattgggttggtgcggcgggaggcggacaccctcaggcaatacaacacgcttccccgacaaggggtatcccttgccattcaaaacagtgagcgtgcggaggagctgcgggttttgtacgtggccatgacccgggcgaaggagaagctgtgcctcgtcatgtcccttcgacagccggccagtctcttgtcccgcctggctgcttctctaggagacgacgacaagctatctgcctttacggttttgtcggctcgtagtatgagcgaatggctgttggcctgcgccctgcgccacccttccggtaaaattctgcgggatatggccggggacgacgccgtctccatccgtccggcggcctatccttggtcggtggaggtttgccgcgccccggccgcgggagaaaacgccgtggaagaaatcgccgccgtgcagccggatatggccgtatacgagaccctgcgccgccggctggcttatacctatccctatgcggcgctggggcaggtgccctccaagctggcggcctcggagctgtcgcatgaaggcgtgcggcggcaatttgtagccgcctcccgtcccgcctttctcagtcattccggcctttctcccacggaacgcggcgtggctctgcatacctttatgcagttcgcggattattcccgcgccgccctgtcgccgacgcaggagattgcccgcctgacggcggaaggctttctgacggccgaacaggccgccgtgctccctttgccgaaaatccgccgcttcttcgccagttccctgtacgcccgcatggcggcgtctccccgctgcctgcgggaagagcatttcaccatcccgctgcccgccagccagttcaacaaagagctgccggaacacctgccgcacggggcggcggaagaaaacctggtggttcagggtattgccgactgtgtctttgaggaacagggcggtttggtcatcgtggactataaaacggatcgggtaaaaaccgggcaggagctgacggagcgctatattgagcagctgcgaatttacgcctatgcgctctcccgtacgctggcgctccccgtcaaggaatgcctgctgtacgctttcgcgctggatgacagtatttccttggaaatagtttgaaagaaaggcattcgcctttctttcaaacgggagttttgtcctttcgcgccagcagcacggcgcgaatttgctttgcaaaccagacaaaacgtcccaatctctgcgaaaggatgagtcattatcatgataaaaagtccgctatgtcacccatagcggacttttttctgccgtattacagcaccacctccaccgaatttcggatggtcaagccgtccggctccaccgtgcagtcgtaggccagcgccgccacaccgcagcgaaccgcttcctccagcgcgtcggcgaatgccggatccatctgtctgtgcggcgtgaagtacgaaacgccttccatctggatgacaaacaccacagccgcataccagccctcccgggcggcgcgtgaaagctcccgaagatgcttgcgtccccgttcggtgggagcgtcggggaatcgaacgacgccctgctcctccagggtcacccctttaacctccatccacccccggacttcgggccattcgatataaaaatccaggcgggaatcgccgaaaaccgcctcccggcggattagcgcggccgcttccggccttcccgggagaagcaggccgccggcaagcgcttcctgccaaacggcatttggcgcctggctgtcgatgttgacaagccgcccgtccttttccaccgcaatgagagacaaagccgttttgcgagccggattccgatgccgctgcacgtaaacgcgggcgccgggaatcagcagttcccggcagcggccggtgtttttcacatgagccgtctcctcccggccgccgcaaatcacccgggcgataaatcggttcggccgctcgaggaacaccgccggctccacagaatgataacgcaatccaatccctcctcgtccttttcagtatagcaaaaaaaacggttttcaaaaagccgccatcataaatccccgctttttccagtataatgaacggacgggcttgcacactaatgacgtataaaccaaaaaagaaaggcattcgacctttcttgacagggatgcggccgcatggtatgctgaaagaaacgcgcggcgattcccagcgacggaggaaacgtatgggcattcgacttattgctgacagctgctgcgacactgggccgcagacagacgagcgtctgcgtgacctgtccaaggcccctttgcaggttttggtggaagaacaagcctttgttgacgacggcacctcccatctggaagaactgattgccgccatgaaggccagccgtcaggcggcccgttcggcttgccccggcccggaggacttcgcctgccgtatacgtggggcggacgactgtctggtcatcaccctgtccagcaagctcagcggctcctataacgccgcgcgcaacgccagggatttggtgctggaggacgaaccgggcaagcgcattcacattcttgattcggccagcgcctccgcgggtgagacgcgtctggccctttttgcgcaggcctgcctggacgcgggcaacgatttcgacacggcggtccgccgggcggaatccttcgccgccggcatgcgcaccctgttcgtgctggaagatctcagcgcccttgtgaaaagcggacggctgaataaagtatcgggtattgtggcttccatcctgtccctctgccccgtgttgggggccgatgggcacggcgaaatcaaaatggtggccaaagcccggggcatgcagaacgctcttcgccgcttgaccgaaatcgtcgggcaggaaacagcgggggccccgcctcgctctgtgacgatggtgctggctcactgccaggcggaggaacgggccgaatcgctgaaaatgcagctgaaagcctcctgccccgccatcggcaaggtgctgatggttcccaccggtatcctgtccaccatgtatgtgggcaacggcggtattgtggtggccttttgatgctttttcgcggattttccgataatcttcatcggttctttcgattcgcgtgttatagtaaatctatttcaatgagacgaggaggatgaagcgtgggatttttccgcgatacgaataagaaaaaggagctgccagagctgtactctgagcggcatctggaatgcctggagaatcacattgaaagtcatttcggcccctatgaatcggtctttcacgagctggtttctccggatatccatgtggacattgccatcatcccgccgtcagaggctcataactgctacacgctggttaccatgggaatgggcgcgcatcggatgcgggtgccaaaggccgtcaaaaaggccaagctcgatcgcgccgaactggtcatctgcctgccgcccgattggaatatgcagagcgatgaggaaacggactattggccgctgcggtggctgaaaatcatggcccgcctgcccggcaatgagaaatcctggctgggctgggggcatacggtgcccagcggcgagccttttgcggagaacactcgtctgtgcggcatgttgctggaaaatcccgtgacctttggggaggaagccgcagcctgtccccttccggacggaagctgtatccggttttatcagatgattcctctttatgaggaagagatggattataaagtatctcacggaacggaggcgctgcgcgggcgcttcggcgggcagttcccgacggtggtggatatcggacgggaaaatgtctgcgagccgctgctggctgcctctctgtgacaggaaggaaccgcccatgaaacgtctcgtctctctgcttctgattttgacattggcagccggcctggccggctgcgcatcttcgccggaggattcgtcctccggcgtcctcgcgtcctcaggcggacaggtggtggacgcgggggccaccacggcggcgcctgccacatccaccaccgttgtcaccacgacgacagccgccactacgaccacgttgccggctgtcacaacggcttccaaaggaggaatcaccggaaagcccgttcccaccctccccacccgttggaatacggcggatatccaggcccccgccgccctgctgtacaatgtgacggacgatcggatgctgtttgaaaagggggcccaggacaccctgtatccggccagcaccaccaagctgctgaccgccctggtggccctgaaatactgcccggaggacaccgtgctgaccgtcacgcaggacgcactgaatctgaaggcctgggacgccagcacggcgcgcctgaagccgggcatgaagctgaccaaccggatggccctcgaggccctgctgctggtttccggctgcgacgcggcctatgtgctggcagaaaacatcggccgcctcatcgcggaaaacgaggcgctgtccaccaaggaggcggtggcgcttttctgtgtcaagatgaacgaggaagcggcgctgctgggcgctgagcaaagccattttgccaatccggacggctatcatcatgaggagcattataccacggcttacgatctgctgctgatctcgctggaggcccttcagcatcccaccatccgcgaaatctgcgccatgaccaccagcactcgcaccctggtgtccggccaaaaagttacctggaacaacaacaatcagctgctgcagcaaaagagcctttactattatccgggggtcaccggtttgaaatcgggcttcacttcccccgccggccattgtatggtggccacgctgaccaaggccggcaaagaatacgtcgccatcgtcctcaaaagcccgaacagcacccagcgctggctggatattctccagttgcttcacgctgcataaacccggttatttcctgtcgtttcggttcgatatggggcatactaagcctgtcaggaaaggcaggtgaggatcgtgtcctatattcatcccgccctgcgcgaacaatgggaaaacgttcccatctatattaaaaaccgcattctggaagcgaacgtgaccattgagacggcagaagaactgcagacctgcgtggcgctgatcgaaaagcaggagcagtgctgcggggacttgtaatccaaaggagagcgacgtatggcaaaggccggcatgcgccgtccggatccgaaggatcctcacggcaccgaaagcaaccgcaaaacccactttcccaagaacgaggtggcacctgttccggaaattcaaggtaaagccaaaaccaccaaggaaaaagccaaacccatcaccgaaaaataagcgaaacgagcagggcaaacaccctgctcgtttcacttattcagaaatcgttcattttacctttgcagtttttttcgttttggttcaacttacggacacatttacccggtatactaaaagcatcccaagagggaaccgataacatccctgggaaatcccatttactgccggaacggcagactatcgacaaggcctccttcctggaggatttacatataccttcttttctccctcctcttttcttccgggcgcgccttgcaggcgcgccccttttttatttatccccggcggtgtattcgcggagcagccggatatagatctggtaattatccaaggatacctccggcggcgtctgatgatccaccgacagcacatatccgcccgagcgcatcaccggcagaagacgctcaaattcccgccgcatcgcatcctcgccgcggctcatggtcattttatcaaagccgcccatcatcagcaggctcggatactcccgccgcagctcgcagagatcgaccccggcctgccgctccaggggatagacgccctcgatgccgctgttcagtagccaggggatcatgtctgtcaccaggccgtccgtgtcgacgaacacatgaacgcccgcctgtttcagcggcaccagcagtttctgataatacgggtgcagaaactcgtcgtagcaggctttggacagcatggggccgttgttgtaggacatatcctcgg

SEQ ID NO: 1711 - DNA, 9722 bp, Unknown
  16S sequences of unknown bacteria
ctctgctgacgaggtttgtgacacatgacggaaaagatgcaagcaagtgtgccgctaggaattgtgcgttgttgcctaaattatcagttcagttttcttttttcagattgtacagcggaaggagatactgttctcgtcttcttcttatctcggcaacataagcggagtctgtctccttatgaagctcttcgatgtactcgtggtggttctttctgattttagcgtcaacctgtgaaattatcagcatagcgatactggagcactggtcgctcgctctctcgaggtatgtaagcgtctcgatgaatatgattccggctgtgaccttgcattctccgctcttgagacggttgatatggctgtcgcgaaggtactgcaccatgtcgtctatgacctcttcaagaggctctacgcgctttgcaagctcaatgtcgtcgtcgttgaacgcctttaccgtcatctcgattatatcgtcaacggcggcaagtatggcggcaagctcacgtttagcgacaggagagaacgtaagctcttcgttctttatcttctgcgcgaactcattgatatttgtggcgtagtcgccgattctttcaaagtccgtggaagcttgtatcattatattgataatttcgttctgttcttccgtgagcgcggttttcgacaggcttacgaggaagttttctaccgtatcggtgaaattatcgagcttttcttctcgcgtatcaataccgacggacacctcttcactgaaattattgagctgtgcgatactgtcgctgaagttctgacgggctatcgtgcccattatgccgagaacgctcttcgcctcggacatagcaatctgaggaacaacgtagagcttttcgtcaagtgcgttgagagcctgcgagtagtcgtcgttttcctgcttcttttcctttgcgtccggcttaacgacaagatatgtaatcttaacgagcaggtttgtgaacggaagaaggactactgcggtaacgaggttgaatattgtctggaagtttgcgatatctccgctggatgccactttatcccaaagatccgggaaagcaccgcaagccttgagaatcgtcatagcgatcatgaagaggaatgtaccgataacgttgaatacgatatgcgcaacacccgttctctttgcgtccttggatgagcctatcgagcacaccatagcggttgtgacgcaggttccgaggttgatacccattataataggataaacgaggttcatggtcatagctcctgttacggaaagagcctggagcataccgaccatagcggacgaggactgcactatcattgtaagtacaagacctgtgattatacctacaagaggcatttcggtaaatccgccgagtatattaatgaacgcttccgattcggaaagaggttcgacggaggaagtcattgacataagtccggtgaagagaataccgaagcccatgaaaatctcgccgagaggcttggagttttttttcttcacgaacattatcagaataattccgacaacaagcgcgataggagcgagggtagagggtttaaagaattcgagaatagcgttgcccgacgagtcgatatccataaggcgtataatctgtgccgtgactgtcgtaccgatattcgcgccgaggactatacatacggcttgcttgaggtttaaaactcccgctgtaataagtccgaccgtgataacgattgtagcggtggacgactggattacggcggtgacgagagctcccgtgagcacacccatgaaagcgttcgcagtaaccttttcaagcacgcgtttcagagctgtacccgacgcgttcttaagtccctcacccatgatttccataccgtacaggaacattgcaagaccgccgagcagggttataactgtgaaaatcgtcataattgactcctgttattttggttcggctttcccccggtcaaacttccatacgttaaaaaacgcgaaccgtgccgaacctgaattatatcgcaaaacctatgtaataactataacattttcttgcaaaatcaatgtttctcatttattaaatcattgttaacttaaagttaattgtcgcgtgacataaaaaccgcaccgatatctcacgccttcgcaaaacaaaagcagagatgccgatgcggcattttattcagttagggtatttatctctcttctcttgtgcagccgcagcttttcgcttcctgtgcgtcgagaacaaaggattcgcagtccgtgcactggcataccgtaggattctgttcgtgtgtgcctacgctgattttgtcaagcgcgcagaattcgcagctcttcgcgtggtttgcgcactgcttaactgtacatgaaatggaatgattgggctttttgatctctgacataataaatgaccttccttttcggatttattgaaagccgtatgatttttcaccacaggcttacggtcattattattgccggaacgcaggcatattattagctttaatcgagattttttcaggaatttgcggcaggggatggatgccatgactcgctgtcggaataattcagcacaggtgtgatactgtagttcacccgctcaactgcgccgccgtttatgataagctcggcttcaaggatggaggaatacttctctccgtacttatctgcgccgttcacaagagagccgagggaatacgcgatatagccgtctccgtagctttcggttgacacaatgcttctggagtttgtcgccacaacaaggtcagctcccgcgtcgatgaacgaatgaaagtcagacgtcatttcgtccgttactttgccggaggtgcttatcatgaccgcgacaaaatcacgcgacgaggaggcattctctatccatgagataatcccgggaacgttgtcggctttgtatgtgcagggataaactcctacgcttactccgcttgaatgggaagaatatatcgcctttccggagtctccccacctgataccgcactcatcgagagccgcttttgtgtcggaatatccgtcagaaccgtaatcctttgttccggggcattcgagagacaccgcgtcaattcctccgagggagaggatatcggcgtttttcgcgggagctttgtaccagcctatctcgctctctccgcttttgtctcttgccgacagttcttcagaatccgagaacacggatgagaggaaagacagcgtcatgtcgtccttctttgtaatgtcagttatgtcttcgagaaaatatccgccgcctttttcatcgtaaagcccgccgagcgtaccgtaggagctgcttccgagcatggagccggcgtttatcgagcctgtgaacgtcatggcaaaccgctcgtaggaaaagtcgggttcttctatgttctgtgcggattcggcttccgtcgaggggatattttcatcgggttttgtcagtcccgcggcgtaatcagagtccttatgcagtattgttgacagaactgtcgcaccgatgagaaacagcgtcacaacggcaatatacgcgcccctctccgccgccatcttttttaaagcattcatatagcattcattccgtagtcgtagtttttatgtgaggatactctgaattaatcggatttttgcgataaaaggctaaaatataggggcttttgtcgcaaaaataaccttaaatcagaggcttcctcaggatatcactaaagctgtcattttttgtctcaatccgtattattttagcatattatgcatcggaatgcaagtatttatgcgcaaatacctccgcttatataaatacaggacgtatctgctcacccctctcagcgtcctcaagcgtttttctcacaagcgaaaagtcggcgacaagagaatacggcttctccgtgatgttatcctgagccatcggtacgaagaaaacattcttccgctgcatgagccttcctatgttctcaatatttcccgagagcgcgtcgtttgtcgccagagcaagcactaactttttcgagcatctgaggtgagccttcgcagccatagtcacaggtgtgtccgttattccgtgggacagcttcgcggcggtgtttcccgtacacgggcatatcagcataaggtcaagcggatatgtaggtccgagcttttccgcctccgttatcgtgcatatgggttctctgccgcatatcgccgccgttttttcccgcagcatagccgaactgccgaatcttgtgtcggtctgcgcggcgttgaacgagaaaacaggtacgatatcgtattccccccgcagctccttcatgacctccagcgctgctttatgtgtgcagaacgaaccgcataccgcaaatccgagtttcttctttggtgtgctcattgtaagtcgttttcctccctcatttcagtttttcggatatgatactaccgaccactccgcagattatctccccggcagtctcgggcgcgacctttcccggaagagacggcaggcagactgtgcggatacccaccctctcggcggattttagatccactcccgaattcttcgccgcaagctcaaacagtaccgtctttttctcgagccgattaagcagctcctcatcgaaaacaagcgcgggtacagtattgaacacggcgtcgcacctcagcggaacctcgcggtattcggacagcggagtcggtatgcatccgtcgcattttgcccacgacaggtcttttttgctccttgcaacggcaaacacgtccgctccgagcatctttagcttattcgcgagcgttcttccaactctgccgtagcctatgaccgccgctttcatgccggacactgttatgtcaagctcatccatgcaggcttttatcgctccctctgccgtaggtacggagtttaaaatctgcatttcctcgcagtcgtagtagtccacgcactcaatcccgcattcctcggcgaatctcacggcaaacggaggcagcatcccgccgagcagcagagaacccctcttcattctgccgcatatttcgataagggcaggctctgctcggtttttctcaagcggtgttctgagatgcactccgtcgttcgacacgggaagcggaagcaccacaacatccgactcgttcacggcagacgtccagtccacgcatttcaccgaatttttcaggtattcctcatccgcgccgccgtatatctcggaaaatccccagacagcgcattcatatctttcagacaggcaggacgcggtcgagagcattcttctgtccccgccgacaagccccgcttttatttcttccgccatatcgtttttctctcatgccgcagttttatctcgcagcacgatttctctcccttccgcctttgcttttgtgacgtggagataaaatattctcccttctttaggatattcgtcacacggcggaagggtgagcggcggactgtatttcgcacgatgtatgttttttatatcgaatgttaatattctgcacaaaatagtccatataaatcaaaaataggacttgaatttgttatttatttatgctatgctgttttcagacgcatgactatagcttagcgtcggcttaaattacaaaactaaatttcctatatcaggaggattttattatgattttaagacccccgtcagtgccgcttatcacggtagacccttatttctctgtttggtcgcccgctaaccgtctgacagatactcagaccgttcactggaccggcaagccgaacactatcgtaggcacagctgttatcgacggagaaagctaccgtttcatgggcaagctcaaccgccgcgacgactcaaagacccttacacaggtttcctgcaactgcgacgcgctctccacatactacacatttgaaggcgtaggcgtaactctctccctcacattcatgactcctctcttcatggacgacctcgacataatgacacgtcccgtaagctacctgaagacagaggttaagtcaaacgacggcaataagcactccgttaaggtaaaaatctccgtttccgaagaaatctgcctcaactaccgcggtgaagacgaagttgttacggaagaagttacaacagactctttcacaggcgttaaaatcggtagcgtaaagcagcccgttctcgctgtatccggcgacgacatcagaatcaactggggctacttctacctcgctgtaaactccggcaaggcttacgctgaaaaggtttcttctcccttcgttccccgttggcatgacgataaggctcccgaaggcttcaaggaagagatgacttttgtttccgccgaagctgacctttgcaccgcttgcgctccctccgctctcttcacattctcctatgacgacataaagtccatcgaatacttcggcgacaagctcccctcctactggaacaaggacggcaagaccatcgttacggctatcgaagaagcatacgccgactacaactgccttacaaagaaagctaaggagttctccgacaagctcttcctcgacgcaacccgcgcaggcggagaaaagtacgctgaaatctgcgagcttgcataccgtcaggctatcgccgctcacaaggttgcggttgacaacgacggcaaggttctcttcatctccaaggaatgcttctccaacggatgcgccgctactgttgacgtaagctatccctcaatcccgctcttcctcatctacaatcccgagcttgttcgcggcatgatgcgtcctatctacaagtatgcccgcactcccggctgggtattcgactttgctcctcacgactgcggtcagttcccgctcgttcacggacaggtttacgcagacaaccatatcgaaggtcagatgcccgttgaagaatgcggcaatatgctcgttatggcagcttccgtttgcattgcttccggcgacacaaagtttgctgaagaaaacctcgatctccttgaagcatgggtcaagtacctcgaagctcacggagacgacccggaaaaccagctctgcacagacgacttcgcaggacacctcgctcacaactgcaacctttccctcaaggctgttatgggtatcgcaggtctcggcgtaatctataagatgctcggtcgtgaagctgactacgaaagaatgacagccgaagctaagagaatggctgccggctgggcagaacgcgcttccaacggcgacggcagctatcgtctcgcattcgacagagaaggcacatggtccatgaagtacaacatcgtttgggacaagctcatggataccggcatcatggacaagggcgttatcgctacggaattcgcttcctacaagagacacatcaaccactacggtatgcctcttgacaacagagaaacatatacaaagtccgactggctcatttggacagctactctttccgaatgccgtaagggctttgaagaatatgttgctcccctttgggaaagctacaactgcacactctcccgcgtacctatgaccgactggtacaacaccatctccgcattccagatcggattccagcacagatccgttgtaggcggacacttcatcaagctccttgaagctacaggcaagatgaagaactggaagaagtaattccgaataaattaaacgctcatgctctcaccgggcagggcgtttttttatgcggtcgccattgatacgagctttcctctccctctctcaaccgtcatgtttatctcccgcccgccgacagtgaaagagaaaaaagctctcccgaatgcgtcgtatccgtttttctcaagccgtgcggaaccgatttcatccgcagtgagcatatatccgagataagaccgagcggacgcggcgcattcttcaagggagaaaacctcacccgtctccgtgtcaagcgaaatacagcactcgcgcggaatgcatttgtctttgaccatcacgacatacgcgttgcggcaggcgaaaacaagctctccctcccctccgatgtatttcagcgtgtttttcagcccgagcagctcgttcgcgtttttctcggctctcttcatctcggctgtggtaacgtttgctctgacagttgtctcgggtgtcggttctgtcttgtcagagttttcgtcaaatcccgcttttatcttgttctcgagcatatcagtgtattccccgccgcgttcctcaagcacagccgacgacacatctgaaaaaaactccgccgccgtaaaatttcccgctctttttgcgtattccagtgcgttcagtgcataatgatatgagacggttttgtccgcgtttttcaggctcatgagcaggttctcggcggtgtttttcatctcgacctcgtatatcctcgaaagactgtttttctcttccctctcgccggacaaatcgacaagcgcgtatgctcccagaaaaataaccgccgccgacatcacgctgaacaacgaaagaaataccgccgtgtgtttttttatgaattccatatcgcatatcctcaccttatatttataatattaggtttgacaaaacgcacgttattatgttataataaattcggttatagagggatgctcgaataaacaaagccgtattttaccgtttgaaaaggaagtattagcatggaacgtgattttttcccgaatattatcggaaataagcggctgaagggcataatatcctccgatatctcaaacggcaggactgctcacgcatacattatcgaaggtccgagcggctctggaaaaatgctcactgcactgtcaatatgcgcggctgaggtttgcgagaggaagaacgacggctcttctcctcttccgtgcggcgaatgcgactcgtgcaagagaatactctcgggtctttccgcggatgttctcgtgacaaagaagccggaggacaaagcttccatcggagtagatttaatacgccccatcaaggacacgctgtacattgcgccgaacgacggtgagaaaaagttctacattataaaagatgcggattatctcactcccgccgcgcagaacgctctccttctcccgatagaagaaccgccggaatttgtcatgttctttctgctttgcgaggattctgcgtcccttctcgaaactgtcagaagccgcgcgcctgtactcagaacggaaaagttccccgcttcattcattgaagaatatctctcgaaaaaatacaaaaacgccgacaaaaagaagctcgaatacgcgtcacatcttgcctcaggctcactcggtcgtgctgttgagctgtacgaaaacggtgacgaggaagcgaagctctacaaatgcgcggaggagctcttatcactgatgctctcgggaaagtcgtcggacggtattctcttcattcgcggaaaaatgccgaaggacagggcggagatatgcgaggtgctttcactcatgcgttttgctctgcgcgatattatagccgataaaaagggcggcgagcttgtgttttacaccgaaataccgtcttttgcgaagaaaatctcgataaaacgcgccgtggagctgtattcggcagtgacaaatgcagaggacgacatcagcctaaactgctcggtaaataccgttctgaccgcgcttatcggagcttaaattaattattacatctactttataaatcaggagttcacatatatggataaagaaaatgcatcttcggtggaactgccggaatcgggcgacatcgaaataatcggaataaggttccgtgacgcgggaaaggtgtactacttctacccgtccggcatcaaatttgaaactggcgactttgcggtagtcgaaacggctcccc

SEQ ID NO: 1712 - DNA, 23238 bp, Unknown
  16S sequences of unknown bacteria
gtataattccactctcctgcatattcatccagctgcccattaaaacctttcttaaaccggtaaagcccgtacatcggaccattttcatccaaattaccggatacaccctgaaagtcgtacagcgtacaacctgtctccactgcccagcggatcatttcccactgcatcagataattgggcattacattgcggtacacattgtccgacgcaccatatacataacaggttttccctgcataattggtagcaatcgcaccgcagacggcgttgccctcgtaaaagcccatataaagccgtgcgtgctcgcccagtgcttttaacatccgcgcaaaatagttcttgggacgaacccggaatccatcccgctctccagtggtctgcataatgcgcacaaagtcatccaggtactcctgccccacaacccgaacttctacgccatgtttcatggccacccgcacattgtatcgggttttttgggtcaaatttgcaaagagctcctcttcactgcggccgttcaaaaacagatggtaattgaaccgggcctgaatggtttcaaaaccttccggcccggcaaaaagcgaaaagcccatttctttcatggtttgggccacctgctcgtctgcggccaaaacttccggatcccatttgagctgataagcgtaatattgttttgccagctgatccaacccgcttttgagttctttcagcagcgggcggttttccagatcgcagaccggcccacggggtgcgtataaaagcgccgctccaatcaccggcagcttctgcaccaataccgcacacccggcgcgaatcttcccggcagcgtcccgtacaacaaccacctcgcctttccagttgttcttcacctggaaccagcgggtagactgggtaaatccgccgcggggatggttttggcagaaagcttcatattcttcgtactgttccggccgcaaaatttctgtcatatgctcactctcctgtatccggcccgccgccggaagcttttctttttattatacgcagatttctctgcaatactttgatcccccggtatccaaacgccctttcttttatcaggcgcggcaaattctcttcccggatcatcccatccagttcctgacagaaagctggtatatcggtccgtttcggcggacgattataagggcaaacctcattgcagatatcgcatccccaggcaaggccgcctttttgcacctgctgctgctcccaatccgtcagttccccttttttctgggtgatgtgcgagcggcatcggcttttgtccactcccgccggggacagcgcacctgccggacaagcatccaggcaccgccggcatgcttcgcagccggattccatcggcatggacggctccagccaaagatccgtgacaatttcagcaataaaatgataggtgccgtaagccggactgattaaaagcccattgtttcccacaaatccaagccctgccagcctggcggccgtcacctcgcggatcggtgaattgtctgtaaaaaaagaaaatgcctgcgcaggccagatttcccgcatctgctgtactgccggagacagcagttcttctgccaatacatgataatcccgggcccaggcgtatctggaaatattatgcgcccgctcgccggcgtagtaccccagtaggcaaacaatcaccgaccgggcgttctgcggcaggcggaccgcggcacggcactccagcaacggcaaagcgtccgaaaaggaagcgactccccagtgatacagtccggcatccgccaaaatcctgccgattttttctttgctatccatcattccgctccggccaaacggcgatcagcgctttgatcggaattccctgcgcttcaaacatatcctcatgctctgtgcggatattccccgaaaaatcgctgtgcgccaaatcccagctttcccagcgaaccgtaaagccgcaatcgagaaaatactgacgggaatggcggaacagcatatcatcatccgttttaaaccagatctccccacccggacgcaaaaaggtcttgtatttttccagctggcggggatgggtcagccgctttttaaaatgtcttggacggggccagggattgcagaaattaataaaaattctctccaccgtatcctgaccggacaaaatctcatcaatgcgctcgatatcataagccacaaggcgcacgttatccggtatcttccccgcctgggaaaacagcgcgtcgatcttgcggcggccaacgcccagcatgttgctgctaatatctaccgccagcaaatttttttccgggttggccagcgcgaactgagaggcaaagcctccctttccgcagcctaactccaaatacaacggctgaggccgtacaaacgcctgctgccactgctcttttagagaagccggagccttaatatacaacggacttgcttccaattccggaaccgcccattttttctttctcattcgcatggatcgtttgctcctttttttcatgctctttttactttaacacagtttttccatcaggacaagcggctccgattgtgtttctttcttcttcgtgctataattttgtaagatcgcaggactggccggaaaatatatcgttcccgtatcgcctgcggcaatctttggggtctgtgcccgggaagaaggatctgttttatgtttaaagccaaaaatctcacgctgatcctcattggggttatgctgttcagccttttgctcaccgtagtgggaattacgctgcccatcagccgaaagtcagacaaaattgaggaagccggcagccagagcatgctgtcgggcgacgctatcgccatcgcgatggggcattacagcgctacttccctgcggctgttgcaggaataccccagcgagtccgccgcttaccgcagcctgtgcggtttgttggaacggatgcgggaacattacggatttcaggatgtttataccgtaacacgcaacaatatggggtatttttatgtgttggactctcaatatgtccaatcgaaaactgaaggataccatcccattggctctgaattttcctttgactcttatggaaaagaggtcaaacagctgattgacgatatctttgacggaaacagtaccggcgggttcgtatccaaagcgattcagtctgatgatggcactttcattgtcgccgccgctccgatcatggacggggacaaggtcctgaccgttttatgtatggatatttctttaaacgatattcaattccacaaactatggtttatcaattttaactatgtctcctggatctgtggaacgctgtttgtcctgtccgccggcgccttgtattacctgcactatcacaaccgccagaaaaagcaaaaagaaaagggcgttgtagatatttccgtaccggatgaaaacaaataatccaagccctgccactcccttgtccagcttagattgtcgctcacggcaatgcgtacaatgccctgttttgaaacgctgcgcacagaaaagtctttccattatgctttggcgctgccgtagagatttttgatctgttctttgtcgtattcttcccacctgcttccagagtctccgccatttaccctttgatacattatttgcaaaaaaagcagaggaacctcctctgctttttctatttatcctttgaccagcaatgccgctacccgctctttatccggcgtgactaccgcggtttcaaatttatcgtaaaccaccttgccaggttttgcgccagaaggttttttgacatttttgataatcgtataatccaccggaaccaacgccgaatcccgggcacggctgtgataagcggcgatcaccgccgcttcttccagcgtccggtcgggaatctcctttccgtccgcaatcacgacggtatgggagcccgggatcttctgggtgtgaaaccacatatcataattatgggcgtcttttagtgtcagccggtcattctggacattgttgcgccccaccagaatggtaaatccatcggaagaacgatattccatcggcgaaagcttttccggctttttgtttttgaccttgcagcttttgatatagccggtttcgctcaactcttcccgaatcgctgccagttctgactctttgactgcccgggccaaagaatcgaataccgtgtccagatactgcaattcctcccggccttgttccatcagctcctgcagtttcttttccgccgtatcctgcttgcggtattcgctgtaatatttctgcgcattctgagcgggggtcaacgacgggtccagtgggatgtccactatcggcatgtcctcttcataaaaattctgcacccgcagcatagactgccctttttccatctgataaaggttcgcatggatcaaatctccgttttgtttgagtctctcccggttcgcgcattctctcagttcttcctcctgcgccgcgattttgcgggtaatccggtcggaagtattggccagcagacgcagcaggtcatgggaacgctgcttcattcgatccatcaggtcccgttcggcataaaaactgtccagcagtgccgaatagctctccatttcccgggcagttagtgcgccccggtattgatgaattggcaaaaatgaaaaatcccgcggctttcctgatggctccaataagatagtgggaaccccgctgtgttcccgcaggcgaagctgcagcatggaaagccactctcccaagcgttgcttttgcagtgcgtccatctcgtccgcctggatattttctccccggatcgcataattttccgcctcccggcaggtcaatggcgacatcccctgcacagtctgaagcagtgccttggcaatttcccgcccgccagacgctgctaccttctctaccacctgttccggctggacatgcagcaaatccagtttatcgctctggggaggcggcaactgataaatcatacccggcagaatttgccgtacactggacatctccgcgtcaatccgtttcaccgcgtcgataatccggccgttctgatccaccagtacaatattggaatgccgccccatgatttccactgcaagcgtcagttccaccagatctcccaattcattgaccgcctcaaaaaccagatgcagaatccggtccattcccacctgttcgatccgaaccaatcgtgccgaccccagatgcttgcgcaacagcatgcagaacatgggcggctgttttggattttccggcgcctccccggtaaaatggatccggggacttcctgcattcgctgaaagcagcagctttccggcgccgcctttccagcgcaaagcaataatgatttcctcccgggttggctgatgaatccggtctacccgggcgtccaacgctttttccgccaactcctggcgcagctgatataaaaacatgccatctaaagccatgatttacctcttttctttccaatggatgcaaatatcttcaatttctctcgccaattcgtaatattttttatattcattccgctttgtattggattttttcaaaccttctgcaattttctttgctatctgtgcctgcttctccagataaatccgcgcttcttccgaccctgtttgaggcatcagccccacccgggcaaataaatcggtaacgtcgcaccgctgcccacaccagcggacctgcatcaccgcataagcgaagcctttgacgatcgaggcccgctcctgtaaaatttcataacctcgttgatacaaccctgcccgcaattcgtgaaccttggtcataggctgaagaacaaaccgttgggacgaatttttccaatcggctgtatccaggatatgcaggatcatgtctcctcccatgccggcaatcaccacatcatccacttgctctgccaaaaggccctgcaagccatcgcccaggaaaagtgcagaacaatcctgcaagccatactgcttcagcgtctcggccgccttttccaatggtttcggatggatatcgcaggcatagccgaatacggcctttctatccagcagtagtcgggcgattaaatagccgtgatcggttcccacatcggcaacacggcttcccggccgaaccaactgcgctgctgctgccagcctttcgtctaaaacaatcacggtcccactcctttgttttccgattgtatgataaagtaacaagcagacaagtactgcgcctcatgcgatgcagagacaatttgtcagcgtcaaaaaggcaaaatgatacgatttgtattatatcctgatatttttacaattttatatgcttgcaaaactgaaaaacatcatgtcccagtttcttctggttataatctcctttggaaaattgacatatgggaatctaaaaattctttctggcgcgggtcaactcaatggcttctttccccgttacatgttctactgcaatttccacgcaacacagatttttcagttcgcggcgaacctctttgtccaccgcttcctggtcttcataatatttaagccccaatatttctgcggcgtgaaaaatttcatcttctttttccaacactctggcttttccaaataggattacacttttaaaataagtggtcagttcctctttcaccacattatctttttcaatcacgcataaggaaactttggcgcaccgcctgatcgcatctaatttgtgaccggatcgggcaccgtgaaaatatacttttccgtcggcgtatacatagttaataggcaccgtataaggatagccgtcatcacctaaaatccccagaaccgctgttcttccagtttttaagatttcagccgtttcctcttggctcaactgttgtttatgccgcctcattttacgaaacattgttttcccccctgccctatgaccaattgtattttttaatgatagcataaaatccagattgatgccattattttcataacattatgcaaaacggtcctgtgccttccgcacaagaccgtttccaaaagaacaggcgtacaaccgtctaaaacgctgcccggcagtatgtcaggcagcagctgatttttgctttacgccaccggttcctcttgatggacataggtctccagtcgtttggccgccagcgagctgacaaaaatcgccgcatattgcagcacagtcaacaacagaattccccaaacgctgccgtaagtggttttcggcatcagcatgaccagcagtacgccggccacccttccgtaatccagaaaaaagcttttgacggtagaaaattctgccgattccgtattggtcgggcaggttttctgtactacgctataataaatcccgttgcccggagagagcaaaaagttattaaaaaatgcattgattacactgaacatcagaatggtaataacgtccatccgcacaaacaggatcagcgtacaaaccagcatcgtcgtcaccccaccggccatgtagcgaatccgattcgatggctttagtcgcttgcccagcacccagtaagcgagaatggaaaacaatccggtcaaaagagtattggctccgatcagcgcctcactttgaatcagttcaaacaagagaatattcaaataaaaagccagcgttccttctcgaatgccttttaaaaactccgctccgactgcctccagcatcagcggattgtggaacgttttatgaaaaccacgcttcaggctcaccttcgcatcaacaatttgatcctgtggcagttttttcaaataaaatactgttattagtgctactgcgatagacaaggcaaacatgatgtaatagcccagcaggccacccaccatcaccccttcacaagcggaaataatcccgcctgtaatggtaggcataatcagatttacaatgccggtacccattccgataaccgacagggaaacatcccggttttcatccgtcgtatacagcggaactttgatacagtagcccatccaataataccctccggcccaggataccagaaaggcgatgaccggcataaaccaaaccgctgcatccatcacgcacaggaaaaaggcatacaaaaaaataaacgtgaaaaatcccagccgcatggctttggtcgatccttttttactggcataatacattgccagcgttgtaccgatcggattgaatacataagtgatcaagttatactgcaaggtagtatccgccccaccggttaaacgaaaaaacagcgtattgatgaatactgtctgcaaattgttaaaaatgagaaaaccaaagtgcagcaatgcaaatgtccgaaaagtttctgttaagcgatccagtcccaataaaccttctgccctgccccacaagcgatcccacccgtttttcatcccaagccctaccttctgttaatatccggcgccccattattgtcctatgacattatagtatgaataaatttccattgcaaccgctaaaaacaacaaaaaaccgccgtgtttttcacggcggttttatcatttgcaataggtgaaaaagggtgattagttttcgcctttcattttcgcaaagcactcgctgcagtatacaggtctgtcctctctgggtttgaaaggaacctttgcctctttgccgcatccagcgcaaacagcggtgaacatttctctttcaggtctcgcattgtttttgcgtgcgtcacggcaagctttgcatctctgcggctcgtttacgaagcctttttcagcgtagaactcctgctcgccggcagtgaatacgaattccgcgccacactctttgcaaataagggttttgtcctggtacatttcttttacctcgcttaatgaattagaatttgcccatcgatataccgcatcgacattgataaacaacgcttcgcctgatattccaagaggcattatacccaatagcctgattgcaggctaacggttcaggaattgctgcggttttgtgctttccgcagtttccggcggattcgctgcagcgcgttatccaccgatttttcaggacatttgagctttttcgccatttcctcgtaactgaaacctttcaggtaaagctggagcgtttctttttctaagggagataaaagcgctatgacctgctcccgcatcccgcgggactcttcttctaaaataaccgccgcttctggcccaatctgctgccaatcggtcggtaaactggaaatttccgattcttccaacgaaacagaatcgtgaaacaagcgatttttgcctgtattctgccgccgcaccgctgaaatcagctgtcgcttcatacaaagcccggcaaaagcagaaaaggggattcccttttccggctggaaagaacgaattgctttcagcaggccaagatacgcctcctgcaaaagatcctcccgttccatacctgccgcacagtaactgctgcacaaactcgtcgccagacggtcgtaacgggtgatcaggtgtctgagcgcttcactatccccgttttgcgaggccagccacagctgctcgtcaagcccactgttttggggcaacccattccttctttccataggcacacgtcccaaatgatactttaatccagtttctttcagtgtataccgctcaacggcaaaagtcaagaaaaatcctgtcgcagcatcccagaaagttctgtgccgggttatcaatccaaaatatccttattctccctccactgccagtccgtcggaagaaccctttttcttctcccgggtcacatccacaatccagcgggtaccgcacagccggatcagtccggcaatacaggtaaagatctcagacgagcgcaggcacagatatactacccagatcggccagtggaacaccagtccggacaaaaagcccaacggcactgacaatccccacatggcacccacatcacaaatcaggacaaaccggctgtcgccgccgccccgcagggtaccaaacatattgatgttgcccattgcctgaaaaatgcagacaaagcacatcaggttcataatggaataggcaatctcttttgtggaatccgtcacattataaaaatccaccataaagcccctgagtcccaggatcatcagcgaagcgactatgcccaaccccagactgatgacaataaaggttttggactgtgcccgggccttttctttctcacctgcgccaatggtattgccggtcataaccgaagcagcattggccgcgccccagatgaaaaaggatgtcatctggaacacgatatcgcaaatgctgttcgctgccactgcctctgcgccaatgcgccccagaaccaccgcagccatagagttgcccagcgaccagaacagctcattgcacaaaacaggcgcgccgtatttcataaacagtttcaccgttgccatatccactttgtgccaaaaatctttgatctgaaaacagattttctgatcgattcggaacaaaaatactgtgataatcgcaaattctaccaaacgggcaatcatggtcgccagtgctgcaccggctacacccatctgcggcattcccagtttgccaaaaatcaaaccataattgaaaaatacgttgaccagcaaagaagcaagggtactgtataaagcaattttcaccgttccaaccgtgcgcagaatactggtagtagtaatggtaaaagcatttgccagataaatgactccgcaataatgcaaatagcggattccttcgtatataatagcctcatcattagtaaaaatccgcatcagcatttccgggaaaaaggttgcgccgatggcaaaaatcagcgcaatactcatggagatgcggtaggtcaggctcataaccttacggatagaatcagcatctccacggccccaatactggctggtcagaacccctgccccgccagtcaggccaaagttaatcatcataaaaataaagcctacctgattggccagcgaagatgcgctcatagccacttcacccagttgtcccagcatgatcgtatccagcatgccaaccgccgatgttaccatattctgcagtgcgatcggcaccgcaatggccaaaaccgttttgtaaaaatttttgtctctgacaatcagactcataaatcctcctcacaccaatggcacccgtcatggaaaataaaaataattcccaagatcctttttcaaaaaatcctctttccaaaaaacaggcagattttttgttttgaccattttgtattgctatacgatcaaaaacaacaaaattattataaaccttagattagctctaatgtcaagaaaacataaagaaaagcgcccgtaatacggacgctttttgtactgattttatacctgttccgcttcttccgtctgaacttcctgcttctcctcatcggttctcgttacgtccttaatccactttccggaaaggatacggaagatacaagcgatcgatttgaaaatatcacccgaacgcaggcataagtacaccagccaaaccggccagtcaagtaccagtccggctaaccatcccagcggcaccgagaaaaaccacatagatgtgacatcgaaaaacagcacatacttgctgtctccaccgccgcgcagagtgccaaacatattgatactggaaattacctggaatacaaccaaaatacacatcatgtccataatggagtaggcaatgacgcgggtttcctctgtgaccttgtaaaaatcgattaccggcccgcgaatcgcaaacatcaccagtgacgacaacaggccaaaggcaatgctgatgacaaacagcgtcaacgactgattgcgcgcccttttgtattttccttcaccaatggtatttcctgccataacgcctgctgcctgaccaacgccctgattaatgaccgaagtgcattggaacactacctggcagatgctgtttgccgcaacaaaattagagcccatatgtcccatgataaccgacagcatcgtactgccaatcgaccaaagcatttcgttgcacagtaccggcgcgccatagcgcatataaattccaagaatttcccggtcgattttctggaaaatatcctgcacttgaaagccaattttcttatcaatacggaagacatataccacaataatcatacactctaccacgcgggcaatcagcgtggcaatcgccgcgccgacaattcccatctgcgggaagccgaaatggccgaaaatcaagcagtagttaaagaatacgttgacaaagaaggaaatgatatacatatacaacgtgatttttacggtccccactgtccgcagaatgctcatggaagtcatcgtaaaaccgctgaccagataagtaaatgcaataatccgcaagtactgggcgcctgcctcaattacttctggctcttttgtataaaaactcatcagaatatccggaattgtcagcgccaaaatggtaaaaatggctgccaacgtcattgaaattttataggccatactcatgaccttgcggatggaaaccgaatccttccgcccccaatattggctggtcagtacccctgcccctgcggtcagccccaagttcataatctgataaatgaacccgatctgatttccaagcgaggaaccgctcatagccacctcgcccaactggcccagcatgaccgtatccagcaggctaacgcctacgttaatcagattttgcaatgccagcggaattgcgatcgccgccattttttgataaaacgatttttcttttacccaaaaactcacaaaatctcctcctttttcgatatttacccatctcttatgtagcttttatttgttttgtcattttataacattataatacgagttgatagcttatgcaatactctgatttgtcaaaaacaaaatttgtgtaaaatattttttatatcaaaagaaatcaacaaaatctttttatctgcataaaaagctcttgattttttttcttttttgtgtataataaatagagcaatgccggtatgatggaattggcagacgtgctggactcaaaatccagtggtagcgataccgtgtcggttcgaccccgactaccggcaccaagttaaaagctacattttgagagatcaaaatgtagcttttttgtttttaagcagaatgacaccctccatgctatacttttagcatagaggggttttttatgataccaaaaacgattcttttctctcacaagcaagaaaaattgcgggttgcagcttactgccgagtcagcacaaatctcacgaacagctgagaagtcttgaaatacagaaatcttactttgaaacaatgattcaagaaaatccagactggcagtttgtaaaaatttattccgatgtcggttctgctctaagaaccaaaaacagaccgggttatcatcagatgatcctagatggaaagaagggtctgttcgatttcgtcctagtaaaatcattaagtcggttcggacgtgataccgtcgaaacattaacacagataaggaagtggaaacaaatgaatattggcttgtatgcagaaatggaggatattgataccatgaaggtgaatgacagcgcactcagtattttccttgctatggctcaggaagaaagttgcagcaaaagcgagaacattaaatttggcattcgagcacgtatgcacagcgggaaaaccattctcagccacagtcaatttttaggttataccaaagaaccggatggcgtgctgattgttgtccctgaagaagccgaaatcgtacgcaaaatttttgatttatatttacaggggaatggtgtacggaaaatcaagcgatatctggaggagcatgggataacgacagcaacgggcaaagaggtttggagcacatcgaccatagaccgcatactcagcaatgagaaatacattggtcaggtattgatgcagaaaacctatccgccggactttttaaccgggaaacaagaaaagaacggcggcgctttaagtatgtttctggtagaaaatgctcatgaagcgattattgacaaggagacttttatgaaggtgcagcaaagaaaaagcttttctttgtcaaccccataaattcactcttttatgtatgtttccaactgccatttttttattttttcaataaattctacctatgcttttccgctttccaccaaatattgccgactaaaaacaacatactattctgtaataagcgcggaaacaactgcttatccaatgaaaaataaatcggtaatgaaaacgctatcctaataagtccattcttccgcttatatccttcccagaagtttttatttttctgaggatacccatgtttttacgaaacaaaaaatctctgcggaactttccgcagagatttttgcagcacataatttgtgaaaatatcgattaaccttttacagcaccgatcgtcaaaccttttacaaagtacttctgaacgaacggatagagcagcaggatcggaccagtggtgatacaggtcattgccatcttcatggactgctgcggcaggttcgcagattcctcgttcaacaggtttactttacccatggataccagttcctgcaacgcctggatactggacagcatctcatgcaggaagtattgcaggttcttcatgttgttcttgttcatgaacaacatacagttgtaccagtcgttccagaaagtcagcgctgcgaacaggctcaaggttgcgatcaaaggctttgccagcggaataaccagtttccaataaatggtgaagtcgttggcaccgtcaactttcgcagactcgataatctcgaaaggaataccgcccttcataaagttcttcgccaaaatcatctgccaaacggagaacagcatcggcacaaccagcgccagatagttgttcttaaagcccagataacgggtacacatcagataccacggaaccagaccaccgttgaacaaagtcgtgaagtagaagaagaaggagaagccgtttctccacggaaagtcttttctgtgcagaacgtaaccggtcatagtagacatcagcacggaaaggacagtaccaacaatggtagcgataatggtgttacgataggcaaaaccgattctttccggattttccaaacaggttttgtacgcttccagcgtccattcacccggccagaaagagtaaccgttgcgcataatgttcgcttccgaagtgaaggagttcataacaaccagcaaaaacggaaggaagcaaagcatgccccagatgaaaaccagcacataacccagcagtttaaatgcggccaagtccgcctggaaaattttattctttctcttcatgcgattaactctcctttctgcaaatttcgattagaacagggtgtaatccggctcaatgatcttaacaatcttgttaacaatcaaaattgtgataaagcacaagcaggactgatacaaacctgcagccgaagacataccgtagtcatttgtttgcatcaaggaacgataaatgaaagtatccaaaatgtcagcagctttcaggataaccgcgttgttaccaaccaactgatagaacaaaccgaagtcgccgcggaaaatctgaccaacagccagtaatcccatgataaccatggtcggaatcaggctgggcagggtgatatggcggattctctgccagatgtttgcaccgtcgatagaagcggcttcgtacatgccctggtcgataccggcaaccgcagccagataaacgatacagtcataaccaaccatcttccacatcttaaagaagacaagcaagaccggccacccgtcggggctggcatagaagttgattctctctgcgccgaagaattcgatgatatggttgaagataccatattcaaatccaaaaatcgcctggaaaatcgcctgtaccactacccacgaaatgaagtaaggcaggaacataaaggactggaagatctttttgaacaccttgttggtcagctcattgatcatgattgcaaatgcaaccgccataagcattcccaggaaaataaacacgatgttataaagcaaggtgtttctggtcagcggcccgagtttgttggacacgatgaggaacttaaagttgtcgaatccgacccacgggcttccgtaaataccatcgacatagttgtactttttaaacgcaagtacgataccagtcatgggtatgtaggagaagatgataacgtaggtcaatgcaggcagcaacatggccagcaggattttgcaatcccaagcacgttttaaaaagcgtttgaagttcgacggcttctgccactttacttcagcggcctgcggagcttccctttctacagtttgcgctgtgtttgccattgtgtaacctccccgaaatagaaatgaaccggaaatcccgaaaggctgcccgcgcacgctttgtctattttaaccaagcggatgccgtttcacgggctattatgtagagatttcgattgcataagtaaattatacttgcttttttacatcaaaaatcttaaaatagttgtgatttcattaaagattttgtcatttatctatgacaaaatacacaaaataagattgttaaaattatcgtttccagtaaaaagggagaaaaatatgttaaaaattttaattgttgatgacgaagcgccaaccagaatgcgaatcatcaaggggattgactgggaagaatttaatatttcgcagatcatccaggcagaagacggggaggaagcgctgcatttgtgcgatacttttatcccggatatccttttgaccgatgtgcgtatgcccaaaaccgatggcattgaactggcgacccgcttgacgcagcggtttccgggcatcaaaaccatttttgtcagcggatatacagataaggagtattttaaaagcgccatccgtctgggggcagtgagttatattgaaaaaccggtagatttgggggaactcaaggatgtgttggccgaaacggtcagtgctttgaacaacgaccggtctaccgcacataagatcaaggcatttgagcaaagccgcaatctgcaaaaactgatggaagttgcaggcgagctgtgccagcccagcttttataatgaacagctgctggaagaattggtgccggaaattcgcagtgcctctttgtttgtcaccgtcgtagccaaaattgccttttcctccggcagttctgatttgagctcttttattccctttatgtttcaaagcatctatgaaatcagcgatgtgtacgatgcgcccagcctttctcctctgtgtacctgtaaaggcaaccatattatcatccatctggctggacagtccaccggctcgaattttaccgattataaaatgattgatcaatactgtaattttgtggttgataagctgtccggttccggaatcaattcagtagtcgccgttggaacggtggtcagcagctggaaagagctggctcgttcttacgaaacggcagtggtcgcagtacagcaatctttttatcaggaaagcgacagcgtctgctactataaaaaaaccggtgccagcacctatcagttcacacccgagcaggtggaaattttttctcaaacgctcaaaaagcaaaaccgcaaccatgctcttttgtatatccataaccttaccggcgaaatcaaacagtttcaaaacaccctagtcatcaacgtgctgcgccattattacgccttaatttgcgaactgatgcacttggcacaggacgaacagatcaccctgtacgaaaaaatcgggaaggaacaggatgtgtgggtccacattcagaatttctccttcatcacgcagctggaagattttcttgttcaggggattaatcagtattacgattcgctcaacgaaggaaaatacggcaacacaaccgtggatcggatcgtcaaattcattaagaacaattacgcaaatccggacctgtccattactgccatcagcgaatataccaatctctctcccacttatatctgccatctgtttaaggatacgaccaaaatgaccatcaacaattttatcctgaattatcggatgcaaaaagcacaacagcttttaaaagacccggtctgcaaagtcaaggaggtaggctttctggtagggtaccgcaatgggaactacttttcttatcagtttaaaaaattcacgggtctttccccgtcccagttccgggagaaaacaatatgagatggatcaaacgcctgtttcactactgccggaaccgctttcgctactccaattttttcacaaagatggtagcgttatttttggtggctgcttttctgccgctatttgtctgttcggcctttctggtaaccgacaccatccgggtttccggcaaaaacaccgccgcctccatccgcaacaactttcagcagacttatacctctctggaaaaccgtctgacacaggtaaaaaaatgcgccgacctgcttttgaacgacgcaggtatcaacgattttctgcgcaacggcaaaaatgaaacgactttttgggagcagcgcactttcaagaccgacatggataataccatttcctttattgaaaatgcccagaatatcaaacggctgcgggtttatgttgaccctgcctatttctatattctggactcctatcattactgtagcatgaacctgttaagcggcctgtcttggtttactcctctgcgcttggcaaaaggccggtccatctggctttcctctcaggaaaacgaccttctggatcaggcacagaatattttgtccggccacgacaccctatcttatatggtaaagggcgtcgatctgactgatatgggccggaccgccgtaatctatcagctggatttttccaaaacggaagtggaagaacagttgcgcagttcgttggtgctggacggaagctgtgcttttatcacagatcaaaatgaccgggtgatcgcccacgcgtctcttggtgaaaggaatatccagcttgatacactgtcggactacgccgaccaggataccatttcgtttgacggtgtccgttatcggatcagctgcgctgatttcgaagtggccccttggcggttggttaccctggtgccggatgaaagcctcttttcttattccgatttggatcagattctgctgtttatcctgctggcctttatcgccggaactgtaattttcacctccaccctgcgattttctaaaagagtcactcacaaaatccgttcggtcgttgacggaatggaggcagtgcgcagcggtgaatttgtgaatcttccggtcaccggaacacatgatgaaatcgacgatttgatcgatcattataactatatggtggatgagttggagttgctggtcgaggcaaaatatctttccggtgtggaattgaaagcggcgcagctacgagccctgcaagcacagatcaacccccattttctctataatacgctggaaatgattaacagttatgcttttttggaggatcctcaaaaagtagagcagctggtcagcgccctttcgcgcttttataaattgagcctcaaccatggcaaagatgtctatcaactatggcaggaactgaagctggtggaggcctattttgagattcagaaaatccgctatcctggctgtctctccttaaaaattgacgttccttcctccatgatgcagtatgccattcctaatattaccctgcagccgctgattgaaaacagtatctctcacggcattatgagccggacggataaacacggaagcattaccattgtcggccgcgtgctggaaaacaccatccagctgcaagtcatagatgacggtgtcggtatgacggcgcagacagttgaacagctcaattcgggaaagccgccggaggatgtggaaagttccggcagccgctatggtatttacaatatcaatgagcggattcaaaactattatggatgcgattatcatttacattttgagagcgttcagggcaaaggcactaccgtaaccatcactttgccgcccatgtaggcgaaaaaataaaaaaaggccgggctggattccggccttttttgctgcaaaaaacagaacaaaaaggacatggccgctttccgcggcccatgtccgtaaaatcttggtgtgtgggcggtcctagcccatatccacaaaatttcacttctttttacggtcgctctcgtctgtatttccagcagtagtcatcattccccgcaccattatgccggatggaccattggcaggcgtttctcacaattggcaccagctgggcgcctttttctgtcaaacaatactccgcccggggcggcacctcgttgtaagcgcgccgatcaatgatttgtgcatgctgcaatgccttcagcgcattggtcaaagccatatcggaaatatgagccattctctgcttcagttcactatatcgaaccggttttcattcagaaagggcacagatcagcatacggttccattttccgtccataaaatcaaacaacttttccacatggcaacgtgtatcttccatttttgtacataagctttctccttctcttcccgtgcgctccccgcaaaccatccatgactgccttcttccatcttgcagccttattttgccgccggattgcactttgcgattttcgcagggcacaccccgccgtccggacttttgctcttgttaaaaccaatttaccataaaaagctaataattgttccgcttcctttgctccatacaaattgagtatctcaatactttttgagtcacttcacaaacagagccccgatcattgtaataaagacatgcttttgtatcaattaaaaatgaggtgaaaacatgaagcttgccattatttatcattctgaaaccggaaacaccaaaaaagccgccgaatttgttctcaaaggaatgcagcgggtagaaggaatagaagcaaaggccttttccattgacgctgtggacgaagcatatgtgaaagaggccaaaggcgttgtcttcggcgctcccacctattatgccgataccccctggcagatgctgtaaaaaaacagagaggaattttcccctctgtctttttttatctatattcctcaaaaacggcttaaatgctgaacaacaaatccccataggtcgggaacggccaatagctttccgccgtgttgagctctaattcgtccgccacggcgcgcagttcctgcatcgcagcaaaaaccgtatcgtgataataagcggcacagcaaccgatctcttcaaaatctttcgcacccaacaacgcttcatccagtgtattggctttaccgaacaaagaagcaccgagcgaggacagcttttcaatcaaagcctcctccatttcgcaggaggcggccgggcaggccgtttttttggcaatcaccgtttcgctgagttccttggcataagcgcttaccgcaggcaaaatctgtttacgggtcagctccagcatggtcagcgcctcaatcccgattaccttgcagtatccctccattttgatttcgtagcgggaatgaacctctgtttcggtaaaaatacggtgcttttgaaataattttacatttttttcatccgtcaaatgcgccagcgcatccggagcggatttcagatttaacaggcctctttgccctgcttccttctgccaggcgtcggcatatccgtccccgtcaaaaataatccgtttatgttctttcagcgttttctgcagcagcgtgtggaccgctccctccagatcttttgcctcctccagttcactggcaaattcatccagcgcctccgctacgatggtgttgagcactgtattgggttcggataccggctgggcggaacccagcatacggaattcaaatttatttccggtaaaagcaaaaggagaagttcggttgcggtcggtagtgtcttttgtcaaacggggcaacacatgggcataccgcagcaggccggaatcggttttttcataggatttgttgttttcaatcgcgtccagcaccgccatcaattcatcgcccagatacatggaaacaatggcgggcggagcctcgttggcacccaggcgatggtcgttggcagcgctggctaccgaaatgcgcaaaagatcctgatgctcgtcgaccgctttgatcaccgcgcacaaaaacagcaggaacatggtattccggtttggttcgtcggtagggtcgagcaggttgatccctgtattggtggtaattgaccagttgttgtgcttgccggagccgttgattcctgcaaaaggcttttcatgcagcaggcagaccagcccgtggcgctccgctacctttttcatcatctccatagtcagctggttctgatctgccgcaatattgctggtggtataaacaggcgccaattcatgctggccgggtgcaacttctttatgctccgttttggcggagatgcccagcttccacagctcatcgtccagttcctccataaatgccttaacgcggggattaatcgcaccgaaataatgatcgtccagctcctgacccttcggcggtttcgcgccgaacaaagtgcgcccggtaaagcgcagatcttttcttttttcatacagatcttggtctatcaggaaatactcctgttcacagccgatgctggtcagtacgcgggtcacatctgtatggccaaacagttttaaaatccgcagagcctgcttgttaatcgcctccatcgaccgcaacagcggagttttttcgtccagagcctcgccggtgtaagcggaaaacgcagtggggatacacaaagtattatctttgataaaggcataagaggtgggatcccaagcggtataaccacgggcctcaaacgtagcgcgtagcccgccggaagggaagctggaagcgtccggctcgcccttgaccagctctttgccggaaaactccataataacccgaccgtcgctggtcggggaaatgaaactgtcgtgcttttccgccgttacgccggtcatcggctggaaccaatgggtaaagtgggtcgcgcctttttcaatcgcccagtccttcatcgcgttggccaccacattggccactgacggatccaagctgcgtccctgcgcgatagtacggttgagcgctttgtaggtttctttgggcagacgctgctgcatcactgcgtctccaaataccaggctgccaaacatttcggggatctctttcatcatcattacctcctgattgcagaccaatatggtttttcatgatggaaaacaaaagtagcaaagggcaatcctcctgccgcttcttttatggcaaaccctttgcgaactgccaaccgagcactttgccccgccggctggtctgtttttttgcaaggccataaaaaagaggcgccatggacttttcatccacagcgcctttgccgttttccgatgtccgcattataatccctgtctcttatacacatctccgagcccacg

SEQ ID NO: 1713 - DNA, 14998 bp, Unknown
  16S sequences of unknown bacteria
aaatcacatcctgctttctgttcaattatacaaatagtatagcaaaaaacaagtaaacattcaatgagaatctggcgacgaaggaaggtgtagctggataggaatcagaggagaatatgtgcgagaatcaaagatttttaatctgaacaaatgaacatgcattgattttgctcaaatatactgttatactttaagtagaatatatttttgtatacctatagaaaaggagttctttatgagcgaaaatatcaccatgcccgcagaggaggagatttactatctctcggaattctataaagtgtttggcgattccacccggattaaggtgctttaccttctggtcaatcgggagttatgtgtaaatgatattgccaacgagcttgctatgaccccaagctccatttctcaccagctacgtgtcttaaagcagcaccgtctggtaaaattccgccgggacggcaagactgtctactattctctggctgacgaacatgtggaaaccattctgaaccagggactggaacacattgaagaataatgaatacagatagaaccggtcgttttctgaccggttctatttgttcttctttatttgtaaggatgttcgatcagactgaaatctgtgtcaagtgcgtccagcatgaatgtctgcattcccagatcctgcatccactttttatttccgtaggatttccagacctttttccggcagatctgttttaatttctgcatatcaacagctgtcaggctaccttttccatatgctctgcgtagtgcttctcgcatctcatccatcagaaaataacgcagtccatcccagttgtcttctttcatattttcaatatatccttccagcaaaaacggcaggaacaggatcagtccgcattcttccagccgaagtggcgaataattttccatggttatgatccgtgtaggcagcgtgacccgtgccttatccggaaactccagcgtcgtgctgtattcttcctgatggttttttccgaaataaataatctgtggttctcgaatatgtaccacagaacgtcgcacggaccgtccccaagcaaatacactgcctctgtcctctgcatagatctgtgtgcatccatccagtctccgcacctgaaattcatatcggtttgtctcccccactttcagaccgatactattcgccctctgccattctttccagatcttttcttcatctgaataagctgtatgaaacaactgattgatcatttggatcaatgcctgactggacagatcaaaaatcaactccagcatccacccgttttcttctatgtacatcttgcttcctccctctgcttatttgcaaatacaggtatccacatgcaaaccttatacatttgttctgccattctgttctgtctttaccgggaattcttcgtcacagaatcgtgactatagattgttctcagatgtattcattttataagaaaagttgttttttgtcaagctgtttgtcgtttgagtttccatagttttatctttcaatgtataaaaatttcacaattaaaacacattcatttcaaatttctcacacattattcctctaaaatatttcatgaaatttatattatataatgatgttatagagatgaaggaggaatagcgtgaaattaccggatattgcaagcaagatcaaactaccggacagaaagaagaaaaaatggattctggcaggtggagtgctggtgctgattgttggtggactgggaattcattcctacagtaaggcaaaggcagcaaaagaaaaaatggcagcaatgagtcaggtggagaccacacaggtgaccagacaggatctggtggattccatcagtgtgacgggaaccattgccagtgcggattccagagatgtgtcggccattgcatccaatgtggaggtacagacggttaactacaaggtgggggattatgtcaatgcaggagatacggtggtagttctggattctacagatctggaactgaagctgacagaggcacagaataatcaggccttgagtacatacaacgaaaataaatccatcgagacggcttctgaaagttatgaacaggcagtggaagatggaacggatgattacagcaaagcggtaaaaaatgaggcacaggcaaaggaagatctacaggatgcagaaggagatctaagctctgccgcagaggctttaaagagacaggaagaacgggtatctgaattacaggcatcttatgatgcgcagacagatgtagcgaagaaggcagaactggagacagagttaagcgcagccaaggctgaatatacatcgagacatcaggcttatactgctgcaaaggaagcagaagaaaaagcttcagatgcatatgagactgctgctgagaatctggagacagcaacgaaacagaatgaccgcaacatcagtaatgcagcggattccctggaaaaagcacagatgcagaagacgtactccaacgacagcagcgatcagagtattgataattatcaggaacagatcgaggcatgtacagtaacggcaccgatttccggtgtgatcactgccatgaatgtagaggaaggtgatacatatctgggagaagggaaagctttgttcacgattgcagatgagcagaattacattgtatccgccagcgtggatgaatatgatatcagcagtatcagcgcagatatgacagctgctgtgattgtggaagctctgggagaggatgagcttgctggaaaagtctcttttgtatctccggtggcaacaacttctaatacaggaagctcatcttattctattgagatcgcactggatgagcctaattcaaatctgcggatcggtatgactgccaaagcaagcgttgtcaaagatgctgtctatgatgtgctgaccgttccttatgactgcgtgacagcggatgaggacggtaattcctatgtaaatattgatcagaatggagagaagacacaggttccggtgaccgtaggcatggagagtgattactatgtagaaatctctggtgatgggattgatgaaaatacaaaagtatattacaacactccgctgatcaaccaggaatctaacggtgaagccggtgatatgcaggatggcatcaccttcgacatgggcggaggagcaccaggaggcggtggagcaccgggaggcggcggaacaccgggaggtggcagatccagtggcggcggtccgggcggattttaggccggaggtgtaacatgacgaaacaacatacaatgattgagttacatcatattattaagcgattttatattggtcagcccaacgagctggagatccttcacggtattgatctgaaggtcaacaaaggcgaatttgtatccattgtaggttcttccggatccggcaagactaccatgatgaatattatcggaattctggatcggccgacagaaggcgaatatatgttggatggcgtggatgtagctggtgcaaaggacaaggaactgtccatgatccgcaatcagaagatcgggtttgtatttcagacctacaatctgatcagccgtaccagtgcattgaaaaatgtagagcttcctatgttatatgcaggtgtaggaaaaaaggaacggaccgagcgggcaaaagaattactggctatggttggcatggaagaacgtatgacgcacaatcccgatgagctgtccggtggacagaagcagcgtgtagccattgccagagccatggccaatgatccttctattatactggcagatgagcccactggcgcattggattccaagaccgggcggatgatcatggatatttttcatcgtttgaacgaggaacagggaaagaccattgtactgatcacccattcgcaggagctggcagaggagactcagcgggtcatcaccttgaaagatggactgatcatcggtgaaaggaggggaagcggatgctgatcggagaaaatatcctgctggcacttaatggtctgcgggcaaataaaatgcgttcccttctgacgatgctgggtattattatcggtatcgcatctgtaattgcgatcatgacactgggagattctatctccagttctgtaacggagtccatgtcctctatgggtgccaataacgtgacgattggcgtgtctcagaagagtacgacggaggagactactgccagcggcatgacattttccgcgggaccaagattcacgcagatgtcagaggatgattacatatcagaagagatgctggatgatctgcaggagcgttatacggattctattcagggattttcactggaggaatctgtgggaaacggaactgcccagtcaggaagcagtacggcctatatcagtgcgatcggtgtcaatgcagacaatctggaaaatgcagacctgacacttctggcaggaagaacactgaccagccaggatcaggacgaggcaaaaaaagtgattctggtatctgatcttctggtgggaaaattattcaatggtgacaatctgtcagcagtaggacagaaactggatgtattgtttaataaccgatattacagctacaccatcgtaggtgtttatgaatatgaagaaagtacgttttccagcagctcttctgaagatacagtaaccaccatgtatctgccacttcagactgcattggatcagacccacaacaggaatggatacagtcagctgacgattctgacaaaagccggagtcagtgctacagatttctgcaccacgatagaaacttacatgaataaccgttactataaagataatgacagttttgagatcagtgccatgagtatggagtctatcgtagagagtatgacatctatgttgtccacggtctctcttgccatcgcagctattgcgggtatttctctactggtaggaggcatcggtgttatgaatattatgctggtgtccatcactgagagaacccgggagattggaacgagaaaagcattgggagctaccaacggttccatccggttacagtttatcatggaagcaatcgtactgtgtatcgtgggcggtatcatcggaatcatccttggaatggccattgcaacagtggctaccaatatgatgggatatgcagtcagcccgtctgttacaggcattgtgctgtcggtcagcttctctatctttatcggtgtattcttcggatattatccggccaataaggcagcgaaactgaatccgatcgaggcattgcggtacgagtaaaaatctggaaaaataaggaatggtagacataaaatcttcggttgaaaaagagaaatatctatgatattctgataagtaagcggaggttttacatatgaaattcaagaggatatgttgtgtggtaatggcagcactgatgatgatcagcgggatgaccgtatatgcgaccaaggcatcagagatccagagccagaaaacacagaatgaaaaagcattgaaggatgttcagtcaaagatcagcaatctggagagccagagaagctctctgagcagcgaggtcaacagtctgaatgacagtctgacggacaccttattgaatattgaagtgctggagagcgatctggcagacaaagaagtagagattgaacaggcacaggaagattatgaggcggcaaaagccacagaggataagcagtatgcttccatgaagacacggatccagtatctgtatgaatccggtgagaccagctacgtggaactgctgctcacatccgaggatgtgggggatttgatcaataaagtagactatgcggaagaacttcaggagtctgaccgccgtctgctggatcagtataaagcggccaaagaggcagtagttgaacttcagcagcagctggcagaagagaaggaagagcttcaggagatggaagctcagttggaggaagaaaaagcgaatctggagtctgtgatcgcacagaagaaaagtgagattgcagattttgacagtcagttaagtacggcgaaggcgaaggccagtgaatatcagaagaagatcaaggagcagaatgcccagatcaagaagctgcagcaacaggaagcagcagcggcaagggcagcagccagtgcatcatccaagggcagcaatagaggcagttcctctgccgcaggatcttccaagccaacaggaactacggcaacagtttccggaggcagcgggacaggtgcggctattgcgtcttatggattgcagtttgtaggttatccgtatgtgagcggcggcaacagtctgactaatggtacggactgttcaggttttgtgaatctgatccatgcacattttggcatctctaccccgagacagtccggtgcgctggcgggagcaggaagagccgtcagcgatgcagacaagctgccgggtgatgtggtctgctattatggtcatgtaggaatctacattggtaataatcagatcgtacatgcaagtactgccaaaactggtattaaagtcagcaacatgtattacagaagtatcagttgtatccgcagatactggtaacacgaaaacttttcacttaagcaaaaaaaatttgacaaacgataattgaaaccttatcatgataaccgatacataatttcatgtatcggttattttttatttgaggaggaaactattatgaaaaaattagtaagtcttgcacttgcagctgtacttgcagtttctgcagttggatgcggaagcagcagtgattcttcaagcagcactgctgacagcgcacagagcactgaagcagcagctgatggagcaacctttaagattggcggaatcggaccgatcaccggaggagctgcaatctatggccaggctgttatgaatgcagcacagatggctgttgataagatcaacgctgatggtggaatcaacggatatcaggttgagttccgttttgaggatgatgagcatgatgcagagaaatctgtaaacgcttacaatacactgaaagactggggtatgcagatgctcatgggtactgtaacctctacaccgtgtactgcagtatctgctaagacagaagaggacaatatgttccagctgactccgtcaggatctgctgtagagagtattgcaccggcaaatgcattccgtgtatgcttctctgacccgaaccagggaactgcatctgcacagtatattggagagaacaagctggcaagcaaagtggctgttatctacaacagctctgatgtatattccagcggtatttatcagacatttgcaacagaagctgcaaaccagggatttgagatcgtagctgctgaggcatttaccgaggatagcaagactgatttctccgtacagcttcagaaagcaaaagaagcaggcgctgagcttgtattcctgccgatctactacaccgaggcttccatcatcctgactcaggcaaataccatgggttttgatccgatgttcttcggatgtgacggtatggacggtatccttggtgttgagaacttcgatacctctcttgctgaggatctgatgctcctgactccgttcgtagcagatgctcaggatgagaagactcaggcatttgtaagtgaatacaaagagaaattcaatgacactccgaaccagtttgcagcagatacatatgatgcaatgttaatcatcaaagaagctgcagaaaaagctggtgttactccggatatgagcgtatctgatatctgcgaagctatgaagactgctatgactgagatcacctttgatggtctgaccggtgagggaatgacctggagtgctgacggtgagccggctaaggcaccgaaggctatgaagatcgtagatggtgcttacaccgctatgtaatgtgaactgcgtgacagttgcggcttaatagccgattagaacagagacgttctgataaagggcgtctctgtattttttacagttgggcagatccactgtaaacacaataactattaagaggagttgaataagtatgagtttcgtatcctacatattaaacggcatcagccttggcagtgtgtatgcgatcattgcactgggatataccatggtatatggaattgccaagatgctgaacttcgctcatggtgacatcatcatggttggaagctatgtggcattccttgccattaacagtatggggctgccggttccagtagcaatcgtgctgtctgtgatcgtctgcactgtccttggtatggtgattgaacgagtggcatacaagccgctccgtcatgcatccaaactggcagtactgatcacagccatcggtgcaagctatttcctgcagaacgtagcgcttctgctttttggtgccaataccaaatccttcacgtctgtggttggaaatgcgtctgtccagctggcagaaggtctgtcagttacagttgtaacgatcgtgacagtgatagcctgtgtgatcatcatgatcggactcatggcatttatgaaatattccaaagcaggtcatgctatgctggcagtatctgaggatgacggtgcagcacagctgatgggaatcaatgtgaatgcgaccatcgcgcttacctttgcaatcggttccggcctggcagccatcgcaggtgttctgctctgctccgcttacccgtccctgacaccgtacacgggatctatgccaggtatcaaagcattcgtggcagcagtcttcggtggtatcggatccattccaggagcttttatcggaggtattctgcttggaatcattgagattctgggtaaggcatatatttcctcccagctggcagacgccatcgtattcgcagtgctgatcgtggtactggtagtaaaaccaaccggactgcttggaaagcagatccaggaaaaggtataagggaggctgcaaacgatgaaaaatatgtcaaagacaacaaaaagcagtctgattacatatggtctggtcgtactggcttatgtagtggctgagatctttatgaaaactggtcacatgaccagcctgttaaaaggacttctggttccgttgtgcgtatatgcaattcttgcagtatctctgaatctgactgtaggtatcttaggagagttaagccttggccatgcaggatttatgtgtgtgggtgcatttaccagtgcagtatttaccaaatgtatgatgcatacgatcacagttccgacggtccgttttcttctggctctgctggtaggtgttgtatgtgcaggcatctgcggtgtgctgatcggtattcctgttcttcgtctgagaggcgactatctggcaatcgtaaccctggcatttggcgagatcatcaagaacctggtcaatgttatttatcttggaagagacagcgcaggatttcatttttccatgaaagatatcatggctttgaatatggagcctgatggggaagtgatcattaaaggagcacagggtatcaccggtgcaccgacagattccaactttacactgggaatcattctgctgctgattacgttatttattgtactgaacctgatccattccagagcaggacgtgcgatcatgtcgatccgtgacaatcggattgcagcagaatctatcggaattaacatcaccaaatataagatccttgcattcagtatttctgcagcactggcaggagccgcaggtgtcctgtatgcacacaatctgtctacgctgactgcactgccaaagaacttcggatacaacatgtccattacggttcttgtatttgtggtactgggtggaatcggaaatatccgtggatccatcattgcagccgtggtactgacattgcttccggagctgctgcgtttcctgagtgactatcgtatgctgatctatgcagtggttctgattgtgactatgatcctggtatggagcccgggcggaatcgcatttcgtgaaaaactgggaaccctcagcatcttcaagaagaaagagaaggaggtacagtaatcatggcaatgcttgaagtaaaaaaccttggtatttcttttggaggtctgcgtgcagtagacgatttcaatctgtccattgaacagggacagctttacggtctgatcggtccaaacggagctggtaagactactgtattcaatatgctgaccggtgtctataagccgaccgatggcaagattttcctggacggtgaggatatcaccggaaagagcaccattgagatcaacaaagaaggtattgcgagaaccttccagaatatccgtctgttctctgatctgtctgtacttgataatgtaaaggcaggtctgcacaatcagaaagaatatgagtattccactctgaccggaatccttcgtctgccccgatatcatcaggcagaaaaagctatgaatgaaaaggctatggagcttctgaaggtatttgaactggatggagaggctgattataaagcatccaaccttccctatggtaaacagagaaagctggagattgccagagcactggcaaccaatccaaaacttctgcttttggatgagccggcagccggtatgaaccccaacgagacaaaggaattgatggagaccatccattttgtgagagataatttccatatgacgatccttctgatcgagcatgatatgaagctggtatccggtatctgtgaaaaactgacggttctgaactttggtcaggtgcttgcctgtggcgagacctctgatgttcttcggaatcctgaggtagtcaaggcatatctgggtgagtagaggaggaaagacaaatggcaatgcttgaagtaaaagacctggaagtctattatggaatgatccaggcactcaaaggaatttcctttcaggtaaatgaaggagaggttatcgctctgataggtgccaacggtgctggcaagactaccactcttcatacagtatccggattactgacaccgaagcatggaagcgtaacttttgagggaacggagattacaaagattccggcacacaagattgtggaactgggaatggcacacgtaccggaaggcagacgtgtatttccgtccttaagtgttctgcagaatctgaagcttggtgcttatacaagaaaagataaagacgagatcagagagactctggagatggtatacagccgttttccacgtctggaagagcgtaagaaccagccggcaggaactctctccggcggcgagcagcagatgctggctatgggacgtgcactgatgtcaaaaccgcggatcattctgatggatgagccatctatgggtctgtccccgatcttcgtaaatgagatctttgacattatccagaaggtcagtgccggtggaaccaccgtactgctggttgagcagaatgcgaagaaagcactttccattgcagaccgcggttatgtcctcgagactggtaaaattgtgctggaaggcaaggcaagcgaacttctgaatgatgaatctgtgaaaaaagcatatcttggtgaataaccagaagtaccaaagacctgtgtcagaagcatgggtctttttttcgtgaaaataactagaaattttagaaatgctatgggaatatgcagcagaatgtgataaaatagcactatcattacagaaaaccggactaatttgcggtttccggtaaaaggggaaggcatatggaaaagaaagaagtaagaccctggtgtatgatcacagagatggatcagtatctgtttggacagggaacccattatgagatctataaaaagctgggtgcacatctgactgagtatgaaggtgaaaagggtgtgtattttgcagtctgggcacctcatgcaaaaggcgtgcgggtggttggcgaatttaactgctggggcagtgacggatatcggatgaaccgactggaaccgctgggaatctatgaggtatttgtacctggtctggaagaaggctgtatgtataaatatctgatcgagacggaaaaaggggattatctttacaaggcagatccatttgctttttatgcggaaaagcgtccgggaacggcttcacgtgtggcggatatcagtggatttacctggcatgatgaccgctggatgacaaagcgtgcgggctggaatgcagcagaatctcccatgtctatttatgaggttcatccaggttcctggaagcgccatcctcatgaggaggacgaggatggattctataattatcgggaactggcagcagagctgacagaatatattaagaaaatgggatacacccacatcgaattgatgggaattgcagagcatccatttgacggatcctggggttatcaggtgacaggctattttgcaccgacctcccgttatggaacgccggaagattttcagtacatgatcgactattttcataagcataatattggcgtgatcctggactgggtaccggctcattttccacgtgatgcccatggacttgccaactttgacggggaagcactgtatgagcatccggacagcagaagaggcgagcatccggactggggaaccaagatctttaactatgaaaaatcagaggtgagaaattttctcattgccaacgccctgttctggctgggagagtatcatgttgatgggctgcgtgtagatgcggttgcttctatgttgtatcttgactatggaaagcaggacggacagtggcttccgaacaagtatggcggaaatgaaaacctggatgctgtctggttctttaagcacctgaattccatcgttcatggccggggagacggctctatgatcattgcggaggagtctaccgcatggccgggtgtgaccaaagatgtggatgatggcgggctgggctttacctttaagtggaatatgggctggatgaatgatttcctggagtatatgaagctggatccatatttccgaaaagataaccataacaagatgactttcgccatgagctacgcttacagtgagaattatattctggtgttgtcccatgatgaggtagtgcatctgaaatgctccatgctaaataagatgccgggttatttggatgataaatttgcaaatctgaaggcaggctatacttttatgttcggtcatccgggcaagaagcttttgttcatgggaaatgagtttgcgcaactccaggagtggagtgaggcgagagagttggactggttcctgttaaaagaggacaggcatctgcatatgcagaattatgtacgggcactacttcagttatataaaaaatatcgctgtctctatgagctggatgacagttgggatggtttccagtggatcaatgcggatgacagttatcgaagcatcttcagctttgtccgttacagtaagaccaagcgaaagaacctgttgtttgtcatgaactttacacctatggagagaccggattatcgggtgggtgtgccgaaaaagaagaaatatgagctggttctggactctgatgcagaggaatatggcggcagcggacgtaagcgtgcaaaagtgtacgatgcaaagaaaggaagctgtgataatcagaaatattacgtagaatatccgctgtcagcatacggaactgcagtctttgagttttaattcttaggttttttataatattttcttaatgatttgttcacagaatggacacaaattcgttgtattctttttctcgtaccaaaaaagaagccaacgaggaggaagattattatgaaaaacaaatggcttgtattatgttgtgttggaatgctgactgcattcgctatgactggttgcggttctaaagatgctgcagctgagactactaccgaggcaactgaggaagtaaccgaggaggctactgacgctgaggcaactgaggaagcaacagaagaggatgctaccgcagaggaagctaccgaggaagaagcaactgctgaggaggctactgaggcagacgcaactgaagaggatgcaactgctgaggaggataccgaggctgctgcagacgagactgctaccgaggataccgaggctgaggagactactgctcagtaaggattatcttacatatgacaaaaaagacattggccgtctggtcaatgtcttttttatgttatgcgtgcgcccggcggcgtaccgcttaggattattctcctgcaatcacttttggaatcttatgcatatctgcagcaatatccgtgaatgaactgaaataacttccgatgatctttctggtggaagccagacagtaaagatccagtaaagcatcatgcatgccgtctacactgtctcgacgcagacaccggtcttcgttagagaggatacgatccggaaatacttctcgcagagcagcttcttcctgcttgtcatcagtggcaagatagaacatggtgtcagggtccgcttccaattctttcttcatagaagtgataaaggcatccgtagagctttttccaatagctggctgattgtccgtccggcggatgtggacacccacacaggaagatccaaactttacagtcatggcatcgatccgcgcctgcagccggtctgttgggacaaacagatgatagtcttcggatggatagaaccactcccaggtgaagatataggtcttgcctgtgagtgtagccacataggctggatccaggataccatctgcattgcggtgtgccaggatctcatcgttggtcagatagtggcgggccgtcttctggtgaaacagtttccgcggatctgccacggagtggatgctggtgatcttaaactctttcacaggctgaaacagagattcaaacggacagttaagctctgcgttacaattccagaggactttgagctggtcatggcgttcacgtgccagtttccagccggaattaatcacccgcattctattgcataaaccgccggaaggttgtatgattatcattgaattacctcgcttatactaaagttaaaaagagtatagcacagaaaggtcaggaatgaaagttttacagatcagcaccgtatgcggcagcggcagcgtagggcgcattactgtggatatttatcatacattggaaaaacagggggatgactgcctcattgcctatggcagaagaaccgcgccgaaaggtgtacatgcattttgctttggctctccg

SEQ ID NO: 1714 - DNA, 3452 bp, Unknown
  16S sequences of unknown bacteria
cgatgtctaggccgatgttgcggtcgacaacgcggaagggaatggggttggcggttccgaatttgttgtcgatgatttcctttgtgttgaaataatacacccgctggtccttgccggtgtctccgccgtatgtaaatctttttccgacggtcttgaaggtttcgagcagtcccttgccgaagccgccggtgaaaatgctgggctcggtggaggagtcataggtaaattcgcccggctcggcgcagaattccacaaccttgccctgctcaacgatcatcatgcactgtccatcggccacggcaatacccgagccgttggaaatgatgttgtcgttgccctttgtgtttgacgagcgggacgaggtgcgcttttgacccttaacggcgagaaccgatttgtcaagagcgtcacagtagaaaaattctttccattgatcggccagcgttcctcccacggcacctgcagctgcttttataagacccataataatacccctttcatacttcctattatattaaattatttagcatttatatgcttttttattgcgtcgaaggattggtcggaaataacgtgttccattttacaggcgtcctcggccgcctgctgctcgctcactccgagcccggtgagcattttcgtcagcacggtgtggcgttcgtatatctttgttgccacctgttcgccctcctcggtgagagttaaaaagccgtttttgtccatgaggacgtaaccgccgtttttaagcagacctattgcgcgggaaacgctgggctttgaatagcccatatattcgccaacgtcaatcgagcgaacctgagggtgctttttggacagaacaagtattgtttcgagatacatctctcccgattcgagcaaagccatttttcacagctccttatcaaaaaattaaaagaccgaaagccgtttgtttttcggcatattttcagtcggcgcaaagctcggccgcaaggctttcaagctgtgctttcgaggtgtcgttcaaggccgatttgatttgaacggttgtttcggcaaactcaaggtttttgcagccggcgagcatttccttcatggttttggccgccgtgggagcccatgtgccgttttccacaagaccgattttgcggtttttaaagccgcgctcggtaagatggtttataaattcccgcataaaggggaaaatccctgcgttgtaggtggtggtggcaagcacaagtctgtcatatctgaaggcgtcctccaccgcctctgccatgtcctctctcgcaaggtcggcgacgacaaccttggggcagcccttttgctcaagctcttttgcaagaagctcggccgcctgctttgtgttgccgtagaccgaggtgtaggcgatcatgaccccttcgctttcggcgcggtaggacgaccagatgtcgtaaaggtttatgtaatatccgagattttccttaagcacgggtccgtggagcggcgcaatgatctctatgtcgagagcagaggcctttttaagcagattttgcacctgcataccgtatttgcccacaatgccgatgtagtagcggcgggcttcgcaggcccagtcctcatcaacgtccaaagcgccgaatttgccgaatccgtcggccgagaaaagaaccttgtctgtgctgtcgaaggtcactatgacctccggccaatgaaccatgggggcggcaatgaagttcagagcgtgttttcccagctcaagggtgtcgccttcggcaatgacctttttgcagtcggaaaaatctctgccgaaaaactgctccatcatggtgaaggctttggccgaggcaaccacctttgcgtcgggataagcgttcaaaaagttgacgatgttggccgaatgatccggctccatgtgctgaacaacgaggtaatcgggctttctgccgcaaagagtctcttcaagatttgcaagccactcttttgcgaagtttttgtcgaccgtgtccataacggcaattttgtcgtccaaaatgacataggagttatatgccatgccgttttccacaacatactgtccctcaaaaaggtcaatgtcgtggtcgtttactccgatatatttaatatcctttgtgatttccatgtttgcacttcctttacagagaacattttaccatatttatatttatattgcaacaaaaaagcagagggaaaagcgcaaagcccttccctctgtgtcctgtctcaaaattatttgttgacagcgtctttgaaagcggcaccggccttgaaggcgggaaccttggcggcagcgatcttgatcttttcgccggtacgggggtttttgccctctcttgcctcgcgcttgcgagcctcgaaggtaccgaaaccgatcagctgaaccttgtcgtccttggcaacggcttctttgattacatcaagagtggcgtcaagaacctcgccggcctccttcttggaaatgttggccttttctgcgattgcatcgatgagttcctttttgttcattttcattcactcctttcgtttgatcaagagggaaaatccctcaaacaccaaacgttagtttggtttgcaaatatgataatagcataaacccgaattaaaatcaacctattatccccatttttgttgaatattaacggttttgtgagtctgctttttattaaattgcgctttttatttacaaataagaaataaaagcgttgcgatttccgcgtaaataaaaaatactttactttttcggtgtgaaatgataaaataaattttcggagtgtgattatatgaaaagcttggaagaatacgttttgacaatacccgatttcccgaaaccgggaattatgttcagagatctgacctccgttctggccgacgccgacggatttcatcttgccatagatacccttaaaaaaatgcttgagggagtggatttcgacgttgtggtcggtcccgaggcgagaggttttattctcggttccccccttgcctatgaattcggaaagccctttgttcccattcgcaaaaagggcaagctccctcgcgacgtcgtccgtcaggaatacgatcttgaatacggcaaggccgaaatcgaaatgcacaccgattccataaagccgggtcaaaaggtcattatcgttgatgaccttatcgccacgggcggaacgaccgccgccgccgtaaagcttatcgagcggctcggaggcaaggtaacgaaaatcctgttccttatggagcttgccgggcttgagggcagaaagagccttgagggatatgatgtggaaacggcgatagtttaccccggaaaataattcggccgacaaaatcaaaaatcttaatataaaaaagttaaccccctgcgccgcctttcggtaacgcagggggtttttatcgtcaagtcaaatcaaatcagtctttaacgatgggaagggtgattttgttaaccgaagcctggagaattgccagagcgtcggtaa

SEQ ID NO: 1715 - DNA, 14741 bp, Unknown
  16S sequences of unknown bacteria
gatctgatgtttttgaatcttttggttttacaaaagaagaaagcggtattataacagatgtattgctcaccgcagatttatatggatttgaaagccatggtatgcaaagaatggtgagatatcataagggaattgaaaaaggaaccattcatccaaaagaacagccggaaattgtgtttgagacacctgtatcagctgtagtagatggacataatggtatgggacaacttatcagtctgtttgcgatgaataaagcgattgaaaaggctaagaagacaggaattggtattgtcagtgtaaggaattcaaaccactttggtattgccggatattatacaaaaatggcatgcgaccaagggcttttaggcatgtcttgtaccaattcagaagcaattatggttcctactttcggaaaacaagctatgctgggttccaatccaattgcagtgtctatgcctgcagaaccttatccgtttttctttgactgttccactacagtggtaacaagaggaaaactggaaatgtacaataaatctggcacacctcttccggatggttgggctcttgataagaatggtcatgcttccaacgatgcacctgatgttcttgccaatattgtttccaaaggcggtggcggcattatgccgttgggtggctgcgaagaagttagcggcagccataaaggttatggttacggcatgatatgtgaattgttcagttccattctatcattgggcgttacttccgatcaatgctgcacattttctgataaaacaggaatttgtcatggttttatggcaatcgaccctgcaatattcggagaccctgaaaaaattaaacaacacttctcagactatttagaagcagtgcgtgaaagtccaaaagcggatggtaaagatagaatttacacacacggtgagaaagaaattctggctgaaaaagacagaagagaaaacggtatccctgtaaatgataatactatggtagaacttgcaaatctatgtgaatatttaaaacttgattttgcttcttactttaaaggatacgaattaccaaaagacagcaaattcttctcaggcaactattaattaattggaggtcaatcacatggattatgcaaaagaatctttaagattgcataaagaatggaagggaaaaattcaagttgtaacaaatgtgccggtagaaacacaagatgatctttctttggcgtatacaccgggagttgctcaaccttgtctggaaattcagaaggatatcaatcaatcttatgaattaaccagacgttggaatatgtgtctggttgtaacagacggttctgccgtactgggtcttggtgacataggtcctgaagcaggtatgcctgtaatggaaggcaaatgcgtattgtttaaggcatttggcgatgtagatgcttttcctctttgtattaaaagtcaagatgttgatgaaattgttaataccatttatttaatttcgggctctttcggcggcgtaaacctggaagatattgcggcaccaagatgttttgaaattgagaaaaaattgaaagaaaaatgcgacattcctattttccatgatgatcagcacggaacagcggtaattacattagcaggattgaataatgctatgaaattagtaaaaaaacaaaaagaaaatgttcgtattgttatcaatggtgcaggtgccgctgctatttcaatctctaaattgcttttaaaagccggatatccaaatattactttatgtgacagaaaaggtgcgatttatgaaggccgtacagaagggatgaatgcggtcaaagaagaaatgagcaaaattacaaacttggataaaaaatcaggaagccttgctgatatgctggttggcgcagatgttttcatcggtgtctcagctccaggttccgttacaacagaaatggtaaaaagtatgaccgatgatccaattatttttgcttgcgcaaatccggtaccggaaatttatccggatgatgcaaaagcagcaggagcaagaattatttctacaggcagaagcgattttccgaatcaaattaataatgttttggctttccccggaattttccgcggagcatttgatgtacgcgcaaaagatattaatgacgaaatgaaaattgctgctgcggaagcattggctaatctcatttctgaagaagaactgtcacctgaatattttattccaaaagcatttgataaacgtgtaggtcctgcagttgcaaaagctgttgcagatgcggcaagaaaaacaggtgtagcgagaatataaaaaagtatacaagtgtgtttttttattaagaatcactgtaatcaaactgaattacgatatgaaaagaatgcttgaaaaatataatagtatattgtattttatcaatcctctttaaaacaaaatgagaagaacaatcttacaaggattgttcttctttattttgcaaaataaaattgtatgaaataaaacattaacataactccggttatcaatataaagtaaacaaatttgaaaaagaatattttgatttctttttcataatatcttgaagaaaaacgattgttatggtatagtttaaacacattacaaattacattgtgttgtataaacacaccaacagagagtgcaaaaactctctgtttttcttattggataattggggggaattttatgaaattaatgttcaagtacattatgaaaaataggctgctcatgacattcaatattatagggttgttttgttttgctctggtagaactcggaatacccacagtggtatctaaaattattgatgatggtatcgcaaaacaagatattgcctatgtttggtggatgggacttattattctaattttggctcttataggcagtgcgggaactgtactcctgatttatgcatcctcaaaaatttcaaccaatgcggccagagacatccgcaatgatattttctcaaaatcacaaacattttctcatgccgaatatgataaatttggaatttcgtccatgattattcgaactaccaacgatgtgtttcaattgcaacagtttatcaatttggtattgcgtacagcattgttaacgccattgatgattgttgccagcatttctatgacgctatataccagtacgtcattgtcaacggtggttggaattgctattccgattatgctggttgcaattgtaattatggctgcttttgtaaagcctatttctgaaagacagcaaatgtatttggatcgtttgaatcaagtatccagagaaaatttaacgggtgtccgtgtaattcgtgcttttagaaaagaagaatatgaaataaatcgttttcatgaatctaacaaaaattttacgaaagaaaccaagaaaatttttaaattaatgtcgttatctcagcccagttttgtgtttttactgaattttgctgtactgggtgtatttattgtatccagcaatttaatcaatacaggttctttagaagtggggcaaatggtcgcttttatggactatcaattccataccatgttttcgtttatgttatttgcattggtgttttctttatatccaagggcacgtgtatctgccgcaagaatttccgaattattgaaggaagaaccctctattcataacgaagcaattgatacagaaatacacagcgataagattggtacattggagtttgagcatgtatcatttacatatcagcatacgaaaaagccggttttacatgatattacattttcagcaaaacggggagagaccgttgcaatcatcggtagcaccggttgcggtaaaagcacattaattcaattaattccaagattttatgatgtaacagaaggcagcattaaaattgacggtgtggatgttcgcaattatgatttggaaaccttgagaaataaaataggatttatcccgcaaaaaacaattctattctccggaaccattgcggacaatatgcgttttggaaaacatgatgctaacgagaaagaattgatagaagctgcaaaagtggcacaagcgtatgatttcattatggataagcctgaccagtttgatgaaatggtttacgaaggcggaaccaatatgtccggtggtcaaaaacagcgtatgtctattgctcgtgcagttattcgaaatcctgaaatttatatttttgatgacagcttctctgctttggattttaaaacagatgcttctttacgcgcacaactaaaagaaattacaaccgattccattgtggtaatcgtagcacaaagaatcagttctattatggatgccaacaaaattattgtgctggataatggtgaaattgtaggatacggcaaccatgcagatttgattcaaacatgtcctgtatatttggaaattgctgaatctcaacttacaaaggaggaattggcaaaatggaccaaataaaatcaaaaaagcatgtattttctaaattatttcctttttttaaaccatatttaattcctctgattggtggttttgtgcttattttcttcgcggctgtatttacagcggcggcacctatcaccgaaggtttaattaccacccaattgaccagcgatgcaaaagatataattgcccatgttccgggagcaggcgtcaattttgagtacattacttatgttctttttgtgttggcaggtttctatattgccgccgccgcatgttcttatgcttacaatttctgtttgaccaatgccattcaaaacgctatgtttgatttgcgcaatgccattgaaaagaaactgcaaaaacttccggtatcctattttgataaacacgcttacggcgatattttaagccgtattaccaatgatgtagatacattatcaaacgctttgcagcaaagtttacctcaaattgtaaatgccatttttgtcattatatttgcctataccatgatgtttacaattaacgtttggatggctttgattgcactgatactgattccgggtacatttttcctgtctagatttattatcaaaaaatctcaaagattattccaagcacagcaagatgcgttgggaaatttaaacggtacagtacaagaaaaatacacaggtttttctgaaattaaattatacgggaaacaacaagaagccatccaagaatttcgtactgcaaatcaaaaagtatgtgaccatggttttaaagcacagtttatatcaggtttaatgtctccattgattgcatttatgacatatttaattattggttccatcgctgtttttggggcaatcaacgcaatcaatggtgtaatgacagtaggtaatctgcaagcgtttatacgttacatctggcaaatcttccaacctctttctcaagtaacacagctttcagctacgatacaatcttctgttgcagcggccacccgtgttgctcaaattttaaatgaggaagatatggtggaacatcaaacttctgaaagtttgaaaaacgcaaagggtaatgttacatttgagcaagtatcttttggctatacccctgataaagtatttatccatgacttaacatttgatgccaaaagtggtcagaccgttgcgattgtaggaccaacaggagcaggtaaaactactattattaatttgctgcttaggttttatgatgttgtgggcggctgtatcaaaattgacggtgtagatattcgagatgttccgcgaagtgagctgcgttctaattttggtatggtactgcaggatacttggctgtttcacggaaccatctatgataacattaaatatggcaaagatgacgcaaccgaacaagaaattatagaagcagccaaaattgcaaatgtacatgattttattatgtctttgccagatggatatcaaacgtttattaatgaagaaggaacaaatgtctctcaaggtgaaaaacagttaattaccattgccagagcagttttggcagatccatcaattttaatattagatgaggctaccagttccattgatactcgtttagagaaaaaactgcaaaaagctatgcaaaatattatggttggacgtaccagctttgtaattgcacaccgcttatcaaccatacgaaatgcagacttaattttggttatgaaagatggtcgtattgcagaaaaaggtacgcatgatgagttattaagtcaaaagggaatttatgaaacgttatataacagtcaatttgcagaagaaacgactgtaaactaaaaatagccaagcgttcgatatggaacgtttggctattttttgttatttgattaagtaaaattcatttttatgataagaaatcatactctctttttgcattttactcaattcatttgataatgcactgcggtctaccgataaataatcggccaattgctgacgattaaaaggaatgagaattctctgcgagttttgtttcatagattgtgcggataaatatgaaagaattttctctctggttgtttttttcataatatgttccattttttgtgtcagcataacattttttctggaagtgatggcaagtaaatttcgaattaactgattatgtgaagggcaagttagatgacaaatacctgtaatttccgtaatatttaaaaataatacattgcagggttcatccgctataagagaaatttccagtttttgttcgggaatacaagcatatgcttcaccaaacagttcaccttgatgaatttcgttgatgataaatcggtttccccaatagtcatccttcacaatcatcgcttttccttgcagcatcatgcccatagaatttgtcacattaccgtaacaaagtatcatttcacccttttgaaactttacttcttttgcttttagacactttagtaatttatcaaattcacaatcttcaattccttgaaaaagaatgctttttttcagtaaattcatatatttcatatcttaaacctcttatagtgttgtaaaaacaacatactttccaattatagtttagtataatgcaaacagtaaagtcaagacatgtattttatttgataaacaggaccttaaggaggaatgagtatgaacccatatttttctttatctgaaaaagtatatgatattacagaacgttatcctgaattaattgattttttggccgccaacggatttggaaaaatcagcaatccgttgatgcgtaaaaccattggaaagcaaatctctttggaaatggctttcaaaagccgtcacgtggattctgacgcaatggaaaaacaattggtagaagtaattgaaaacaatgcaaacggagtgtccaaagcagtttctgatacgccttcccacatctcaaaagagaagtgtgcaattcaaatagaagggatattaccttgtcctatccgtttgccgcttatggatgtatttgaaacatggcgtgatacgcatcatatggatgtgaattttgatttacaatctgcgagtatgggactggattggttgcaagaacgcattgaggcatgcaaagacgaaacagaactagccgatgtttatctttccgcaggttacagtttgttttttgattacaatgtattgggaaaatatcgagataccggtatttttaccgattctgaccgtacaatacccttaaaagaaatgtttgataacgaaaatatttctttaaacgacccgaaccatcagtatacggttgttggtattgttcctgcggtttttatggtaaataccgaagccttgggagaacgtccaatgccggaaagctggagtgatttaatgaaatctgagtatgaaaataccattgcttttcctgtacaagatttggacatgtttcacgctttattactggggatttacagcaaatacggcacggatggtctttacagattggggcaaaatttgatgcaaagtatgcatcccgctcaaatggttaaaatggggaaatccaaaaaacaaaaggaaattccagctatcaccgttattccatatttctttgcttgtatgatgcaggaaaccaaaggaatgcagttggtttggccgaaagacggtgccattttaaaccccattttcttattggcaaaatcgtcatccaaagaaaaagtacaaccgctgattgagtttattctctccgaagaatttggcaaaacgctatcttctgacggaaaattcccgtcaaccaacccattagtgaatgactgccctgaaaaagaacggacatttatatggccgggatgggacatactgtatcatgaggatattcccactttattaaaacaggcagaaaatgcattctttcattacgaaggaggaaattcatgaattttattgttttttcaggtccaccgtcgtccggtaagacttctgtcattttaaaaactatttctgcattgaaacagcaggggatttctgtgggagttgtaaaatttgattgtcttcataccgatgatgacaaactatatgaaaaagaaggcgtgcttgttcgaaaaggattatcaggtgccttatgtccggaccatttttttgcttccaatatcgaagaagtcgtacagtggggaaatcaaaatcagttggacttattaattacggaatcggctggactttgcaatcgctgctctccatatttggcagaaatcaaaggtgtttgtatcattgataatctttcaggcatcaacacacctaaaaaaattggtccaatgctgaaatcagctgattttgtagtgattaccaaaggggatattgtatcacaagcggaaagagaagtatttgccgcacgtgttactgcagtgaatccaaaagcagtagtcatgcatgtaaacggattaaacggtcaaggcgcttttgaattaagtaccttgttgtatgataaaaatcaaaatattcaaactttggaaggtatgaaacttcgtttcccaatgcctgccgcactttgttcttattgtttgggagaaacacgcatcggaaaacaatatcaacttggaaatgtgcgtaaaatgaattgggaggaagagaaatgatgaagtatactaccatatctgaactcttagcgcaatatccgtttttacatgatttttttcagcaaaatcgtttggatgtttccaaagcgatgaatcaaacaatcggtgaatatatagagcatatcagtgaggaagaagcagaagagaaagccattcacaaagaaaatctatttgaagaaatgaaggagtacattgcacaaattcaatcttttcttggaatagaggaggaagaaagagtacactcgctgactattttaccgggacaaaccaaatacggagaaccggaacaatttggagaattaaccattgctgcttctcaaattgtttccattgtagggcctaccggttccggcaaaagtcgtctgctggcagatattgaatgggcagcccaaggtgatacgcctacaaaaagacgcatcttaattaatggggcaaagcctgataccaagtggcgtttttcctccaataatcgtttggttgcacaattatcgcaaaatatgaattttatcatggatttaagcgtcaaagaatttttggaaatgcatgcacaaagtcgtatgattgaaaattctgttgaagtaattgaacgtattatgcaatcagctaatgatttggcaggagagcgtttttctcccgatacgcccgtaaccggtttaagcggaggtcaatccagagcattgatgattgcagatactgctattttaagtgcttcgcctattgttttgattgatgaaatagaaaatgcgggtatcgatagagaaaaagcgttaaggttattggtatcggaagataaaattgtattaatggcaacacacgaccctttgcttgctttaatggcagaccatcgtattgtcattaaaaatggaggtatccacgaagttttggaaacaactgaagaagaaaaggagttattaaaacgccttacaaaaatggatgctgccatacaagaaattcgccaaagtctcagaagaggaaatatactgacgtccgcccaattgttataaatcgcatcattaaaaaagacaaatgccttttggagcatttgtcttttttagttacacttttaaatcgtaaactccggttactgtatatcctctgtcgtttaaataatcttgaatttgttgccctgtcacacctgtcgtgtcgtaatctatgccgactctatgctctttttggttcactgaaacggataaaacaccgtacaacgtgtccaatccttttttcatttgttttaaatcatgcttgtcctgcacattttttacttcaaagtacacgctttgcaacatgcttatcacctcattaaaagtatgagcttatttctgtttctgtatacgtacatcaataagattatttttcaaaatttgcacatgctatattcaggtgaagatagtgaattattgtatgtactgtaaatatgcaaacggtgttattgcatatagaagaattggaaaacgaaaatatgaaaaagaacctgtactttggtgtgaaaaacacaaaaaatctgttttatgtacggaacagcatccatgttttattccggaatatattccatcccaaaaatgaatctatgctcacggtatcctattaccaacatataatgggtgtatggagggattggaacatggatttaaagcacaaccagattaccatgcgggaattgctcagaaataaacaagcgtatttgcttctttataaagaatttcctatgtttatgacacctgcaattctccaaaatatcagaccgcttacactgcagcaaattatccaaatggttcgtccgtatatttccagaccaaaattaaatatgttattagagcagttggaaaatatttaaatgattcataacgaccccttgtcgcttcataaactgaaatgatagggagggggtcacacaatatgaatgaatttcatcaaacttttatcaagaggccggtatcaaaggaaaacactcctactgaaacaaaaatgaaaacagaatttcaagcttctgaaccatatccgccaatcgattgcagcataaaaaacagtatgtacgccagaatcatgttggataatatggcggggaatcgttctgaaatgtcagctatcagtttgtatacgtataatcaattgattactgacgagcataaagagattgctgaaatatttcataaaatcagtattgtagagatgcatcatctttatatttttggtactttggccagacaattgggggccgatcccagattatggacatcgcgtcataacagagcagtatattggtcacccggatttaatcagtatcccaaagcacttccgcaactaatagaacatagtttacaggaagaacagtttgcagtagaaaagtatacaaagcaaattaatgtaataaaagatgaagtaattattcataatttaaaacgtattattcttgatgaagaactgcatgtaaacatattagaaaattgtttgaacacatatcagtgaattaaaaacagtaggagattcctgctgtttttattttggaaaaaatttcaatttacaaaggttggtttgtataaatatatagaatcatcccataatattgttggaggtgatttggatgagtccaaaagaattaaattatattgaagatgcattgggtcatgaacaatttttaaaaacacaatgtcaagaagctgctcaaaacttacaagatcctcagctaaaacaatatgcgcagcaattggctgataaacaccagcaactttttaatcaatttatgcaattggtttaaactcaggaggtaagagtaatggatgataaatgcttaatggaaaatatgcttttgacgaccaaaggtgtatgtgatttgtatatgcatggaaccattgaatctgctacagcaaatgtgcactgtgcatttgataaagctttgaaagattctttgactatgcaggatgatatttataaaaaaatggctgcaaaaggttggtatccttctgaacaggcagagccacaaaaaattcaaaaagtgaaacaaaaatactctgcaaatgctacaaactaatatctctccctattaataaacaaataccctgattcgtaaaaataaagttttacaaatcagggtattatttttacatcgtacatgcaacgaacatgcgtaccctcgaataagatgtataaatttcaatggagaaggtgtttgtattgataggcggttttttatttgatttcatatctgacttgatattttttattcttcatgtaaccggttcgggttcatttcccaaaccgttaagtgcaaaagaagaaaaagaatatttggaaaaattgaaccaaggagatcaaaatgctcgaaacacactaattgaacataatctgcgtttggttgcacatattatcaagaaatattatgcaaattccagcgatcaagacgatttgatttctataggtacgataggactgataaaagctgtagattcatttgatacgggcaaaggaattagactatccagctatgcggcacggtgtatagagaatgaaatactgatgtttttccgtactactaagaaaacagcgcaggatgtttctatgaatgaaccaattgacactgacagggatggcaatgcattgacgttaatggacaccatggcttcagaagacaatatggtagaaaatatagataataagataaaaattgaaaaactaaaatcatatatggaagaagaattatctccaagagaacaatccattatttgtttaagatatggtttggtacccggtagcaaaccgttagcacaacgggaagttgcttctgctttgggaatttcgcgttcctatgtcagcagaatagagaaaaaggccctttcaaccttaaataaacgtttttcaaaatgattacatagcaaagagattcttacaaggaatctctttttatttttctaactcaacaagggtttccaatgtatttgcaatgttacacaaatgcattgagagaacttgcaaagaagtacaataaatatactggggaagaaatcaaacttactccacatattttaacatacttattgtacgaacatggcgaacatgggaacgcaaccaaacgcattagtacgctatggggcataaaaatatcataatgacacctggacattatgcacatggaagttttcaaacagtacaagcagaaatataacgattattcatagtataaatatactactgaatttaagcagtgaaaaagtagaagtttaagccaaatcataaaaaattagtttttgtttactgttaaggaaaaagagaaaagagacaaaaaaatgtctcttttctgtatggtttattctgatttatgattctgttctgtactttcactctcatgcggttctgcagtaacagaagcttcttgtttggtttccgtctgcacattttgattttgttgtacaggaggctgttgctgtaccggaggttgatgagaagccaccggttgctgctgcggagcatatggagttaccggacgttgaggtacataaccaccttggaatacaaattgattgccgcgtgctaaagtacgagtatttagcatcataatgccgccgataatgccaatcacaccaccaaagatgatattgagtacaatgcttgtaatatataagccggaagaatcgattttacgcaagactgctgctggatttctaaagatttcctttgcataaccaaaatgaatgacagcatatataatattaatgatagcagcaactaataaaaaagaaccatatacgatacctcccaccccaggatcggtgtcatagtaatatctatataaacgaccgctgatagatgaactggctgctgcgccaacacaaacagtaataataccgataatggcacataaaattccccaaattaaccaaaaaactgcagcacttttaatctttgaagcaacttgctgtaccataataaattgcgcttggtttggctgttgaggatgaaatcctcctggttgttgtggtggaacagtaccgtaattttgatgatatgtatttgtgtttgaatttgaagccggcggctgctcttgaggtattttcgcaccacaattttgacagaaagccgcatttcgttctgtagcagcaccgcatctggggcaatatttactcataactataccttctttcttatatatatatttattatactatattcatctaatatcgtcaatatcacaagtttattgacaaaaaacagataaatttctcaatattcatacaaaaatctatttttttattcataatttcgtaatgaataatgattcatgcgcaattctctcacaagttcattgtgtccaaataaaaaatttagtataataacatcatcataatattggtggagaatacagatgatagagaaagcttatgaaattttaaaaacttactttggatacagtgaatttcgatacggccaaaaagagctgattacaaatttaataaatggaacagactgtgtcggaattatgcctactggagcaggaaaatccatctgttatcaaattccggcaattttgatggacggaatcacgttggtaatttctcctctgatttctttgatgaaagaccaagttcatgccttattggaagcgggcattcccgcagcatacattaacagttcgttgaccccggcacagcaatataaagtaattcaaaatgcaaagcagtataagtacaaattaatttatgttgccccggaacgtttggaattggatttttttcaggaatttgctgcttccaccaatatttcatttgtcagtatagacgaggcacattgc

SEQ ID NO: 1716 - DNA, 3228 bp, Unknown
  16S sequences of unknown bacteria
agcgtgacaggctagcgttctaaccagctgaactaccgggccaaatttctcaagcatcaaagaataaatctttgcgatggtgggggcaacaggactcgaacctgtgaccccctgcttgtaaggcaggtgctctaaccagctgagctatgcccccatctgatttgcgtctcgtttgacggcgatatgtattttactataaaacctctcttttgtcaacaccttttttaaaaaaaacgtaattttttatttgggttgttttaattcttaaagtgaattataatttcgttttcttttttgttcacactaaaaaataaatttaaaaagctctaattttagtattgacttttccgaccgttatggtataatcgtagggcaacagaatttaggggtgtagctcagctggtagagcagcggtctccaaaaccgcgtgccgggggttcgagtccctccacccctgccacagaagtgacggtttttgaaaaccgtcttttttgttttttgcttttcttttctcattattatctcatctcttaatttgcactttccgacacacaaaaatcgacgggatgaatttcccgtcggtttcttattcatataaacaaagctcttgtatcgcttatgcaaagatatgctgttattttttatatgttctgttttaagtaaatcacctttaaaaccttttaatctctttgcctttcttttttcaaaagcacaaagcggcggctttgctacgccccgatgaaaaggccgtattttttctttattctttcaagcttttgcccaaagggctttgccagcgcaagcaggaacaggacatttgaaacggcatattccgcggttacaggcagcgccgtcaaaacagcggcggcatatcgggagaaattgaagctgccgtcggcccaaagcaccgtccaaacatccatcaaaagagaaaaaagcacacccgcaaaggctccgtaaacgcaaaggcataccttgttttttttcagcgtccgagacatcagacccgccaaaaagcccaccattccccaggcaaacatctggaagggagtccacggcccctggccgaaatagaagttggaaacaaaagccgacaacgagcccaccatgaatcccgagctgctgccgagccaaacggccgcaatgacggtgattgccgtcacgggtttaaagcctgggagccacgcaaaaacaaaacgtcccattgccgaaagagccaccataacggccagcacggtcatttcacccgacgcggtatttttcctttcaaaggtgaaaaagaccgccgcacaggcaagcaccgaaaggcacagcgcaatccacacatagtggcgcccgcgaaaaagcaacgcaccgcccgcgacgatcaaggcggcggcaattaccgaaaaaatctgccaaaacagggttcttttcttattcatcgcatcggtctcccttttttccgttgaggcggcacagctttacggcatcgtcacaggtgaccgcgttttcgaatatccccttggtaatgcggcttgcggcggtggtataaaaaatgttttttgagaaaaaggccgagggaacatcctgcgacacgatttttccgttaaaaagcagcgcgcacctgtcggccgacacggctgcaaattcagggtcatgggtcacggtaacaagagtcataccgtcggatttaagctttttgagaatttccgcaagacggtttttgccgtgagcatcaagaccctttgtgggctcgtcgagcagcataattttcggctttaaaagcagcagctttgcaagagccgctttttgctgttcaccgccgctcaaatcatagggatgtctgtcaagcaaatcggatatttccgcaagctttgcaatttcgctcacggcggtttcggcttgttcggatttgagattcataagtcggcaggtttcaaaaagctcctcttttacggtgtttttgacaaacaccgtttgcgggtcctgaggcagcagcgtgagatttcggcggtaaagcgatttaccgtcgattttctttaagtcgctgttttgaacgatcaccttgccgccatacggccgcagaacacccgaaagtatcccgagaagggtggttttgcccgcgccgttgccgccgagaaggcaaatgtgctcgcccttatgcacatcaaggtcaagctcctttaaaacatcaggctgctccttttcatatctgaatcggacttttttcagcgacaggattttttcggttttaggagtttcttcgtctttttcaaggcgttttacgaaatttgaaaaattcgaggcgatgaaatcatggccgctgcggacggtcagggggcattgccccccaccattcagctcgagaaaaattcttgcggccgagggaagagcgcttttcatgggattttcggtatttgaggaaaaaaattctgccgaatctttcggactgccgtcaaaaacaacgctgccgccctcaagcatgatcattcggtcgcaaaggggcaatacctcgtcaagccgatgctcaacaagaacaacggtcaaaccgaattcacggttgagccgataaatttcggtaagaaaattcgacgcggcaatggggtcaagctgtgaggtcggctcgtcgagcagtaaaattttcggctgcataacggtcactccggcgagattcaaaagctgcttctgaccgccagacagccgagccgtgggacgttcgaaccaactttcgattccgaaataggcggccgtttcggccacacggctccgaatcacatcggaagaaaggccgagactttcaagcccgaacgaaagctcgtgccacaccttatcggtgacaatttgactttcgggattttgaccgacaaaaccgatttcggcgcaggcccgccgcccgtcaagctcttcggtttcgattccgtcatatacaatccttccctgcttttcgccgaagggagagatttcccttttcacgagccttaaaagcgtggattttccgcagcccgaaagcccgcaaagaacggcaaattccccctgccgcaccgaaaacgacacatttctcaaggccgttttttcggcatcgggataacggaaggttaaattttcaacctgtaacagcgccattttacggcctcctttttttcaaaaataaacggtgcaaacgaaagcgcaagaaaaactgccgacgccgcaaaggtgagcgcgtcggtcccgccccaccgcaaaacgggataaaacgaaaaatca

SEQ ID NO: 1717 - DNA, 2197 bp, Unknown
  16S sequences of unknown bacteria
acgctgtcttagcgtgtctgtgatgcgatatccttgcggaaacggaccagtccggtgcggttcagcgcgaccatgacggccggaagcaggatcagctggacgatgatgccggggatcgcattgagcagcgcaccagagatgaacatctgccaggtgaacccgtccgcggatatgccgagcaaggcgatctcagccagcgcccacaccgcgcgcccgctgaccatggccgtgatgatggcgcggtagagcgcgcgcagacactgccagcgagaacgctgatacaggaatccgaccacgatgccataagtggccagctcagccatcatggcgatgccggtcggatataagatcggcataccgaacagcgcgtaacgcagcggcggcaggatcgcgccgatcaatccgccatactgccagccgcagatcagcccgcagagaaacacgggaatatgcatcggcagcagcatgctgccgatctgcgggatctgtcctgtcagaaacggcaggacgagcccgagcgccagaaacatggcgctgagcgtcaggttcttcatgttttgcttcatcgttttccctccatcatcattcgccgaaataggccttgatctcttccatcttcttcatcggatctgcgctaaaagggcagcgggacgagcaatgtccgcagcggatgcagtccgacgcttttttatccaggtgatgataatgatccgctgccagtccatcccccagcacagcgaggtcatgatacttgtggatcagcgcgatgtccaggccggccggacatggatgacagtgccggcaatagacgcagcgtcccttctgctgcaccgcatcaaactgtgcgagcacggaataatcccgttcctgctgggaagcgccgcaataagcgagcagctcgcgcagatccctgcggtcacgcactcccggcagcaccgtgatgacgcccggctgatcgagggcgtattgcaggcactggatcttgctcagcgccttggggaacacggatttggccgcatccagcagctgaccgccgcagaatggcttcatgaccgaaatgcctaccccttccttggcacagcgctgatacagggcgaatcgctcatcagcttctccataggcatactccccgtgccggttgtcataggccggattgatgctgaacatcaccatatcgaggatgcccatatccagcactttgttgaccagcgccggcgtatgggaagataagccgatgtggcggacggcccctttgcgcttcagctccaggatggcgtcgatgatgccgttttcctgcacggtgcgcagatcgctttcctcatcgatgcagtggatgaagccgaaatcgatatggtcggtctgcagcttatccagctgccaggcaacggctgccttgatcttctttggatcggtggtccagccatactccccgctggtgtagtccgcgccgaaatggatctgcagatagacctgatccctgcgctcggcaatggccttccccacgcctgaaaacgtcgcggcatgcccgctggccatatcgatgtagttgatgccatgatccagcgccatacggacggtttcgatgatctcctgttcatctgcctcgccaagagagctcgtccccagcccgatcacgctgatgcgctctccgccatgcggcagcattcgatattccatatgcattcccctttcatctcttctttctttccttttccagcagggcatccagttcctgaaggcacgcttcatcccgatgcacttcttccagcagccagcaccgatgccgtttcaacagctccagctgctcttcttcccgcccttcctgtgacaggcgcaggaacgtgcggatacatgatcctgagcatcctgccgcctgcaggttggtgatcagctcctgttgctctttactggcatgcatagttcatcctcctgctttcttcttttacagtataatgcatctttttcatcatcacaaatacttatattgaataggaaggcatagaaaaaaactatttcatcctcctgcttccccgttgacaggaacagctgccgggcgtatagtcgtttccagacgtgctgcgtccgtgcggcacatcaacggaggtgtcatcaatgttaaaagaacaggcagcacgctggtatctgaatggatacaactgtgcggagtgcatcatccacgcggccaatgaacagtggc

SEQ ID NO: 1718 - DNA, 15851 bp, Unknown
  16S sequences of unknown bacteria
acgagattcgccttagtctcgtgggctcggagatgtgtataagagacagccattggcttaattgataattttttgtatacttcaaatcgatttctcctttatgtagtcgaattttggggcttttgcgaaaaaagccctacacttatcgtgtagggcagggcgaaagttgtacgtttttggacaacaaaccgaaaaagaaaaaagccccccatgcggggggcaatggtcagtgctttttacccagccgcagcaccacggccaggatgattccggcggtatccaaagcgcgtcgccagccggcaggagcggcgcacgctcacaccagctttttctccggaagggcgcggacggtttccgcgtcggcgcaggtcagcctcatcaggtcttcgcgggaaagcgtttccagggcagccaagcggttgcactgggctgtcaggatctgctcaaacaaattgcgcacaccacgggcgttgccaaatgataccggggcggtattcttttcggcgatcaggaggcggacggcttttctggcgtcctcgtccaatttatagcagccttttttgcattgcagttcaaaaatgcggaccagttcctccacggaataatcgtcaaaatgcagataccggttgaaacgggattccaagccgggattggaatggacaaaggtttccatcagcccgtcgtagccggcgacaatgatgaccaggtcgtcccggtgatcctccatggctttgagcagggtgtcaatggcttcctggccgaaatcgttttcgcttttgccgttgagggcgtaagcttcgtcgatgaaaagcacgccgcccagggccttttcgatgactttgctggttttggctgccgtctgccccacataaccggccaccaggccgctgcggtcaacctccaccaggtggccgcgggaaaggatgccgaggctgtggtaaatgcgggccatgatgcgggcaatcgtggtttttccggtgccggggttgccggaaaagaccatgtgcagcgacatgtcggtacagggcagatcggcttctctgcgcttttgctcgatctgggccatgttgatgaggttgttgacttcctgcttgactgcatccagaccgatgtactgttccagctcggttttcagctcggtaatgtcctctttcggaggggcttccggggctgtttcggcggcgggtccattgccggtggaagcggccgttttcggcgcggaggagtcttttttcaccgcgtcggcggcgccggcgggcgtaagtttgctgggatccggggcgctggggggcgcgggcccccagaaatcgctgcccatgcggcttatgttgttggcggtgagagtacgaatcagttccagctgctgctggatgatgcggtctttgcggtcgcccgcgctgccgcccagttgcaatgccatccggcgtcactccttttcgggatttatcgtgcggaaaaaacgattcagcttccgggcgcaatttttgctttttccatggccgaaaagagcacagcagccacgaagccggtcagcgcgccggtgaaaacggatactaccagcagcaccggaagatatgccaccggcgcggtgctgcccaaggtcagcaccgccgccgcgacctgacctgtattgtgtcctgctgcaccggcgacggacacgccatagatcgacagcccgggcaggcggtgcagcaggatcatgatcagcatggccagcacgccgcccatcagggaaaagaacagggctggcacgtttccggcgaacatggcgcccagaaggcaccgggcgaccaggatcgccatggccggagccgcgcccagatagtagagggcaaaaacggtgacgatattggccagacccaacttgaagcccggcagggggaccagcagggcggtgggcagaagattttccatataggacagcgccagggccatggcggccaatacggcgcacagcgccagcttatgcacatcggttttcatgctgtctgcctcactttaccacgatatcgaatgggggatcggctggcgcagggctggaaagcgttactacgaaacggccgggcaggcacacgacgctctgcccgctgcggtgaatccagccggtgtgcacacagtcctgccccacgcagggagcgcttttgatgcggatgtggccgtggttgatttccaccacgtaatctccgtagcgcttttcctgatcgggtgagccggccgtcagtgtgatttcctccaggatccggccgttttgagagacggtgcacaccagatcgccttccgtgctgcccgcggcgcgggaaaggaaaaacagggcgagggctgctgccagagccagcaccagggcagccactaggatatcccagggggaggggcgcaaacagactttagtttttcgggatacagatgtattcatacgcatgctccgccaaagaggtgtcgaaactttctttcagcccctcggtataatatacatggccgctgtcatcgcacagcaccatgtcaaaatccaggccgctggtgcgccagaactgcacggccttttcccggcccatgacgaacaaggcggtggaaagggcgtcgcccatagtgccgttgtcgctcaccacggtggcggacaaaagaccgctgcgggccacatcgccggttttggggtcaataatatgataataggttacgccatcgcgctcaaaatagcgctggtagccgccggaggtgatgatgaagcgatcctgcagcgacagcacgccgaggtatgccgccgtgtcgttaggatcctctatggccacgcgccagagcgagccgtcgcgcttggtgccgcgcacataaacgttgccgcccaggctgaccatggcggatgaaacgccgtcggcggcaaaaagttctgccagccggtccgaggcatagcctttggcaatgccgcccaggtccacggccatgcccggctccagagtgacggtgccgctgccaaagacgatgcgctcgtcgcccaccaggggcagcaggctgtccagttcggcgcgggagggaacgcgggggtgctcaccggtgaaatcccaggcgtccattataggggcaaccgtgactgcaaacgcgccgtccgtaagggtagagtattccacggcggtttggagcagattgtataattcttcctccacggccacgggggaaccggcgctttcgttgagagaggatacggcgctggcgctgtcctggcgggagagcagagcgtccaaccggtacagttccgcttcggcgtctttcagagcctgcgccgcgccgctgccctggacagtcagatccatcacggtgtccatggcgaaaatttgggcgctggcatcgctgctctgacaggcgcacagcagaagaatcagagataatgggaggatagacagccattttttcatggagaaacgtacctttctgatgcaattatgatgcaaaacgggcaaaaatagatggattgtacatatataatggtatcatagcatgattgctccgctgtttcaaccgtcccggcggctttttccccgcagcggtgaaacagctgctttgggcaggggacgtttgtgcagccattgtaccacagcgcatggccggcggcaattgggaagggcagcatgcggcggctggcgtgcgcgcaggaaaaatattgtgccttgcaatgtagggcggaatctgctaaaataccaatgttatgtcgataaaatggatactggaagtatagtgctgtgcgcggcacagcattgctttccgggtggagggtaatcaaaacaatggcaaaaaaacagagccttgaaaagaaaaaaatgatccgggcgcaaagccttcagaaaaaagaagatcgggccaaggaggaagcggcgcttctgaatcgctgtttaggcctgctgggcgttctggtggcggcggagatctattttttattgtgctaccgtttctttatccagggcacgatgcagacgctggtcaccatgtccaatgtgatcgccgtggtgggctgggttggtttggctgtggcagcggtcggcctggtcttcgctttggtgcggcgggggaaaaaaggggcgcagtggggcgcctggctggtgatcctgggcctggtgctgttcggcagcggacggctgatgctggccatctatccagaaggcactacagtgatgtgtgtagccgtgccgctggtggcgctggcgggatttgtgtattacctttatcagcgtgaatttttcttctctggcttgggcgtgggcctggcggtgggcggtatgtggctggcgcaccgtgcagtaggcagcgccgtttggggcagacaatatgtggccattgaggctgtgctgctggccgcggtggttgtgctgctgattctggcggtggccattggcaagaacggaggaaaatggggaaaaggggacgctgcgcggaccgtgttttccgggacgacgaattattcccttgcctatggtgcgctggcagccgcggcggcggccattgtgctggggatcattgccccggcatgcgcgctgtatctcctgtgggccggcatcgcgctgctgtttgtgttggcggtatattacaccatgcatctgatgtaagcgttccgggcagcgggaaccggcgatattgagacgaagaggggaagcgggacggtggactgcttctccttttgttgttataaactggaaagaattggaagagcgtatcgaaagagaaggaggaacaagctctatgaagatcatccgacggctggggacggcgcttttggcggctgtgctttgcgcgtcagtgctgtgtgtgccggccttggcggatggggaagacgtcacgatttccctgagccagacaaccatttatctccctgtgggccagagtcagaaagtgaccgccacagccagtgacggcaaggccgtgacctgggtcagcctgacgtccggcgtggccagtgtggacagcgccggcaatattacggctcttgccgagggatcggctacggtgcaggccaaatctgccgacggcagtgcggtggccaactgtaaagtgatcgcatatatggcctttcccagctatgcgctgcgcgtgggcgaaagcctgagcctggacgcgtcgttttccggcacctggaccagcgccgatgagtccgtcgcaacggtgagcagctccggaacggtgaccggacagggctttggacggacgtatatcactgtgcgcagcggcagccgctgcgagagcttttccatcacggtgggcggccatgtgggcattgatatttcttcctggaacaatacgattgattgggacgcgctcaaggaacagggcatcgaatttgtgatgatccgggtgggctatggtgagaactccacagataaacgctttgtggaaaatattgagggcgccatccgcagcggcatgccctttggcgtttattattacagctatgccaaggatacggccaaggccagccgggaagcggcatattgccttaaacagctggagccgtacatggacaagctcacgctgccggtggcttatgacctggaggagtacagcgatctgaccggcgagcagctggtggagattgccgagaccttctgcaccgctgtgcaggacgcaggactcaacgccatggtatatgccaacgggaacttttattcgaaaatggacctgtcgtccctgacggatatgggggtggactactggtatgcctggtatcctacggtgccggatctgagtacgatccataccatccgcggcacgtccagcaagccgaatatctggcagtacagctcttcctgcgtggtgcagggtgcgctggcttcggggaaaacggatattaatgtactctatatgccggaatatctctccttttctgcgcctgtgctggaagcggaggcttcttcctctgcggcgcggctccgctggggcggcagctcctatgccagcagttatactgtgtacaagcagacagcctccggcgaggtgtccaaagtaggtacatacgacggcaatgtacacagctgcaccgatcagagctatcttccgggtgagggctattatgtgacgatggagatttccgatcccatcgacggcacttactataagagttataccagtcagacagtgtatccggaaacggcgcgctatgaagtgcgcgtcagcgcccaggagggcggcagtgccagcggcggcggttccttcctggtggggaaaaccgtcacagtgaaagcggcggcggatgaagggtatacctttaccggctggtacaatgctgccggcagcaaagtatcctccagtgccgaatacagctttaccgtgacagcgtctgtggcgctgacggctcggtttgaaccaaaacagacggaagtgggtacgggcttcaccgatgtgaagagtacggactggtatgctgaggcggtggcctatgtggtagacaacggtttgttcactggcacgtcagacacgacctttacccctggcggcaccatgacccgcggtatgttggtgacggtattgtaccggcaggccggttcccctgaagtgagcaatcacaataaatttatcgatgtgtctgccgcggcctggtatgccaaagctgtgacgtggggatacaacaacggtgtggtcaatggaacgggagaaaagacgttctcgcctgaggaaccggtgacccgcgaacagatggccgcgattctgatgcgctattccgataagatgggcatggacgtgcctgccactacggacggaaacctgtcggcgttcagcgacgcttcggaaatcgcaccctattttgaggatggcatgcgctgggccgtttcggcgcagctgctcaatggcgccgacggcaagctgatgccgcgcaagagcgccagccgcgccgaatgcgcggcgatcctgatgcgctggatggagagcgtgcaggagcaataaaacacgcattgtacccaggtgcgcggccgttttgcggccgcgcgctttgctgtctcccggcggtgcgcagcaaaaatgagcaccccaaggcggctgccttggggtgcttgttgcatatgtcattttcaagagggagcatttattcgatactcatagcgctggcccagcactccatgacgatattctccacaaatttgcggtcctccgggcggggatcttcgtaataatccacgcgtccgacggttttcaccagcggcagggtaaagcggatgaactgacaatgaccgcagccgcagcacagatcgttgttgatcttgatcatggcaaagcctcccctttcaaatgaaaaacgatggttactttgtattatattcggcgccggaaaaaagtcaagggtgccgctgttcggggggcggaagtgaacaagttcgccgctttgtatcaaaaaagggtacaaatcccgttaatttcacggaaatagaacatttacctgtatcttttctcttgtgtggggcagcgatttattatataataaacctttagagaaaacggtcgcccgggggacggccttagcagaaatgcaaatagaaaatggaagtgagatcccatgtatcatattggtatcgatattggttccaccactgtaaaagttgtggtgctggatgaaaaacagcagctgcggtttcgttgctacgagcggcatttttccaaagtgcgcgaaaaaacctgcgaaattctgcaccgcatcgaggaaaaatatgccggcgagcaggtgcaggcggtaattactggctcggcagggctgggcgtggccaaggccagcggtcttgattttgtgcaggaagtgtacgccaccgctgcggccgtcaatgctctggatcccggtacggatgcggtgattgaactgggcggagaggacgccaaaatcatctttttcggcaacagcctggaagagcgcatgaacggctcctgtgccggcggtaccggcgcgttcatcgaccagatggccacgcttttaaatgtgacggtggatgaactggatgccttgtcgctgcagcacacgaagctctatcccattgcctcccgctgcggtgtatttgccaaaagcgatatccagccgattctgaatcagggcggacgtaaagaggacattgcggcttccatttttcaggctgtggtggatcagacgatcgcgggactgacccagggccgggagttgacaggcaagattgtgtttctcggcggcccgctgcatttcctgcaggggctgcgccagcgctttgtggaaacgctgcagctggatgaggaacacgctgtgtttccggctgacggcgactgctacgcggctatcggatcggccctgtgcgcggcggattatcctgtggtcgggtttgatgaaatgctccagcgcctggaaaaagcagtggataccaaccagagcttgaacacgctgcccccgctgtttgcttcccaggcggagtatgatgcgtttacggaacggcacaatgccaaaaagctgccggaagcggatattcagacctatgaaggggcggcgtatctcggtatcgacgctggttccaccaccaccaaaatggtgctgattgaccgcgacggagggattttatattcctattatggttcgaatcagggcaatccggttcacattgtgctcgagcagctgcgccggatttatgagcagtgcgaaaaccgcatccgcatcgctggcagtgctgtgacaggttacggcgaggagctgatcaaaaatgcgttccgctgcgacttggggctggtggaaacggtggctcactttgccgccgcgcagtactttgacccggatgtggattacattatcgacatcggcggccaggatatgaaatgtttcaagattcgcaacaatgccgtggattccattatgctcaacgaggcgtgctcttccggctgcggaagcttcatcgagacgtttgccaaagccatgggctacacgattgccgactatgccaaactgggcctgtttgcaaaagcgccggtgaacctgggttcgcggtgcacggtgttcatgaattcctcggtgaagcaggcgcagaaggacggcgcgccggtggaggacatctccgcaggcttgtccatttccattgtgaaaaatgccatctacaaggtcatccgcgcttcttcggcagatgacctgggcaaaaatattgtggtgcagggcggaacattcctgaacgacgctgtgctgcgcagctttgaactggagctgggccgcaatgtgacccgccccaccattgccgggctgatgggcgccttcggcgcggccctgacggcccgggatcaccacatccaggaaccgatgctgctttccatggcggatctgacggatttccagcatacggccaaaccggccacctgccagttgtgcaccaatcactgcgccctgaccgtgaacaaattcagcggcggccgcagctatatttccggcaaccgctgctcccgtcctttgggccgggaaaagctgcccacgccaaatctgtacgcgctgaaatacacggctctgcgcaagatgcagggaaagggactgggcagcggcgtacggggtaccgtggggattcccttgtgcctgaacatgtacgaaaacctgcctttctggtttcagttctttacttcgctgaattttgaggtggtgctttcggaggaatcctcccggaatctgtatgtaaaaggccagcgcacgatcccgtccgatacggtgtgctatccggccaagctggcccacggacacattatgagcctgctggacaaacatgtggattatattttttatccctgcatgccctataattttgacgaaggcatcagcgataacaactacaactgccccgtggtggcctattaccctgagctgctggctgccaatatcccgggactgaaacagacgagatttctgacgccttatatgggtctgcaccggcccaaagatttcaagcaccgcagtgcgcgctatttccgcaaggagatgggcatcgacttttccgaagtgggttttgctgtggatctggcttataaggcctatgaaaaatggcaccgcagcattgtttccgccggggagcggatgatcgaggaagcccgcctcaagggcagccgtattttggtgctgtgcggccgcccgtatcatatcgacccggaaatcagccatggcattgatgaactgtgcgcggagtacggctttgtgatcctcagcgaggacgcgctctccgaccgcttgaaaaaggaaaagcgcacggtgctcaaccagtggacatatcaggcccgtatgtacaatgccgcccgctacgtttgctcccagccggatatggagttggtgcagctggtatctttcggctgcggtaccgatgccattaccggcgacgagatgcgcgccattctggaagaacacggcaaactgtacacgcagctcaagatcgacgagatttccaatctgggcgcggtgcggatccgcatccgctcactgttggctgcgctggatgctcgggatgcccggctgcgcgcggaagaagcggcccggcaggcccaaaaagcggctgcaccggcgccggaaaagaaaccctgggaactttgaattccgggacaatgggaaaggaccgcatagagtatggctgaattggtttacgataaagacggacggctcctgtttaccaaggagatgaaaaaggagtatacgctcctgatgccccagatgctgccggtacattttggcatgttccaaaagcttctgcagctggagggctacaaagtggacatgctgacgacccaccaccacgccattgtggaggaggggcagaaatacgtacataacgacacctgctacccggcccttctggtcatcggtcagctgatcgaggccgtgaaaaacggcggatatgatcctcacaaggtggctctgctcatcacccagaccggcggcggctgccgcgcctcgaattatatccatctgctgcgcaaggcactgcataaggcgggctatgattatattcccgtaatctccgtcagcttcggcgtggagaaaaatccgggcttcggcctgagcttgagcctgatccgtaagctggcctatgcaatgctctacggtgatgtgattgtggatctggcgaaccaggtgcgcccctatgagacaacggccggtgatgccgaccgcatgacggagcaatgggagaataccctggtggagagtttcggaaagggcaaacgcatgcgcttccctgcttttgtgcagacggtgaaggaaattgtggcggactttgagcgtatccccgtccggcaggaggaaaaagtgaaggtcggtgtggtgggcgaaatctatgtgaagttctccccgctgggcaataacaacctggagcagttcctcctcagcgaggggtgcgaggtggtggtgccgggactgaccgactttatcattttcaagattttcaatcgggtgaccgacattgaactgtacggcggcagccggatcaaatatctggcctgcaaggctctgatgaattatgtggtgcggcggcagagcgctgtgatcgatattgtgggcaagtcccgcttccgcgcgcctacccattttgaaaccatccaccgcagcgtgcatgactatttgggcgacggcaacaaaatgggcgaaggatggctgcttactggcgaaatgctggagctgatccacgaaggcattcccaacatcgtgtgcacgcagcccttcggatgcctgcccaaccacatcgtgggcaaaggtatgatccgtccgctgaaggacgattatcccgattccaacatcgtggccattgattatgacccctcggctacggcgatcaatcaggagaaccgcatcaagctgatgctggccaacgcccggcagaagctcagacaggagaaagggaaagccgctgcggcgccggagcaaaaaaacgttgtcggcggtgtataaaaactacagccgggagagcttccggtacattccggcgtttccggccggcgattagcagacggaacaatgcgcaatggccagcggccattgcgcatttccaacgagagaaatatctgtgcaaaggagagagaaaagaatatggcgattgaacgggtccaggcttatttcagggcgcttcatatggaagaacgtatccgggttctggaagcctccagcgctacggtggagctggcggcccaggccctgcagtgcgcgccggagcgtattgccaaaacgctgtcgtttctggtgcaggatgatcccgtgcttattgttgccgcgggcgatggacgcatcgataaccagaaatacaaagcgcagtttgggaccaaggcgaagatgctgacgccggaacaggcggaaacaatggtgggccatgcggtgggcggcgtctgcccctttgcggtgaatgagggcgtgaaagtgtatctcgatgcgtccctgaagcgctttgagacggtgtttcccgcctgcggcagcgccaattccgccattgaactgacactggcggagctggaaaagtactccggcgccctggcctgggtggacgtatgcaaaggatgggcggattaacgtggagcagaaggacaatatgctggaagagaagcgtatagaagaaaatattatgggaacgctgccggtgcggcgtttgctgttgacgatggcctggcccatggtgctctccatgttcattcaaggctgttacaatattgtggacagtatttttgtggcttatgtgtctcaggatgcattcatcgcgctgaccttggtgtttccgatccaaacgcttttggtgtctgtcaacgtgggcatcggcgtaggtatcaatgcactgctgtcccgccgcttgggcgaaggccgctatgacgatgccaatgccgtggcggcgcatgcttatgtgatttatcttgctttcggtgtgctctgtgcggtggtgggcgtgtactttgcgcggccctttatggagctgttcagcgaaaatacggcggtgatcgagtatgggaccgtgtatctgcgcatcataacattgtttgcctggggcgtctgccttcagtttgccggtgaacgcatgatgcaggctacgggaaatcccatttggaatatgtacattcaggcatcaggagcggtcatcaatctggttatggatcctatcctgattttcggctggtttgggttcccggcgctgggcattgccggcgcggcgctggccacggttatcggccagtcttgcggcgccctgatcggcatctacctggtgcggcgccatgtccggcagatccatgtttcttttcggcatttccggctgcggatggacattatcggccccgtgttccgcgtgggggcgccggcgattgtggtgcagagcctgtccacatttatgtcccttggcctgaacaaaattttcgggctgtactcagagacgtatgtggcggtgctgggcgcctatttcaagctgcagaattttatttatatggtggtgtatggcttgggcaacgccgtggtgccgatgatcgcattcaactgcggtgcccattcccgcgcgcgggtagtgggtatcatccgttccgccatggcggcggccatcgtcagtatgctggccggtatggtgctgctgctggctgtgccggggccgctgctgggcttgtttaatctggacagcgaggcgctggccatcggcattccggctatgcggattgtgagtttgtcttttgcggcggcgggggtgagtctggtgtgctcctatacttttcaggctacaggcagcaacagcgccagccttgtgctggctctgctgcggcagatcgtgattttactgcccctggcggccgtgctgctgcacaccgaccccgcgctgacctggtgggcctttcccattgcggaaggcgtgtgcctgattctggcgctgctgctgttccgcagcgcataccgcaaacggatcgcgccgctgggcgcataaaggagaggaagaatgaaacagaaaaaactgctgctgctgaccacgggaggtaccattgcttcggccgatacagaggcgggactggcgcccaccattaccggcgcgggcttgactgcatttgtgggcagtatgctcagcgcgtttgatgtggaggtgcaggatatcctgcgtctggattcctcaaatatgcagccggaagagtgggagtttatcgcccgcacgatccacgggtgctgggaggcgtatgacggcgtggtgctcacccacggcactgataccatggcctacaccgccgcagcgctcagcttcctgctgcagggcattccgattcctgtggtgctcactggggcacagctgcccattacccatcctttgagcgacgccacggacaatctgcgcacagcttttgccatggcggcttcgggtcggggcggtgtatatctggcgttcgaccggcgtgtgattctgggcactcgggcggtaaagacccacactatggatttccgcgcttttgacagcgtcaacgcgcccttcgccgcggaagtgaatgcccatgggctggtgctcaatgaggcggtgctgccgcagccccggatggactatacgctgcaggacggactgtgccggcaggtttttctgctcaagctggtgccgggactggacccgcatatcttcgacctgctgctgcagatgggcacgcgcggcattgtgattgaggcctttggcgcgggcggcgtgcagttcattcgccgggatctgacgcgcaaactccatgaggcggtgcgctgcggcgttagcgtggtggtatgctcccagtgcctgtatgagcgcagtgatttttccctgtatgaagtaggacagcgcgccttggagcagggtgtgatccaaaccttcgacatgaccacggaagcggcggtaacgaagctgatgtgggtactgcaccgtatcagtgcgccgcaggaaacggcggaatggttcggccggaatctggtgggagaaatttctctgctgcacgaataaaacggcagtgtgccccggcggacattgtttccgggccgatggaagatcggccgccaaaagctgaatgaaaaaccacaggcctctcctgctgcagaggcctgtggttttatgcacgttttttggaaagatattgtttgctcaggaagctgaaagcggccagcaaataggcgctgcaccacagcgccgggagttcggccggcgcatctgcgggaaaaagagccagccgcagatagaaaaacagggccagaagaagaacacacgcgcagcgggggagcgtgaccagcagtttatactgcagcgcctggcggcgcgccatacggcgatggcggctgcgcatggaaggatgcggcacagcggcgggagcggtgaaagcgataatcttcctggaattatggcggtgcacgtcgctgtaattaattatgtcgggttcctggagggcggcgtccgcgcagtgcagtttccgtgcgctggtttcataatgcatcgtcatggctggttcctcatttctcttactctctatttgatctgtttggcaacaaatatcgaacttttgtttttgtattctgaattatagaacgattgttcaacaatgtcaactgagaatcgaacaaaaagtcgaattttatagtttgactaaaaaaaggatacttttattagcacatttgtataggtgtgccatggagcagcaggttaaaagggtgtatagtaaagaaaataataaagatttgtggcaatggagaagggaaacacggtgggagaacaggagaaaaaggaaattgcattttccaatcgggatttgcggcgtctgattgtgccgttgctgatcgaacaaatgcttaactgtaccgttggcctgctggactcgctgatggtgtccaccgtgggcgaggcggcggtgtccgccgtgtcgctggtagactgcgtaaacgtactgctgctgcaggtgttcgcggc

SEQ ID NO: 1719 - DNA, 32759 bp, Unknown
  16S sequences of unknown bacteria
gctggcttccagtataccccatctgcctcttgcccgcaagaggcagtctattctccctggcagtacagccggcgcaatacgcccagcagttgagggagcctttcatccgacagggaatagaccacatactgtccctgcttttccccctgcaccaatcccccttcccgcaaaaggtgcagatgctgggacagagcgggccgagtcaaagagggcaccttttccccgatctgccccaccgtcttggggccgtcctccaaggcgcacagaatgagaagccggttgtggtttgaaagccgccccagaagctccgccacctggcgggcctgttcctccagcccccggctcatggctgggcctttccggccttcaaacggcagatcagctgggtcatggtgcccatggggcaaaagacacaccaggagcggggcatccacagcaccatggcaataaagccgatgagggtggaagtgagcatcaaagaataaaacccaaaggcaaactgggccacccagggggcaaacagggtgccgtgataggcccagtgccagggaaggcggaaggtccagaagagcttcaccgtctggcccagttcctgctgtcctgcccccaccagataggtggtgaagagcatctggaagaacatggcgaaaaagaagatcagaaatccatagcggaaccagcggcttcccagccaccgtggggtgggacggcggcgggacaggcccagcttgcctcccagcagggcaaagaaccggccccgatcacagtaacggttgcaataaagctttcccccgccggccaaggcgatgatcaaaggcaaacagaagaaaatcatccccagccaggcaaagaggatgttgaaaaatcccagtcccagataaatgggagtgacgatccacaggtattcataccaaggccgcttcctgccggttttcttcattgctgcacctcccgttctgttacaaggatggccgaggccgggcaatccttagcgcattttccgcagcccacgcacttttctccgcttacctgggcgatgacgcccttccagatggaaatggcccccaaagggcacacctccagacagctgccgcaggccacacagcttttgcccacctgggccaatcgttttcctgccatacctttcctcctgccaacagttaagtaattaagcaattactaatatatcatctttgctctcctggtgcaagggcatattttttcttctctccccatagagtggagatgtaggactggccctcccaaaagaaaggtgtgaaaaaaacatggaacggacaacatccccctccctggccgcccgggggctttctccccaggctgtggagcgatcccggcaaaagcacggctccaacgctctgaccaaacaggggcggtcgggtttcggaaagcaactgctgagcaattttggcgatcccatcattaaaattctgctggccgcccttttgctcaatcttctttttgtcttcaaagaacagaactggtttgaatcggtgggcattgccatcgccattttcctggccacctttgtgtccaccctgtcggaatacggcagcgaatcggccttcctccgtttgcagcaggaagcccaggccctgcggtgccgggtgatgcgggagggaaaaatcgccctcatccccctggaagaagtggtggtgggggacctggtgctgctggaaagcggcgagcgggtaccggccgacggccttctggtggaaggcaagctggcggtggaccaatcctccctcaacggagaaagccgggaagcccagaaaaccccgggaggcgcccgggagggctgggatctttccagagaaaaccagctgttccggggcacggtggtgtgcgccggaaatgggctcatgcaggtgcagcgggtgggcgacagcaccttctacggcggcatggcccggcagatgcagcaggacacccggcaaagccccctcaagctgcgtctggaagggctggccgacaccctcagccgcctgggctttgccgccgccatcctggtggctctggccgacctgctgggggaggtatggcagctcaccggctttcagaccccagcccttctgtcccttttttcccagccgccccagtttctggggcttttgctggaaagcctgactttggccgtcaccgttttggtggtggccgtgcccgagggcctgcccatgatgatcaccgtggtgctttcctccaatatgcgccggatgctccgggaccatgtgctggtgcgcaaactagtgggcatcgaaacctccggcagcctgaacatcctgttcaccgacaaaaccggcaccctcacccggggcaaactgcaagtgcgggagctggtcaccggagagggcgggcactttgccagcccccaatccctgcgggagcactctctgccactctaccggctgtgcttcctctgcggggcctataacaacgaaagcaccctgtccggccagggccagccggtgggaggcaacgccaccgaccgggccttgcttcagtttttcctcacccaggcccggcagtataccgccccctctccctcctggcgctccccctttgacagccgccagaagttttcggcggtgaccctgcgggacagcggccagaccctcactttggtgaaaggggcgccggagcagatcctcccgggctgcacccagtatctctcttccgacggctctgccctgcccttttcccaggaaaaaatccgccgcacatggcaggagctgacaaagaaagcctaccgggtgctggccctggcctatgcccccggagaaacgggcggcagcactctgtccgggctcaccttcctggggttcatcgccatcggcgacaccctgcggccccaggtgaaaaaggcggtggaacaggtgaaaagggccggagtgcaggtggtgatgatcaccggggacaacaaggataccgccctggccatgggagaaaaggccgggctgtgccgggaaaatgaccggctggccctgacccatgacgaactggccgccctgtccgatgaagaggtcaaggcccttctgccccggctgcgggtggtggcccgggccatgccccaggacaaaagccggctggtcaccctggcccaggagatggggctggtagccggcatgaccggcgacggcatcaacgacgcccctgccctcaagctgtccgatgtgggctttgccatgggcagcggcaccgaggtggccaaggaggcgggggacatcgtcattctggacgacaacttccagagcatcggcaaggccatcctctatggccgcaccatcttcaaaagcatccggaagttcatcgtctttcagctgaccatgaatctgtgcgccgtgggtgtttcggtgctggggcccttcctgggagtggaaaaccccatcacggtggtgcagatgctgtgggtgaacatcatcatggacaccctggccgccctggcttacgccggggaagccccgctggaagaatacatggaagagccccccaaaaagcgggatgagcccatcttcacctccgccatgctccatcaggtgctgtgcatgggcctttacaccatcctgctctgcctggccttcctgaaactgccgctgcttacccaggtcctttcgccccagcaggcctccttccatttgctcaccggattttttgccctgttcatcttctgcggagtgttcaacagcttcaatgcccgcaccgaacggctgaatctgctggcccatctgggaaaaaacccccgtttcctcttgattatgatcatggtggggctggtccagtgcctgctgatctaccggggcggctcgctgttccgcacctcccctctgccccttcccgctttccaactggtgctgcttctggccttctcggtgatcccggtggactttgtccgcaagctcatcctgcgccggggccccggcggccgtctccgccgcagccgcagtcctttttaactcattccgcccggcccagtgcctgggctcccaaccttttctttgcctgaatcgctcacaatcgcctgttcaaaaatatttttcttacggcagcttttcaacaaagtccggttctccttggggccgggctttgttttgccctttgaaaatccattgacccctcttgacagtcatatgaccatgtagtataatcacatcaacctgatagcacagacccctgaccctttcttttggcgggggagaaaggagaatcgccatgctgaaaaccttgcccggcgccacagtggaagtggacatctcaaacccccaggccgccgatgacattctcagttccctgttcctcaccggggggctgatgctctctcaggtgtcccaattcaccgggctggaaccccacaccatccagaattgggtcaagcggggctttttgccaccgccccagaacaagcgctacgatcgcagccaattatgccgtattctcatcatccatatgctaaaagacacgctggccctgcccaccatctgccgtctgctttcctatatcaacggccagctggacaaaaattccgatgacagcatcgacgacagccaactctatctctatatcatccaggtggtcttttccctggaaaatgacaagctggaaggactatcccacctggaagagcggtgccgccaggtgctggaggggtaccgggagccttttgccggggcaaaagaccgggtgctgctggtgctgcgcatcatcgtcaccgcccatctggcctcccgcctgacccaacaggccaacctgctgatcgggcgtatggaagactgagaggcttttgatagaaaaaaacaccaccgcctttgaaatggaggaaaaagggatatgctgaactggtggaactcactggacgctttgcaacacttttttgcctatgtggccattcccgccaccctgatcctgtgcatccagaccatcctgctgctcttcggcctgggcgccggagggaacggggatctggacagcgacacatccgggctggacaccggagacggcaccgcacccgacctgaatgcccctgatctggacaccccggataccgatgtgccggacagctgggatggagagagcggccatgctctggaacccgacccagggctgcgcatctttaccatccgcggccttgtggccttcttctcggtgttcggctgggccggtctggccctcagccgcagcggcgtgccgggaggggtatccaccctcatcgcctttttgctgggccttggggccatggtggtgctggccctgatgctgcggggggccctgcgtctgcaatccgacggcaccatggacctgaaaaacgccctgggcctttgcggtaccgtttatctcaccgtaccgccccgccgccagggcaccggaaaaatcacattggtgctccagggccagctgggggaatttgaggccctcaccgacgagccggagccactgaaaaccggccagtccgtccaggtcgtcggcctgtccggccccattatggtagtctgccgcaaataaagcggcttttcacaaaaagaaaaagaaaaagaaaagaggtatgaagaatggaaactttgattctggtctgcgtcattgcactgctgcttttctccatgatcctgctgattttgtcccggtacaaaaaatgtccctctgacaaagtgatggtcatttatggtaaagtgggcagcaacaaggacggcagcgcccgcagcgccaagtgtatccacggcggcgccgccttcgtctggccggtgatccaggcccgggaattcctggacctgacccccctgtccatttcggtggatctggaaaacgccctgtcccggcaaaatatccgcatcaatgtgccctcccgtttcaccgtaggcatctccaccgagcccgccgtcatgcagaacgccgccgagcggctgctggggctcaagctggaggaagtccaggagctggccaaggacatcattttcggtcagctgcgtctggtcatcgccaccatggacatcgaggagatcaacaccgaccgggataaattcctggaagcggtctcccggaatgtggaaggtgaactgaagaagatcggcctgcggctgatcaatgtgaatgtcaccgacatcagcgacgaaagcggttacatcgctgccctgggcaaggaagccgcagccaaggccatcaacgacgccaagaagagcgtggccgaaaaagaccgtgacggctccatcggcgaagccaatgcccaccgtgaccagcgtgtccaggtggcccaggccgattccgaagccatcaagggcgaaaacgccgccaagatggaagtggccatgtccaacgccgcccggcgtgaaaaggaagcggaagctctgaagatcgccacctccgccgaaaagatccaggccgcccgtgcgctggaagaggcctacgccgccgagcagcaggccgaagtggcccgtgccgcccgtgaaaaggccacccaggaagccgacatcatcgtcaagaccgagatcgaaaagcggaagctggagctggaggccgaggcccaggccgagcagatccgccggaaggccaaaggtgaagccgacgccatcctggccaagatgcaggccgaagccaccggtatgcaggccatgctcaccaagcaggccgatggtctgcgggagatcgtgcaggccgccggcggcgatcccgatgccgctctgcgtctgctgctggccgacaagatggaagaactgctgcgtgtccaggtggaagcggtgaagaacatcaagatcgacaaggtcaccgtttgggacagcggcgaaaacggccagggcaaaacggccaccgccggttttgtctccgggctgatgaaatccctgccccccatgaacgagctgttcgacatggccggaatgaatctgccctctttcctgggcagcgacaaaaaggaggaaaccgaaaaaccagcccccgccctgtcccccaaggaaacacagcctgaaacggccgaaacaaaataagaatcccctatccgtgcgccccggaaaacccggggcgcaatttttttcgaaaaaacaaaaatttctcttgcttttttcaaaggagcgtggtattataattaagcgttccaaatgcggaacatgcgcccatagctcagctggatagagtgtctgactacgaatcagaaggtcacaggttcgaatcctgttgggcgtgccaaaaaacagcctgctcaatagagcgggctgtttttttattcttttcgccccatcttccccggccatccggccggggcttttttctgcctgtaaagcaaacgctccgctgcaatcctctggttatttgttacaataaaaagtgccaaaatcgataaacttgtacaaattatatagatatcggggataatttttaaaaaatatattgcaaaataaataaattgcgctatactgaaatcaattcagggaaacaccctgaaaatacttttcccggatcgatccagacccgggagatagaaaatgaggtggaaagaatgcgaaaaagaaaatggcgtatcctcagtttgctgcttgtggcagtaatgaccctgggtatcctgtttggatgcagcaaggacggcggagaaaaaggctccggcggcaaaggcggtaaaaaagataccattatcatcgctactatggcagaaccaccgactctatcgcccacagaacaaaatgctatcgcatccagttatatgaatgctttaacatttagtcagttgacccggatgaatgaagatatggagatggagggagctttagccgaatcctttgaaaacaccagcgaaacggaatgggtcttccatctgcgcaaaggcgtcaagttccacaacggtgaagaaatgactgccgacgatgtggtaacttccatcacctatgccaagacctgcccggaagtcaatctatacaacgcgtccgtcgaaaaaattgaaaaagtagatgattataccgttaaaatcaccacaccaggaccgtccgccatattgctgagcgatctggcacaccacgggaatgcgatcatgcccaaaaagttgctggatgagggtcataacttttctaccgatcccatcggcaccggcccctacaagcatgtggaatggaagcggggcgacagcctggaatttgaaatgttcgaagattactgggatgaagagcatatgccctccatcaagcacatgatctggaagatcatccccgaaggctcttcccggaccatcgctttggaagccggtgaggtcgactacatcgtggatgtggaagccatggatgtggagcggctggaatcggctgacggcatcaagctggacaagatcgccgccaccaaccatatgtggatgatggtcaacaacgaagttcccggtctggacaatgtggatgtgcgccgcgctatgaactgcgccatcaacaaagaagatgtggtgcaggtggccctgaacaacctgggcacaccttcctactccatggccccggacaatatgccgggcgccaccgatgaaaacaccctgccctacgatccggaaaaagccaaggaatatatggccgcttccggtgtggaccctgccgatgtgaaattctccatcatctgctccaacgatcagaagaagagagctggcgaagtggtgcaggccaacctgaaggaagtgctgggcatcgagtgcgagatcgaaagcatggacctggccacctatttgacggtaacatctgagggtaactataccgcagccatcggcaattattcggccactgatatgattcagtatctggtgggtgtttatcacaccaaatccatcggcgcttccaacagaaccagactgaacagtccggaagtggatgctctgatcgacaaggccgctgccaccatcgacccggatgagcgcgcggaagttctgtccgaatgcatcgctctgatcaacgatctgtgtccccaggtcccgctgtaccaggatatgcacatgcgggcctataacgagaatctgggcggcgtcatcatgtaccccggcggcacactgtatatgcacgccatgtattggaaataagattttcctatattgccaaaaagaccggaagccttgagcttccggtctttttttattgctgttgcacccgggccagcgccaggatgcagtctgtctgtgctttcacattgagttctcccgggccttggcaaagtaagccatcccattcactgagagacagctggtttgcctctccgctgccctggtacaacagcagcacgcccttttccccggggaaaaaggtgaaggtatggctttcgcccgctttcagccgtaagccctggatgcagccttttgtcccctcccggagcatcaagttaaagtcctgggcctgacccaggctgacggtgtgccagtccccggaaaaggtgtcctgctccagcaccgccagatctttttctccatgaccttcgtaaaggagacgcaaagcgcctttgagcaccataatgtgccgctccaccccgggaaggggcgtaaagtccgatcggtcacaatccaccccggcgctgctcacccgaaacaggaaatcccgtttgccataatcggcttcttccgggaaaatatacacctgggtggtggagccgccggaccaagtggagaccttgtgctcctcacggggcaattttctcatttccatagcttctagcggatgtagtccacagcgccttctacccgctctttgccctggggtgcttctcccttgggatagcccaggatcacgccggccacgccgatatagccttccgggataccggcatctttggcaaaggcctggccctgaggggtggtgaggtagcggccgatgcagttgatccagcaggagccaatgcccagggatgctgccgaaaggaacatattctggatggccagagaacagtcggccacaggggcgatgttgtcctgtttgccggtgacaatcaccagggtgggagcgccgtagaacatatcccggtcggtctccatcatctcctggcagcccttgcggatgcgctggatggtctctttgtcctggaccacggtgaaatgccaggactgctggttcatggcgctgggagcccacaggccgcagcggatgatctgctccagttcttcttccttgatctgcttttcctcatagctgcgccagctgcgccggttcaggatattttgaatcacttcgttcatatgcaaaaccatcctttcttttccgccccgtatcaagggcattttctatattttagtgtagcacaaccctccccgcccttgcaagagggatgttgcccccaaaaggcgcaagtggtaaaataaagcggtatgtgattttttgaaaaagcaggtgacgggatgttgtccaaactcacgggatttttccggcgggagccggtgctgtccattgcggccctggccgccattgtgacggccttttttgcccccttttccctccgggccataggggaagccatcgactggcgggtgctggcccttcttttttgcctgatggcggtggtacaggggctggaaggggctgggctgtttgaaaaattggcccaaagcgccattcagcgggccggaagcctgcgaggtctgtgtgccgttttggtgcttctgtgcttcttctcctccatgctggtgacaaacgatgtggcccttctgacctttgtgccctttgcggtgctggtgctgcggggagcgggctttgaaaagcaccttttgtatgtggtggtgctccaaacggcggcggccaacctggggagtatggccaccccggtgggcaatccccagaacctcttccttttttcccgctaccagatgagcaccccctatttctttgtccgggtgctgccggtggccgggctttctctggtgctgctgcttctcctgctactccccattccccggggaagtctttcggtgcaaagcggccagagcccccggcccctttccctcaaagccattttgccctatggcattctctttgccttgtgcctgtgcaccgttttgcatctggtgccctatcccatcacctttgtgctggttctgctttatcttgcagtcaaagaccagcccatcctccaccgtgtggactacggcctgcttctgacctttgtgtttttcttcctctttgtgggcaacctgggggccattcccccggtgaaacaggctctgtaccaggccatccagggccgggaaatgatcacctgcaccctgatgagccaggtgatcagcaatgtgcccgctgctgtgctgctttccggcttcaccgaaaagggcggcgcgctgctgctgggctccaacctgggcggactgggcacgctggtggcctccctggccagcctgatttccttccgcctctatggcaaagcccagccggagcaaaagggccggtatcttctgcttttcaccctggtgaatgtgctgctgcttctgctgctccttcccctgtgcctgctgctggaccgataaacaaaaaagcgcccaaagggcgctttttttatgcttcttttttcaaactgccccagatggcgcaggcaaagaccacggcccctcccagcacttcccggagggaagggatctcccccaggaacaatgcagccagcagaatgccgtacaccggctccaggcaggagaccacgctggccgtctgggcccggatggtgcgcaggctgccgataaacagggtatgggacagagcggtgaacaccacccccagcagcaaaaggccgccccaatcggacaaatgcagaacaggacgcagccaaagcaggcaaggggtgaggattacagcggcccacagctgctcccaaaaggagaccatggccgctggaaggctgcccacccatttttgattgaacagtcccagcaaagcatagctgaaaccggacaaaaggccccacagggcccccagccacagcgttccccctccttccaggggagtggccagcaggatgccgccgaaggccacaaaagccagcgtcacatcccgtccccggggcttttttccggtaaaaaggggctccagaaaagtgacgaatatgggaaaggccgaaaaggagatcagccccatggccacggtggaaacctggatggcctgataaaaggtgctccagtggaaggccagcaatgcgcccagagccgccagggccgccttggtgcgccctggcacggaccggggattctccttctggatcttcagccaaatgcggagggacagggcggaaaacaccacccggccccaagtaatgaccaaagaatgctggcatatcaccttgccgaacagccccgaaagaccaaacagcaacaccgccatatggagctgccagagccccggctgctttttcatggtttagcccttcttcttttccagaaatgcatagaccggcagaccgatcagcgtcaggccgatgcccaccaaagactgaacggggtcggagatcaccgtactgatgaggatatacatggcccccagtgctcccacaatgggcaccaccggataaagaggcacccgatagggaccttttttatccgggtgctttttccgcaggataaagacgcccagaacacccatggtgaagaagatccacagcacaaagaccaaaagatcggtcagggtgttgaaagagccggacaggatataaatggccgccaatccgcactgaaagatcaatgcgttggccggggtgccgtatttgggatgcagcgcccccagcacccggctgaaggggagctggccccggtggcccatggccagaggcacccgggctgccgtcatggtgtagccgttcatagcgccgaacaccgatatcataatgcctgcggtgataaaggcggcgcctttttctccaaacagggccaccgcagctgcagcgccaggtgtcgctgctcccgccacctggtcgtagggcagcaccatgaataccgccaggttaaagaccacatacaccgccaccacaaagagcacaccgaaggaaatgacccggggcagatctttgcccgggttcttcagttccccagccatattggtcacgccgatccagccgtcataggcccacagtgtgcccaggatggccgctcccaatccggcggcgccggtggcgcttcctgcggcaaaattcagctcaccgccggaaagcaggccgaaggcgatgatggccgccaccgggatcagcttgccgaaggtggctaccgtctggatgatgccgccatatttggtggacagaatgttcatccacaaaacaaaggccatcacgaaaatagccaaagccttttgctgccatgcccccatggggaaaaacaccgccgcataggtggcaaaggcaatggcctgggcggcgatggaggcgggataggaaatcaccgactggacccatcccaggaggaatccccattttttcccgtacaattcttccagatacacatacaagccaccggttttcggaatggccgaagcgatctccgccaccgacaaagcagcagccagagtgatgataccgccagccgcccaggccaccagggccatgggcaagctcccggcactttccagcaccacgccgggcttgaggaagataccgctgccgatgatcatacctaccaccagcgccagcgcttccaaaaaggtgactgattttttcagctgttctcccgcagagtgttctttttcttcttttctcatatctctctcctcttcgcttgcttttttcatttttctctttatcagatcaaataattcatattattatatcaaataatgcgtatgctttccaatcgttttttcaataaaatgaataaaatgcaaaaaatcccccttttccctaaaaaattaaaggaaaagggggattattatttgtgatatttgcttcctgcggcgatggaaaaggcccgatagatctgttccagcaccatcacccgggccagatggtggggaaaggtcataggggacatggacaggcgcagcccggctctttctttcaccttgtccgaaaggccctcggaagagccgatgacaaagcacagacgggaaatgccgctgttttgccatttttccattttccagctcagctcccggctgctcatctcctccccttcgatgcacatggccaccacatagctctgggacggaatggcggccagaatcttatccccttcccgctccagtccgccagggcgggtgtcctcggggatctccaccacctccaggcggcagaaggcactcagccgcttctggtattcctggcaggctttcagataaaaatcttccttcagcttgccggcgcagatcagcttgactcctgtcatccggcagccctgcctttcccggtgagggagaggggggccttatgaggcgccaccaccacctgcacctgctcccggagcccggccagccgcagcgcccgctctgtctcttccagcgcccactccggccggttgttgtgctcgctcagatgggccaggatcaccttttgcagcccatattttccccattctgccacggcctgggcggcgtcgtcattggacagatgcccctggggtgacaaaatccgctgcttgagataatagggatattccccgtttttcagctgatacacatcgtggttggattccagaaacaccgtctcggccccccgcagggtttcaaacacagagtccggcagatgccccaggtcggtgcaatagcccatttttccctcttcggtctccagcaaaaagccgcagctgcccgggcagtcatggggcgtgaggaagggggtgatgcgcacctccccaagccagaagggtgcatcgggcgccacggcctccagctggtcgtgggcgcactttgttttcagcccttccaccgtggggacagtggcatggatgggggcccggcagtgcttggtcagcaccggcagggcgctgacatggtcggaatgagtgtgggtgatgagcacatcggtgatatcgcccaacgcaatgcccagctgggacagggcattgcggatgtacttggtattggtgcccccatcgatgagcagggtgcggcctcctccctggaacaccgagcagttccccgaagaggaactggccaggctgtaaaaacgggtcatagtttccttcctttgtccttcaaaaatagcggcggcacggaaaacccgtgccgccggaacagatcatttctgcttgtcctttgccatttaccgggccatgggcaccgcatcctcttcggacacagtcacccggcggatatcggctccgagcccctggagtttttccacgatgttgtcatagccccgctcgatataggcgatctcctccacctcggtgacgcccttggcggccagaccggcgatgaccatagcggccccggcccgcagatcgcaggagcgcaccttggcgccggtgagctcgctcaccccttcgatgatggccactttgccgtccacctggatcttggcccccatccgccgcagctcttccacatagcggtagcggttgtcccacaccccttcggtgatgatgctggtgccttccgccagacacaaagcggcggccagctgaggctgcatatcggtggggaagcccggatagggcagggttttgatattgatgcgccgcagaggccctgtacggctgacccgcacggcgtcgtccatctcttccacctgggcgcccatctcgatgagctttgccgtgatgcactccaggtgcttgggaatcacattgcgcaccagcacgctgccgccagtggccatgacagcggccatataggtgcccgcttcgatctgatcggggatcaccgaataggtgccgccgtgaagttctttcacgccccggatcttgatcacatcggtaccggctcccatgatctcagcgcccatggcgttgaggaagttggccaggtccacaatgtggggctctttggcggcgttttcgatcaccgtctggccttcggccagagtggcggccagcatgatgttcatggttgcgcccacagacaccacatccagatagatgctggtgccccgcaggccctggggagcctgggcatagacaaagccattcttcacgctgacttcggcacccagagcttcaaagcccttcacatgctgatcgatggggcgcaccccgccgaaattacatccgccaggcatggccacttcggccttgtgatagcggcccagcagagtaccgatcagataataggaagcccgcattttccgcatcagatcctcaggggtgcggatgttgcgcatatggcggcagtcgatctccacggtggtggggttcatgctgcgcacctgggcccccatctgctggaggatctccagctggatgatcacatcgctgacctggggcacattctcgatgcggcagacgccgttgaccaagatggtggccggaatgatggccacgacggcgttctttgcgccgctgacggtcacttcgccccgcagcggtttatttccattgatgataaatttatccaaattcctcattctcccggcagtgtattccagttgctcccttgcaagatgccgccccccggcggcaagaagaacgacagagcttcgttcatcaaaaatttactgttgttttatatattttaccacagtcatcccagaatgaaaaacaaaatcccacagattttcacctaagttttcaccaatccccagggcgtatcctcgtgcacaatgaccaaaggctcattccaccggattctcccctgtgtccactgtgaaactttttccgcctgcttccacctgccagacaggaaaaagcaggtaattcccgttgccctgatcccgcaggcgatagctttcccgggcgctttccggcggctgggaaaagccttcctcccgccacaggcggcgcaggttcaccaccatctgatagctcttggccccttcgcccacctggcgaagctgggtatccatcagccaccggccctcggccacaaggctatttcccttcttccggcaggtgagggtacattccatcagttcttctcccgagggcatcccctggaaaaagaccacctgctccccctcttcctcccggcggcagttgtccatggggaagccggccttttccaaaagctcctgccactcctccccggtgagggaagactccgtaaacagctccagccgcacttcgcccccggtgtagaaggtaagggtgcccttggatgaagaaaaccgggagacaccgccgtcggtatcgctttcttcggtgcccagtagggcctgggccgccttcttttccaaagcggtatcccggcttgcggcgtacaccggccgctgggttcccaaactccggaaaatgtcttcgtcaaactctcccacatcctcctgcagcagggcaagggcctggtccatggcctggcgctgctgggcccagccgtggctcacctgccacagaagatttcccgccaaaaacaggttggtgcaaatgagcaccaccagcaaaatggttttggcccggctccattccatggcttatccctccttcaccgttgcatagctgagatagggggtgagcttgccctcctggagagtatagcggcactgaagccgcaccgcaccgctcccctccatggccgcagcggccagggaatagggcagcaaggttttttcccctgtctgggtcagggacaacaggctcatctccatggagacgatgaccccttcccgcacatgaatggtcacctgctgggaggaaaggggtactcccgaagcccggcaggaaaagaggatggtgtattctccttcttccgcccctttctgaatgcttttgagggacagatccaggggcgagcctgcactgtccagggcgtcctgggccacctgccagccccggccgatcagccccaccagggtgttctcgccgctctctccctccaggccctcgccgccgtccacggtgaactgcaccgttccgtctccgctgagacgcagggaatagttgccctggacgaataccgccatatcttctccggcggcatagcgcttggccaggtaggggttcatggagaagcactccagcaaagcgcggggcatctctccgccgctgacggcgccggtgatcacatcggccactttgcattcatacaccggcagtttgatagcgctgctgggcaccggctgatcgggggacagcaccgacagattggggtcttccatggcgaaataggagccgtcagggtcacattcctccaacgccgtctggagcttttcgctggcggcggctgtggaaaaccggaaccactccccctcctcggtctccagcagcaaatccacccggtcttcttcggccagaagcaccaggcgagagaaggccagctcgtcctccccaggggaggctccgctccaggagcgcatggccgtcagcggcacctggccgtcatattccagcaaaaacccctgttcctccaaaagcacacggtaatagtcttcccgctgtaccgtctttttttcccccatagagcccaaagcttcctccaatgtgggccggagcagggtgtagatggccgaaaccggctgctgggtgtaggcgtaatacagatccccctgctgaaaggccgacaccgccaggggataggcggcagggtcgctttcttcctcctgcacctggctcacggtgttctctccccgaagccaccgggacagagtgtaaaggggccccagggaggggtccacgctcacgcccagggacaccgaaagggtgaacagcaccgccatcagaaggccgtttgcaatcagggccgctgttttgatcttttctttcatagctgcccctcatggtccggcggacacaccggcaaagtgatggtgacagtggtgcctgcatccagctggctttccaccccaatggtaccctgatgctgctccacgatctcctttgcaatggccagccccaggccggtgccgccccgttcccgggagcgggccttgtccacccggtaaaaccgttcgaagagccgggggatgtcctcctgggggatgccgatgccggtgtcctgcaccttgatgaccaccttatcttcctgagagaaagcactgagggtgaccgtgccgccggggcggttatatttgatggcattggaaacgatgttggcaatgacctgctccatccggttccggtcggccaggatcaaaggcaggggttcttccagcttggtctctaaggtcaagccctggccccgggcctcgatgagcatggcgctggcaatattctgcacgatcagtttcaccggaaccgggctcatctccatatccatcttcccatagtccagctgggacagggtgagcagatccttgacgatatgggtcatccggtcggactcgttgtagatcacctggaggaaattgcggcgggtctccccgtccagctcgtccccggcgtccagaagggtttcggtgtagcccttcacattggtcaggggagtgcgcagctcatgggatacattggccacaaactcccgccgggaagaatccagcttcttctgctcggtgatgtcgtggagcaccgccatgatgccgctgttttcatcctccgccgtgccgaacatggccagcagaatcttgaggatgcgcttgtttgccgcatagtcgatctcgatgtactggccgccttctcccagatcgctttcctccacattcagattggggaacacctgggtataggtcagctccggcccgaactccatgcccagcatctgctgggccgccgggttcatatgaaggatatggccgcttttgtcaaaggccaccaccccgtcggccatatgagtaaacagggtgctcagcttgttccgctccccgttgacttcggccagagtgttttccagcaccttggccatctccccgaaggtgcgggtcaggttgccgatctcgtctgccgattccgcctgaggctgctgggaaaagtccccggcggcgatgcgctgggcagtgcgggtcagccgctgcaccgggtttgtgatggtgcgggccagaatgaagctgagcaaaatggccaccgccagaccaaacatcaatgagcggatcagaatggtgaacatggtccaggtcagctcatccagttcccctttgtcgtccaccacggccagcacataattgcccccatccaccggcagggccacatcgaaatagggggacagggcggtgatggtctgccccacttccccctccatggcggtgatcatattgggcgtcagctcccggaagggagtggcgtcccggctttccgacgaggtgaggaactccccggttttcccatccagaatatagaaattccggtgatcgtccagccccaggccgccgttataggcctccagcacctcttccatctggtccagatccccattgcaggcgctgagccctttgtccagctcctgcccccgcagggcgaaaaaatccaccatctggcgctgaaaatcgctgcggttataggcggtgaccgagttgaccagaaacacgcccaccacggccatcaccgccaccaccagcagcatcaatatgagcaccagcttcatttgcaggcttttcagcatggttccttccgcctattccttgttgaaataatacccggccccccggcgggtgatgagatagcgggggtcggccgggtcgtcctccagcttttcccgcaggcggcggatggccacatccaccgtgcgcagatcgccgtaatactcaaagccccacaccttttccatcagctcttcccgggtgaccacccgcccggcacattccagaaaatagcagagcatatcaaattcccgctgggacagctccagggcctctccgttcttccgggccagacgcttttcggtgtccacctggaaggggccgccttctttcttttcgcctcccatgctgtcctgctggtcggccaggcggcggcggatgttggccttcacccgggccagcagctccttgatggaaaagggctttgtgatatagtcgtcggcgccggtatccagccccagcaccttgtcccgctcttcttcccgggcggtgaccatgatgacgggcacattgctcttttcccgcaagcggcgcagcagttcaaagccgtccatccccgggagcatcacatccagaagcaccagatccacctggggagaaagggccttttccagtcccccttttccctcataggcttcctccacttcatagccttcccgtttcaggttgaaggcaatgatgtccacaatggccttttcatcttccacgatcagcacttttgccatggctctctccttctctttacaggctcaaaagccccttttcctgggccagaaacagggcgcacagggtcttggcatccccgatctccccccgcctcagggcatctttcagccggggaagctcccagaactccccctccagaaattccccttcgtcgggcctggcctggcccaaagacaggtcttccgcccaataaaagtgcattttttcctccagcacatcgggagaagaacagtagacccccagctcttccagcttaccggcggaaagtccggtttcctcaaaaagctcccgccgggcgcactctttcgggtcttctcccttttccagctttcccgccggaagctccacacattccttcccctgggcatagcggtactgacgcaccaggggaatcttgccctgatactggcacaaaatcgccaccgcaccccgatggcggcagatttctccttccccagccgggtatacatccaccaaaacgcctcggaacaaaggctcgttcttcttgttttccatcttcattcctcccccagggcccaaagggccagggccgcggcagtgcacagatcgtccccttccagcccttgggacaggggcatccagaaaagcccttccggcgcttgcccgcttccctttccggcaaaaaccagcactttttcctgcagcaccgcaggggagggcatgatttctcccaaaaaccggggctcctctccgcccagggcggcaaacagccgcaccgcggcatcctgcgggatttcctccgaagccagaggagtgcggggcaagcgcccctttgcatcggccagcgcctgacgctgctcatcatagaccagggccagcacccggtcaggacggcaaatcacttcccggcggctctctcttccgtcctccagctccacccggtcctggcggatggaaaagctgggtccttgatacaccgtgcgcttttccaggcacttttcctcatgcattgtccaggccctccaagtggcggcgcaccagatcaaaggcggtggaagaggccagacggcgcaggctctcccggctctggcggggccgcaggatgcgcaccgcccaggtcctgtcccccgtgctgatgcccacatagatcaaccccaccggcttttcgggagtgcctcccccagggccggccacgccggtggtagaaatgccgatgtcagcccccagagccttccgcaccccttcggccatctggcaggcggtgtcttcgctcactgccccttttgtaatgagggtctcatggcgcacgcccagcaggttttccttcacttcgttgtggtaggacacaacgccccccagataacaggcggaagcgccgggcacatcggtgatgcgcttgcccatcagcccgccggtgcagctttccgccgtggccagggtcaggccccgggcggtcatttcctgcaccaccacctgctccagagagtccacatccaccccatagaccacatcccccagcacctgcctcacttcccggacggcaggttcggtcatggcaaaggcttcctctttatttttccccatggcagtgatgcgcaccaggcactctccctccttggcatagggagcggcggtggggttttcccaggtgtccatctggcggctcaggcgggaggccatttccgattctcccatgccgaacaccttcacataccgggagcaaagtgccccgccccggcgcttttccaaaaagggcatcaccttttcccggaagaggggggtgcactcccggggcgggccggggagcatgatgaccaggcacccttccccttcaaaggcacaggccggggcggtgccccagtcgttttgaaacaccgtgcttccttcgggcacatcggcctgtttttcgttgtttttggtcatggtgcggcctttgaaatgctcccgcagccttgccatggactcttcgtcccgcaccaggcccttgccgaaggcggcggcgatggtctctttggtgaggtcgtccgccgtgggccccaggccgccggtggtgatgatcagatcggctctctgtttggccacttccagcacgcttttcagccggtccgggttgtccccgcacaccgtctgaaaatagaccccaatgcccagttccgccagaccctgggcgatcatgggggcgtcggtgttgacgatctcccccagcaaaagctcggtgcccacagcgataatctctgttctcacagtaatggcctccctttttattccgatctgtatactttttcttttagtcttccgccttgcagacgacctgctccacgccttccagagccttctggatcaggccctccacatccagcttttgttcttcttccagcaccttgggcagcttgggcttggtctggggatggcggggggtaaagacggtgcagcaatcctcatagggcaaaatggaagtctcaaaggtgccgatctgccgggcgatgaggacgatctcctccttgtccatgccgatggccggacgcagcaccggcagctcacacacggcgttggtgacgccgatggcctccatggtctggctggccacctggcccagactctcgccggtaatgagtgcgccgcagtcctgacgccgggccacccgctgggcaatgcgcatcatgaaccggcgcatgagcacggtgaacagatcctcctgacagtttttccggatctgatcctggatttcggtaaagggcaccacatggaccttgatggggccgcagtaggacgccagaatccgggccagatggagggtcttttccttggcctcttccgaggtatagggatagctgaaaaagtgaacgccctccaggtaaagtccccgtttggccatcatatacccggccaccgggctgtcgatgccaccggacaaaagcagcatggccttgccattggtgccggtgggcattcctccggcgccgtggatgcggtcggcatagacaaaggccgccttatcccgcacttcgatgtgcacctgggtctgggccccgtccatcttcaccttcatccggggataggcggaaagcagcgcgccacccacctgccgggcgatctccggagaggtgaggggaaagcgcttgtctgagcgcttggcctggcagcggaaagtctgggtgtgttccatggtgtctttcaggtattccaccgcggcctgacagatgctgtccatgtccttggggcagctgatggcccggcagatggctaccacgccgaagatcttccggcacacttccaaagcctcttccaccggcgcgccgtttttgggctccacatacagggtggactggatggcatagacctcatattctcccagatgggccagacggcggcggacgatggacaagagccggtcctcaaaccgggcccggttcagccctttgagcaccagctctccgcatttgagcagcaaaacttcttgattcatggtatttctcccgaaggcctagaggaaaaatcccagggctttctgaagccctgccaaaaaggccttcacatcctcctgtgtattttccgggcagaagctcacccgcagcgccgcatcaatggcggcggccggcagcttcatggcttccagcacatggctgcgcctgccccgggcgcaggccgatcccccggacacatagaccccctcgtcggagagcacccgcagcagcacttcgctgcggcccttttccggggaaatattcacaatatgggccgccccgttctggggggaattgatgcgcaccgggcagggcatggctgaaagcccttctatcaggctttggcgcagagccgccatatgccgctggctttcctcccgcttttccgcccgcagggcactggccacccccatagagacgatctggggcaggccctcggtgcccgagcgcttattcccttcctggccaccgccatggagcaggggacgcagggagcggggatctttgcagtaaagggcgcccacccctttcatggccccgatcttatggccgctcaccgacaaaaagtccacccccccaagggagatgggcagcttgcaataggcctgcaccccgtcgatgtggcacaggcaatgaggggccttttctttggctttttccatggccgctgcggtgggcagaatggcgccggtttcgctgttgacctccatcatggtgagcagaatggtgtcagggcgcaccgcttccagcacccggtcgcaggacaccgtgccgtccttttccggcggcaccagggtcacctggaacccctcctgctccaaggctttcagggtatccagggtggccttatgctcgatctgggtgctgacgatgtgccggccgaaggcttttcccttcctggcggcgctttggatggcggtgttgatgctctcggtgccgcaggaggtgaagatcacctgctccgctttgcaccccagcgctccggccacctgcccccgggcctgctccatggcctcccgggcctgtttgcccatggcatggagagcggaggggttgccgtaatcctgccgcatcaggcggagggcggcctgggccgcttcctccaacacctgagtggtggcactgttatccagatagtggatgttttccattatttattgcccttgccgaagctgtctttcagggtcacggcccggttgaagaccagatggccttcgccgctgtcccggctgtcggcgcagaaatagcccagccgcaaaaactggaaccgctccgagggtttggctgaagccagggaggcttccagcttgcagcccttcagcacttccagggaattggggttcatgcactccagataatccttgtcggcggcatcgggagagggatcggagaacaggttgtcatacagacgcacctctccatccacggccgtggcggcatccacccaatggatggtggcgcccttcaccttccggccatcggcagggttgccgccccgggattccgggtcataggtggcggtgatggcggtgatgttgcccttttcatccttttcgcagccggtgcaggtgatgagataggcccccttcaggcggcactccggtccgccgggatagagccgcttgtacttgggcaccggggtctccaggaagtcatcggactccacatacagctcccgggagaaggtcacttcacgggtgccggcttccgggtcgttggggttgttttccaccgggaaggtctcgctctggccttcggggtagttggtgatgatcagcttcatggggcgcagcaccgccatggcccgctgggctttttcgttcagatcttcccgcaggcaatgctccaggaagccatattccaccgtgctgttcaccttggccacgccgatgcggtcgcagaaattccggatggattccggggtatagccccggcggcgcaagccgcacagggtgggcatccggggatcgtcccagccggacaccttgcccccttccaccagagcccgcagcttccgcttgctcatgacggtgtggtcgatgcccagacgggcaaactcgatctgacggggcttgtggggcaccgacacattatcgatcacccagttgtacaggggccggtgggcctcaaactccagggtgcacagagagtgggtcaccccttccagggcgtcctggatgggatgggcaaagtcatacatgggatagatgcaccagtcgtccccggtgcggtgatgatgggcaaacttgatccggtagagcgccgggtcacgcatattgaagttgcccgaagccaggtcgatcttggcccgcagggtcatgctcccctcggggaactcccctttccgcatccgctggaacaggtccaggctctcttccatgggccggtcccgataggggctaattgccggggtattcacatcgccccggttcttcttcacttcctcaggggacagctcacacacataggccaggcccttgcggatcagttccagagcgtattcataggtctgctcaaaataatcggaaccatagcagaacttgtcccaatcaaagcccagccagtggatgtcctccttgatggcgtccacatactcggtgtcctctttggtggggttggtatcgtccatgcgcaggttgcacttgcccccgaatttctccgctgtgccgaagtcgatgcacagggccttgcagtggccgatgtggagatagccgttgggctcgggagggaaccgggtctgaatggcgtcgcatttgcccgcttccagatcctccttgacgaactcctcgataaaattgctggtgacgatgtccttttccatactctattcctttccggagggttccaaagccctcctttgaaatggactcccctgggcttcttttgatcgtcccccagggggtttcaaacttgatttgttttattttttcaggaattctttcattttttccaggcgggagaggctgcgctccttgcccagaagggtcatgatggaccaaagatcgggggagtttttccggccggtgatggccacccgcaccacattgctcacatcgcccacatggcctttccagccggtggggtcctgcttataagccttgacctccggacagaagcccaggccttcgcagatggccttgaccccatcaaaccaggtgttcttgtcgggggcttcctcataggccttggcataggtgtccagaatggcgatcatgtcctctttctggaggttctccggcaggtcgtattctccctgccatgtttcgtcatagaaatagctcacataatcccgcacatcgctccacttgcggatatccttccggggctttttgccgccacggtcgatggcaaagatgccctgggcatagtctgtgtcccgattgagaagggcatacagctcctcgtcgtggccctttgcccattccagcacatcctttgtcaccttctctgcatcaaaggcgccgatgacgccggcggacacatcggccagcttcaccaggtcgaacaaagcgcccgactggctcatcttgttcagctggagcttgtaatcctggtaaggtgcggtcttgttctgccgtctccaatcctcaaagggggaattggccaggttgagcagatattccagcacggcttccttgggatagccctcgtccacgaagtaggaaacggcggcttccgggtctttccgcttgctcagcttccgcttggctccattgtcctccttcatcacaggggagacatgggcgtacttgggcggcttgagtcccagcacatagaagagctgaaggtgagtgggcaccgaagagacccattcatcgctgcgcaccacatgggtggtacccatcagggtgtcgtccacggcgtgggcaaagtgataggtggggatgccgtctgttttcagaagcacgatatcggcgatattttcgtccatctcgatctcgccccggatcacatccttgtatttgatccggccgccgggcttgcccggcgagcgcaggcgcatcacatagggtttacccgccttgatgttctcctccacctgctccatggtcaggtcacggcagcgggcgtaggtggtatggtagccgggcagggccttttccgcctcctgctgtttgcggatggcggccaggtcctcttcggtgcagaagcagggataggccaggccgcgcttcaccagttccttgcagaaagcctggtagatcggaccacggcggctttgctggtaggggccgtaatcgcccttttcctcggtctggctcatcatgccttcgtcaaattccacgccgaaatcacccaggcccgagacgatgccggtgatgccgtcctccacttcccgcttcttgtcggtgtcctcgatgcgcaggatgatcctgccgccgctttggtgggccagccgctcgttgaccagggcggtgaacaaaccgccgatgtggagaaagccggtggggctgggggcaaaccgggtgaccatggccccctggggcaggttccggggaggatagatctctgtgagatattcctccatggttttgtcgatgtgggggaacagcagttccgccagtttattatgatccattacacttccactccaaatttcccgggaaaattttccctgggcacagtttgatattttattatatcctgtttctccccacattgcaaccgggcggagtgcctccgcaggcatactggccctccccggacccaggcggcacaggaacctgttattcggtcgggccgctggcctgggtgtatcctggctatctagcggcgtgtcgccgctgccatactgcgcagcgccaagttttgtggagaaaacttctctatatcacgctgcgcggcggcatttgctgcacaaggttttaccttaactggagcggcgtgccgccgggggcatactggccctccccggacccaggcggcacaggaacctgttattcggtcaggcccctggcctgggtcagtttgtctgcgcaacctctgcaccgacccgaccaaaacccgggccgctaaccctccccaactctggggagggtcaatttgcccgcacaggcactgtgctgccggggtgctggatggcttgggcggcagcccaggcagccttctccaaagcctccgggatactctgtcccatcatgcggctggccacgaaaaagccggtgaaagcatccccagccccggtggtatccaccaccggcacggaaaaggccttctggaacacccattccccctgatgcaggcaccaggcgccccggctgcccagggtgagcaccagagtatccccctggaaccactcttccagcccacggcgcaaagcctcttcctcccgtgcttctcctcccagcagctgacggccctccacctggttgagcaccaggcaatgcaccttttccagacatagccccagcagatccggttccatgggcgaagggttgaaaaccacctgcattccccgctttcttccctcctccagcagcaggggcagacagctgatctcgttttgcagcaccagccagtcccccggtgcaaagtgctccaaagtctcctgcacctgctcctctgtgatgcaccgattggctccgccgtggagcaggatgcagttttcccccgccccgtcccgctgaatgacggcggtgccggtgttcccctccatctgccgcaccagggaaatatccaccccggcctggcgaagggtctccaggagaaaatccccgtcctctcccacgcttcccgccatataagtttcagccccggcccggcacagggccacggcctggttcagccccttgcctccggccagccgctgccgggacagggcgctgagggtctcccctgcccccacaaaatgaggtacctggtagatataatcaatgttcagcgagccaaagcacagcacctttgccatttttctcacctctcggaagagtataaaaaaagacagcccgcggctgtcttttctatggagcgggtaaagggaatcgaaccctcctatccagcttgggaagctgacgttctaccaatgaactatacccgcatggagtaactctattatagcgtatctttggaaaattgcaaccgctttttttgaaaaatcccgtcgaaacggtaaaaatcccccggcgctgcaagatatagcaaagagaaaaccgatcacagaataatacagtatcaggcgcttttttgcccttctttttcaatccgcaaaaagcggcgacctgtgcgtcggtttttgcacctctcaagagaccggtgtgcgccaaaggcgtgcgccgtgcctcttgcaaaaactcgaaaaagcggctaagccgctttttcgaaaggcaaatcccccggcgctgcaagatgcgccgggggattgaaaatagctcttatttggagcagaatgcgtgcatatgcttcatcagatccacggtgcgggcggcgtagccggcctcgttgtcataccaggataccagcttgacaaaagtgggtgtcaaagcaatgctggccttggcgtcaaagacagaggacaccagcacaccggcaaagtcggaagaaaccaggggctcatcggtatagcccagaatgcccttcatggaaccctgagaggcttccttgatggcctggcagatctcctccatggtggcgggcttcttcaggttgcaggtcaggtccaccaccgacacatccagagtgggaacccggaatgccatgccggtgagcttgccgttgagctcggggatgaccttgcccactgccttggccgcgccagtggaggcggggatgatgttgcccgaggcggcccggccgcttctccagtccttgccggagcgggcatctaccactttctgggacttggtcatggaatggacggtggtcatcaggccttcttcgatgccgaaggtgtcgttgatgaccttggccagaggcgccaggcagttggtagtgcaggaggcgttggaaacgatgtcctcgccctggtacttgtcatggttgacgcccatcacgaacatgggggtgtcatccttggaaggggcggacatgaccaccttcttggccccggcctggatgtgggccatggccttttccttggtgaggaacttgccggtggactccaggatatattcggcccccacgctgccccagggaatatctcccggcttttcgcagttgaagaccatggtctttttgccgttgacggtgatggaattttcgtcccaggtgatgtccgcatcccatctgccgtgcaccgtgtcatacttcagcatataggctgcgtattccggcgtcaggctgggatggttgatggccacaaactccacctcaggatcgtcgatgccggccttgaaggccagcttaccaatacggccgaacccgttgataccgatttttacgctcattccagatacctccgcattttcctgcatttgcatagggcgggcattttgttcccgcgcataattcctattcttgattatacactatgttcccatggtttctcaagcacaaaggaagaactttcccgctggaggaagtttttcttgcaaacaggccaatcccatactagaatggggatggatgttatgcaaaatgtaccagtctttgctaaaaaaaagacaaggatgctccccatacccgccggaaaggaggacctgccttggaaaacaccgctttgggggacatgacctggttccctgccgccgatgactatctgatgatctgcagcccgtcgggccgcatcctcttcgtcacaagcagcctgcgttttcagctggaagaggacttggtaggccgctctctcaacgacattttccctgattccctggccgctcagatcgtcaccctggcccatgagggccagagccattcctttcacacaaagctccagggcaaagccgtccggtgcagtatgacccccaaagaagggaatatgctcatcaccgtctttttcgcccaggaaaaccatcccccggccatggccctcagcgccgccgagctgctcagccgggagatcagcagcagcctgggcaccatgttcgccgcctgggatgccttgcccccggcccaggaccaaaaaagccaatatgccaaaagcgtgctgcgtcaggggatgtaccggctgatgcgcatggg

SEQ ID NO: 1720 - DNA, 4595 bp, Unknown
  16S sequences of unknown bacteria
tttcggcgcataagcgaaccccgctgcagagcaattctgcggcggggttttgtgcattttatggggattgcggctttctgttctgcagtaatcgttaaatagccgagtaatcgttgaactactggggtattcgttaaacagccgagttctgataatactccttatgagaaaatcggcgatgaagtacggtcgttggctgttccttttgatattcccgatggttgggtatgggtatatccaacggacatcggcttctttggctctggaaaaacaccagcaccagatcaattaagcaaatttggaacgatcccatattttaaggtcgcagatatgaatgctaccggaaatgaagtctatttgtgcaattctaattcgtttttgaaattgccaaattcgatgaagctattttcaaagggtgcagtggtgtacccccaaaacggtggtgcggtgtttacaaacaagaaacggatattaggacaagattccttggttgaccttaatacgggtagctacacgccattttctcaaatggatgagaagttcttctattatctgttttcaacagttgactttcaaaagtattacaagggaactacactgcccacggtggatatggacgctgtgcaggaaattgtctgggggctaccctctctggctgagcaaaagcgcatagtgacggcaatcgaattaactttgccgttgatcgacaagtacgaagaaacgcatagtcagttatctcgtttgcagaactcttttccagaagccctcaagaagtcgattttgcaagaggcagttcagggcaagctggtaccccaagacccgtctgacgagcctgcagaggctctgctggagcgtatccgggcggagaaacagcggctcatcaaggaaggcaaaatcaaaaaggacaagcacgaatctgtcattttcagacgggataattctcattatgagaagttgggcggtgtggagcgctgtatcgacgatgaactgccctttgagataccggattcgtgggagtgggtacggctcggaaccgtttttcagcataacacaggaaaagctttaaacgcctcaaatcgggacggtgaaaagctcacctatatcactacctccaacttatactgggatcgttttgttttggataatctcaaaaccatgccctttacggattcagaggtcgataaatgttacagtacaacagggcgacctcttagtgtgtgagggaggagatatcggtcgtgctgctatctggggaagcaacaaacccatgcgtattcagaatcatattcacaggctagcagaaaaagaatatgggaaactaattatctttttagactgccactctaaacttgacacgtttttctcttttcttttgctttccctgggaatcggagttctatgcgtgttggtagtttttttcttggtatctgttctttccaaacaggcaattaagccaatcgtgcaaaacatggaaaatcaaaaacgttttattactgacgcaggacatgaaatcaaaacgccgttgtctattatttcggccaatgcggatgtgttggaattaactggaggaaaaaacgaatgggtagacagcatccgcaatcaaacaatgaggctgaatggcctggttcaggatctgctgaccttgtcccaaatggaagaagatcaaagcgaatatgccttttcgccggtttctctgtccgatatggtggaagcggtagcggcttcttttcgtacagttgctttttcccgacagatatctttttccgtatcggtggaaaaagatattgtgattgatgcacaagaaaacagcatccgaaaactcttatctgttctcatcgataacgcagttaaatatgcaggttcgtccgggtgggttgtcatccgcttatgggcagaagagaaagtagttcaccttgacatattaaacagctgtgaaaatgtggagaaattggattttcaaaagctttttgaccggttttattgtgcagatcaatcccgttctcgtgtgacgggtggatatggaatcgggctttccattgcaaaagcaattgtcgagatacacaaggcaaaaattgctattcggcaggaaggggaaaaaggaatctgcttttctgtccttttcccgatcaaggaaaaaaatagtgagaagaaaaaacagctgggataacccggctgtttttctcgttattctaattcctgattctctcggatcaattgaataattccctcttcaggataagacaaaagcttgccaaatcggtaggcaatttcggttcgggaggctcctgtgtaagcattttgcaaaagaagtcgttttttgtccgatttgatacagagatattcttcccaatcctcttcttttttccagtagacaatgtggtaagtaccgcgatttaaagaaacagggaataggtctgtcagtaacgggtcgtcttctgcataaaaatgcgttccatatttctggcatatttcctgagaaaagggaattaggtcatttctctcctcgatagaagcagatggatgacttaaagcaatttttttaaaccggcccgtaccatttcattaaaacaatcaataaccccgcactgataggaatatgaatcaattaatttcatttttgtttcctttcacggcaatatttgtatcgtactgccattgcgtcctgttttcacctgaatttgactgggaatttgctcttttagctgtggtaaatgggaaatgattccaaccagccgtccgtcatttcccaaagagagaagagcttccaccgcgctgtccagcgattccgcatctaatgagccaaacccttcgtcaatgaacatcgtgtcaatcaccaccccgccggcatacatttgcacaacatctgcaaggctcagtgccagagccaatgctgttttgaacgactctccgccggaaagggttgaagtagggcggatttttccgctgtattgatccaaaatttctaagtccaaaccggaagaacggccaaatttttctcggtcttttttgcggcacaacagataccttccgccagtcaagttttctaaacggtgattggcaaatgaaacaatcgcatcaaaatagaaccccaacacataccgttcaaacgagatgcgcagatcattgtttccgctggcaatacgaaacagatcattgacctgccgatagtaccattcgcttttttctattttttgataaatagattcgatctgttttttatgagccatatcttggctcaactgcgattgaacaacagaagcttcttttcgcaatatttcaatttgtttttgaagggatgcttcttgtttcaacaaatctgtaatgtcaataaaccttacgccattcaactgttcttgtaattgacaaatgcgcccttctagcgatgtcatatccagttgatattgatggatttgtttttcgatagcagaaatttgtccgatttgcacacaggaatccaaaaagactttctgaccgcctggaaaagaattgtacaaagaatcagaaaacgtcttttgagtggtggaaattttttcctgaagaagacgcattcgttcttgattttccgtaagggactgtttgacagaacgaatctgagatatggtctcctgatattctttttgtgtcttttccagaagaacatccaactgcttaacactgctgcgaaaattttgtattttctgttccagttcctcctgagacgtaatgccggatggaagctttttttccagcgagagaagctgttcttgctgcaagataagcttactatggcaggattccaatttttttctacgatcttcacgatatgcttgtatggcatcctcatctgataatagaagaggatttgccaaaagaccttttggggcgcataattccctttgcaagcattgcagtttctcttccgctgttttctgttccagcaaagtttgatttaaaatttcagccattctttgttcttgcgtctgagaatcgttttcattcaggaatggggcgggagaaaaagcgttttttatttctttgtattgactaacgattttctcatttagctgaaataattgctgagaagtatgttcggccgcatcatgataagcacggagctgttcctgggttggcgggttatttttcaatggcgcaggggaaggatggtcactgctgccgcaaacagggcatggagtattttcctgtagctttgaagcgagaattccggcctgagcatctaaaaaaagagtatagttttgcagatagactgttttttgctgctggtaaagtgggagtagctgttttttttgtgcaattgtttgcagtaaaacacggcaaatttctgagcggtccctgattttagagatttctttttcttgggtctgacaaatggccactttttctgcgtaagcaaattcattttcgttttgaacaatttctttcttcaattttttaatggaacgggataataaatccttttcatccaacaaagaagaaaaactttgtaaagaggcaatggccgataagaggctgtctttttggccggatttttgtttggcaagcatccattgtctttcggtctcttcacttttggggaaaagctttgataattccgcatt

SEQ ID NO: 1721 - DNA, 32759 bp, Unknown
  16S sequences of unknown bacteria
tggaccgtaacggcaacatcgtgggcgaggcgatcctgggcggcatcaacaacgaaacccagatgaaggtgcttcaggatctcattgacgagacactggccagagatatggcaacgctggacaaggacatgatgatgaagccagacggcaactaatcggcaaagcggtgcagacaacatcccgcgcgtaagtacttcccagtttgttcagattcttcggcggtgagtcccagaccgatggcattctttcgtggacgatgggactgtagcccatgatcctatcaaaacccagtccgggaatgtgcagcacatcctccgggcgcagattcacccgctgtccgctgccggtggaataggtataggtcagcgtacccacattgtctcggtctacttccatacgatccggcagcagcggataaagtccgagagtctggctccgactgctgcggatgatctgacagtaggcgttgtcccacagcagcagatgcgcaagcagcgtttccctcaacacaaaggaggtcatctcgctgttggggttcgtcatgcagaaccggatacagtggatgatacattgccttggcgctgccttcgccctgatcctgatacacatccagcgtcaagctggcgatggtttccgcgatcactcgaacacaggcgtaaaccgtgctcatctgaatggcagtgctcgccgtgacagatttgcccgccgcgctggagccgaaatagaacgtggacgctgaactgaccgaatcagtcgcgccgggcttgtcccgcgcgcggaacagacgagtaaatggatttttcatggcactgctatcctttctgactccaaaaaagcatggaaaagggcgcttcagctcaatgccaaaacgccagtgtcgataggaaatgatatgatggatcaggggtttttcgcgctcttgcgctcatcgtttgccacgttaccgctggttttccagagtcggagacgcaggtatttcgagtttgtccaaaacagcggccatgcctgcctgccggttccaatggtcgatccgcgcgtacagcacccgcttgacttcgccgtaggggattccgccttttgcctcaatcacctcgtagatatgctcgatcagctgctgtttagagccgtgcaccggcagctttccgcgctcacgcgcaaaacggtcgtactcctgctacgcggtttccatgatccaggtcttctgtttttccttcaggtggctccactttttattcgtctgaaacagctgaccattgatgcgcatgtgattcttcataatttctgttcaaaatcttccatgtcgctgaaaaagcgctcaatgtaaacgacgccctgcacctcatcgactcgatagatcagcagatagccccggatgaacgccttcctgtagccgcgtctggacagcagcttatgctggcagagtgcatacaggaaaggcgttttttcaagccgtgtatatggtctcctttcgccaagttgttgtgtggtaactcaactttagcacatgagaccctatctctcattcctttttttcgactgtccaagatgtattgtactcctacaaaagtgccgaaaggtcagccgactttctttttttgcttccgccgaagtccgcgaagcgtcaaaaaaaacggacatggggttcgttcaccgcatgtccgctcttattttgatttattttctgcgtctgagcatgaagcaggccgccgcggaaaccgccagcgccgcgccccaaagcagaacggggctttcgtcgcccgtcttcggcagattttccgcgctggggagctttttccactccgccgtgagcgtcatatctcccgtgacggtgatcgtttcgcccgcgtggtacatcttctcgccgtccttccagccgacgaaggtatagccggttcgcggttcttcgctaagcgtcaccatttggccgtaatccaccttttccgtccgcgtttcgccgttcagcagaacatatgtgaccgtgaacgtccgggcttcccaaacagccgtgagtttcatatcttcattgacggtgatgttgacttttccgtcggctccggccggatagctgttccccttatcgtccttccagcccttgaacagatacccttcctttgtgggcgcttcgacggggacggtcgtgcccttttgcaccgtttgactgacgcttccgcctacgccgccgttagtgtcgatttcgatgcgcaccgggcttgctttatacgaagcgacaagcgacaacccgccctttagctccacacctgcacccaccacctcgccgttttcagagggcgtatatcgcgggttgtcgttataccagttgtcaatttttatgccgctgtcgtgatatttcgcgcccatgcccgcagcgttgggcagtttgattgtagaactgccatccagacaaatatctgcgccgtgtccgtctgccgtattgttgtaaatcttatttgatccggcggaagcattcatcgacccattttccaaataaataccaccgccgacatagccagtaccggtcttggttttatacgctttattgtcaacgaccgtccagtttgttatcggttcttcttctttaacccttgagtctctcagcgccacgccgccgccatatgctgctttattgcctttgattgtgccgccgctgatggtgagggttgactgatccgcaaacaaaccgccgcccttacctgtatctgacacaaaacattcgctgattgtgccgcctttgatgttgagggttgaaccgaccacatacaaaccgccgcccgcgcctgccgtacatccgctgattgtgccgttgttgatgttgacagttgaagatttttctgcatataaaccgccgcccaataatccctcacatccgctgattatgccgccatccatgataaatgtagctttataaagaaagatgccgccgccatcattcccgcttacgcaatttagaatcttgccgcccagcatgtggaatgttgtccccgaatcagccattactgcgcggctacacttttcaattacgccgccatgcatgttgaaaactgactccgaacccataatcactacgcaggcgttgcccgcaaactgccaattttgcagcgtcacatgctcgtacatattcgcggttgccccttctaatacagatacaaagccaccacttgtttttccgtcaatcgtcagcgttccatcgtaaccgttcgcgcccaaattcaggacagttttttctcctgccaccgtaattcctgcgtttgaaccttcaatggaaatcttacgatctccgcccttgctcttgatggtcgtgttgcgcttcaatgtatggttgactgtcaaggtgatatccgcccacaattcgatcacgttttcatcatcaacgccggatgcgttaatatttttaaccactttggcaaaatcagtatcagccgtgaccgtatgtatattcgtctccgccatggcgcgcggcgccgccagcgccagcatacagaccgctatgcccagcgccttccaaattttcctgttcatagctttctccctttccttcggttcattgttttcctatatacagcctacaaaatagataaggatattataacacatcgacattcttttttcaatctgttttattcggttcttcacgaaccggcaatgggatatgtatagacgatattcttgaaatccacggcgatttgggggatgatatggaggatacccagactcataaagacatgaactggatggagaaaaatatataaccgtcgatacggggttcgttacaaacagcccatcatccactcggaaagaggcagagccatcggccttttccacgctgtgacgaatgcttgcggagtttaacgctgttggacgatatttgggacaaaaccctgccttgtggacgatatctggaatttcactgttgtgaaagccgagattcccggcagtttacgccggaaaacagatatgtcggcagggcatggctcagaatcctctgcccgcgcgagggcggtttcaaaagagttaaagcagtccatgcccttcgcgcagggcacgccgtttgcataagggtggttccgcttccgttgaagcgcgttcctgccggaagctttaaatatacacgggagggcggaaactggtcgcgccctcccgtctgttatacactgtagagaatcaggaaaccgaaatgaggcgaagcgccatggcagggcctccgtttgtcgtgaagtccagcgtaaaggttgcttcatcgccgttcagcgtgtggggaagcgctgtttccacgccgtccgcatccagcagcatcagcgcatagccgtccagcattgccgcaggcagcatgatttccacctgtcccgtgggcagcgtcagtcttccgccgtactcaaagcccacgctcagcatgcgctcgccgttttgcaaatcgccgatgcgcagcaccagctcgccgcgcggaagacgctgcgccgtcgccttcgctttctcgatcagggtcaatcgcgcaccgtcgctgacctcgccgcagacgggacagagcgtgaaatcataagcctccgcgttcttgagcagcaggcggcagacaagcggctcacagagaactttccccgtatgcctgcagccgcttcgccggcagtcggcgctgctggcagcatcgccgttcggcgaccattcgccgtaccagtggccgcggctggaaacgacggcatcggtatagctggccttgcagcgggtacaggtatgcagggtataccccgccttcgtgcaggtgggctgaaccgtgcgggcttcataggcatgtcccagcgcgtcaagctcctgataggtggtgtaatcgcagttctcgcaggccttataggcattccagcctgcctcggtgcaggtgggagccttgtacccgcggggcaccaggtcgtggttgttcgggttcttatcgccgctttcaaaggtatccggcgcatgatagccgcactcggaacaggacctgtaatatacagccccggatacgcaggtggcttcggacttgagatgctttgcgtcagccagctccacgaatgaatgaggcgctttgctttggctttcgttgcaccgaatgcaggtcttccagtgcccgtcggcgtcgctcgcccagctaccgtcaagcttgtggcttaccgtgtattcttccatgcaatcgctgcaatagcccgtttccccgcaggagagcgcgtcgaagccggagcaagcttctgtttttttgtgggtggaatcatgaagacagatataggtgtgggtgccgtcgccattggagttcgggaacctccgccatgcgtgcttgtccggggctgtttccccataggtacccccgcaatccaggcacatctcaggagttgtgcaattcgctgcctgaaaggcgcggcagtctgccgtagcggtgtggctggagtcgcgcttgcaggtgcgggtgtgggttttatctccattgggcttccatgcgccccagtcatgcgccgtcgagtaatccccgccgcacacggtgcaggcggcagacccggcgcagggtgctgtgctgaaggtacaatccttcgtttcggcgtgtgaagcattatgcttgcagacgcgggtgtgggtgccgttgccgctggacttccactcgccccagtcgtgcggcccgtattcaccgtaggacataagacaagaagtacataccgcaaatttcgtgcacgtggctttgtactggggtgtatctatgctccaatgattctctgtaaactcatcatagcagcggtaacagtacagcgtatggtaatctttttctcttttgcgtatttcaaaggtattcccttcgcaatagtcgccgttcaacctgatatgcgcagccatcgccgtggttgctacaaagagcagcgcaatcgccaggagacatgtaaccaaccattttttcatgtttttttcctcctcaaatttcttactttctctgtatcaaaaaccgccggacacaggcaaaaagcccgcgcacggcggttgattggtttgatgctatgaaaaaagggcggagctatcctatggctgtatgacggtctcaggatcgcagccatcgtcatggttgccaaactcccttctgcaacagtacagaacacgaatctaataatattgccccttcataatatatcagaagatgcacgggttttcaagcgctccatgtccgaatccgtgcaattatcacacaaattttaccgccgatcggaggcgaccgctaatcaagaacagacctcgtgaccacgcgccgcctgtccccccgcctgtttatcgcgatgcgcgacggcaagagaatcgaaagcggaaaccatgaagcgttgatgtataagagttgcctttattcctgtggcggcaacacggcgccattttatgtatgctttgctcgaaatgcgaaaatacagcccggcggccagcaggagggacagggcatccgccatcggctgcgcccagacaagacccgtctcatggaagatcgcgccgaggacgaacatcgccgaaatgtagatcagcctctgaccgaagatattgaaaatctgtctcgcaaagagacagcgacaatttctcgatacttcggacgaaaacttgcattgtggacgataccctgctatcgtctaacgtagggtacattgtatgataaatctctgatttcgaccccgaaaaacggtcatgagtagactaaaaagagccggagagtggaaactgcccttcggcaaaatgacgcagagcagtccgttccttgcgcctatagcccaaattttgaagatttagactgtattttggcgttttatcggtctataaatgcaaaaagaagtcctcatgctttatatcaaaacatgaggacttagttggtgcgatcgacgggacttgaacccgtacccattgctggacacgcccctcaaacgtgcgcgtatgccgattccgccacgatcgcatgccacatgagtgacaacacaaactattatacttgccgaacctgtctttgtcaatatctaactttcaaagaaaagcagcaggcctgccgtgaagcaagcctgccggaagaaatcaaagagaagtggagagcacctgctttgtgcgggagctttcgaaggccagatccacgattttcatgtcgcggcgcatatccgcaaaggaaacgcagggcggctccagaccggcacaggcgcgagccagattgcggtgataggccagaggatccgtggatacctggggcaggggaagggtctccacaaattccggcttcagcggagccatggtgcggctgggcccaagatgcttgccgaatacgctgtcgaagccatgcacgttctgacggatgcgggccatgccgccggctttgccggagaaatcgtcgatcttcaaagtgccgcggtcgccatagacgaaccagcgggggagatcctgcaggcagaaggtacccacctgaatcttgccgacgaccccgttgtcgaattccagctgcagttcaaagctgtcgtccaccgcaggggtcagaatactgagaagtcgagcatatacactgacgaccttgtgccccctgaacatgcacagcaactggtcgatcaggtgaatgccccagtcgtacagcattccgccgcctgcaacggggtcggcccgccagccgaagcacacgccacgctgaccgtatacccgggactgaatggtcgtgatattgccgatttcgccgctctgtacggcctgacaggccatgagatagtcctcgtcccagcggcggttctggtgtacggtgaagatgcggttcgccttttcagcggcggcaatgacctgctccagttccgttgaatccatggtgacaggtttctcgcacatgacgtgcttgccggcctgcaaggaagcaatcgccagttcggcatggacgttgttgggcgtgcagatgaagaccagagaaatggtttcgtccgccaaaaagctttccaacgtgtcataaatggtcaggccttcgttcgctgcgtctgctcgtttttccgcgtcgatgtcgtaggccgataccacgtccaactcttccagctgacgggccttgttcaggtgaaaatggcccatataaccaaatccgatgattcctgccttgatcgtgttcatagtgtagctccttgtcgtcaggctgtctgtcagcccctttgtttgtgtccattataacgggcaggggcttttctgtcgcgccagtttgtgatatgattgtgccaatatccgctatgcatacggatggggaaggagaaaaccatgcagcagttttatgaactggccagagatcaacgcatggaggcacaggtctggcacgcggtcgataaccagtcgatagcccattttcatagcgctgtagagctgattctggtggaagaaggctccctggtagccatgcaggagggccgaagccgagtggcctgtgcaggggagatcatagtcaattcaagctatacgatccatggctatacaacgcccgcccatgcacaaaccatcgtggcgacgattccgcttgcaacggtgccgtcgctgcaaacgtcgctgagtcagaaaaggtttgccgccgacatcgtgcgtgcagaagatgcggccgaatgcgcccgattgctgcagttggcggcgaaccccgtccacgaacaaaaccagaactatatcaacggactgaatttggccgtactggctttgctgatggaaaaggtcggcctgaaggacaaggttcccagcgcggaaagcgatctggtgcgcgagctcctgatgtatctgcagaatcacttttcggaggaactgacggtagccggaacagcggctcaattcggctacagcgccggtcgattttctcatatctttaacgcgagagtaggctgctcctttacccggtacgtcaacgggctgcgttgccggatggcagaaaaggtgctgcgggaaagcaatatgcccctgatggatgtggcttccgcttgcggcttttccagtatgcgcacgttccatcgggtctatcgggaatacgccgggcatacgccacgccgggcgactccgtaagctcttgccaaattccgctgaatggactacaatcagaacgaaaaagttggctttgtcagaagccgaatacagggtgaaacgaaaatgaatgaaaccgtcagaatagagggcaaacagattgctttgcgccccattaccttggaggacacgccgctgatcgtgcgttggcgcagcgacccacgggtttacgggacgttgtttcggcaggagccgatcacagaagaacggcaccgtcaatggcttcgggagatggtgctgtccgggaaatgcgaccagttcatcatcgtggataaggcgcagaatcgacctgttggcacggtctttctgaaggagatcgaccgggagcatctgcgcgctgaatacgctatctttatcggcgaggagactgcccgcggaaggggaatcggcagcgaggcggcgcggttgatgatggactacggtttccggcagctaggcctgaatcgaatctatctgtatgtgtttgcctccaatgcccgggcaatcgccagctatcgcagcgccggttttcgggaagaaggccgtcttcgggaaaattatcgttgtaaggacggcaactttgccgacgttttgatgatgtccattcttcgcagcgaatggttggaaaaacgcacggcagagcagtgtgtttctggttgctaaaagtcgcaaaaatccattgcaaaaaaacatttccgcgctataatggtagcttgtcagacgcacccgaattttgacgaaaggcggaaggcttgcaatggagcacgtcacccaaaacctgaccgaaggaaagctggccaggcagattttcttgttcagcgtcccgctgatgatttcgaatctgcttcaggctttgttcaacatggcggacattatggtggtcggccagttcgtggggccggaagcactgggttccgtcggctcgacgacgattttggtgacgctgtttaccggctttctgattggcatgggtaatggggtcaacgtgatggtggcccgctattttggcgcccgcagcgaccgcgatgtgtcggaaaccgtccatacttctctgattttgtgcctgctggagggcgtggtcattctggtgctggggcagctgttctcccgggccatgctggaactgctcaacaccaaggaagtgctgatcgatgacgcggcgctttatttgcgcatttactttttgggaatgcccgccatggcggtctataattttggcaacgccgtgttcagcgcagtgggcaataccaagaagcctttgctgttcctgaccaccgccggggtggccaatgtggtgatgaaccttttcttcgtcattgtctgcgggctgggcgtggcaggcgtagccattgccagcgctgcgtcccagtgcgtctgtgccgttctgatcgttgtatcccttctgcgcagcaaggaaaatatcgctctcagaccccatgctctgaaggtaagcgcggataaagcccgctttgtccttcggctgggcattcctgccggatgtcagaatgcgatctttgccattgccaatctgttcattcagtccggcgtgaactccttcgatgcggtcacggtagagggcaattccgccgccgccaattccgacgcgctggtctacgatgtaatgaacgctttctatatggcctgttccagctttatcagccagaacatgggcgcaaaaaagaaaaaacggatgctgcagagttacttcatcagccttgcctattccttcggtgcaggcgcggtgctggggctttcgctggtagtgtttggacggcagttcctttctctgttcaccaaggatgcggcagtcatggaggcggggatggcccggcttcgagtgatgggcttttcttacatggtgtccgcttttatggacaataccatcgctgcctcccgcgggctgggcaaggcgctggtccccacgatcatcgtgatactgggttcctgcgttttccgggtcgtctgggtgtacacgatttttgcctatttccacaccattgattccttgtatctgctgtatgtgttctcgtggacgatcacggcagttgctgaaatcctctattttgccaagagttatcgaaaactggcggcaacgttataagcgtagcaaaaaaacgccttcggtctggatgaacgaccgaaggcgttttttattgggcagacttattcgtaattctcgaatcggcggcaccatacgtatttggaaatggcgctgttctgggcgctgtgaacacaggtacaaagcaggtcgcggatataattggggagaacccggttgaatttgacctccaggatcatttcgtcgtggtcgaagggggaaagcgtaggaatgtaggggttaaaaatatcgatggaatgaagcccgctgtgcagctgcttatcgaaggtgatccgcacttcttcggcggggtggaggtacgcctcccggacatagtccacaatgaccacggggtgaaggtagttgatcttcatttcccgatacacatcccgcagaaggccgctgcggctctgctccagcccagtgggatctccggcgatgatctgctctgccagcagcttgggaattgctaccgaccgcttggagatcagggaaccgaccttggttttgcactccattcgaatgaatttgtccgagaaattgtagatgcggatgcggtacttgtcgcggttttttacgccgtccagcttgtccagcagggcgtcgttgtagatggtgtcaaagtacagggaacggatgtgatactcgttattttcgtccccgttgggatcccgttccagcacacgatccagctggcgggagagtacctgatattccacagggttaatatagaatttcagctcatgccgcaggggcaccgtaatggccatcgtggagggactcctttcgggaaatgaaaatcagataaaacgagaagcagactttgacgcggactcggcgacaaccgctactgggcagccaagccgtccctctttcaagcagtcctgcagctgatgaagcaaggcgtccgtcacttaagcgccaatctcagactgacaggcgacgagggtcgcatcgtgaacgccctcaatatccagcatccgggtgacaacttcgttgcgggcgtcaatgcggacttcgtaggtcatttccgctccgccgcgggtcagggtcttggaacgcagcttggaggttttcacactgcggcgcagctcggattgaatggccccttcgcagaactcgtcatagtgaaccaccagcaggtaggcgttggtagaagaaagcttggcaaaggaaagtacgatcatcagcacagaaatgcacagcaccacgatcagggcgatcaggtacagacctgcgcccagcagaatgcccatcgtcagcgcccagaacatataggcggtgtccagcgggtctttgacagcagtacggaaacgaacgatggacaacgcgcctaccatgcccatggacagtgcaatgtcgctcttgatacacataaccaccggcgtggtgatgagggtaagcatgatcagcgtcagggcaaaggagggactgtacagaacgccgcgataggtcttgcggtacacgatcgcaatgatgagaccgatcacaaagcccagtccaagggccagaaacaggtcggaaggaacgatggatttgaactgcgcggccagaccagtggcgttgacgacgctgctcagttgcagcagggaagaagagtacatgacggggttcctcctttggcatatggcataatgatagggtaacgcaaggaacagggcttgtcaatccgatggggcaatttcccatggctgacctccacgttgacatcgtggaggcacgcaaaggggcaaggataggtagagagctgtttcttccaaaccgttcacgcagcgacagcttgagtagtccgccagcaactggaacgcgagtctgggtgtagggcactgccttcaaaccattcacgcggcgatagcttgtgtagctaaccaatcgaaacgtgaaccggggttcaggagcactgctcccaagccatccacgcggcgatagcatgatgaaactcgccagctcaaacgcgaactggagcccatatgcactgcccccaagccattcacgcggcgacagcatgatgaaactcgccagctcaaacgcgaactggagcccatatgcactgctcccaagccatccacgcggcgatagcatgatgaaactcaccagctcaaacgcgaaccggggtccaggggcactgcccctggtggttagccccacttcttgccttcggtgacaatggcgtcgctgggcagctccggcttttcgccgaagtagttcagcatctgttcgtcactcaggttgaagcgctcctgcaccatttcgtagaagtaggtgggacgcttcttgagcacgttgcgggtgaagttcagacgggtgttccagtagcgcagcgcaccctcgggcgtggtgggagagtcaaagttgatggccttgtcgttttcttccgcccaacggttgaaatgcatggtcatttcaggctccagaatggcggccatggtatttagctcgttggtcatggtctcggtggtcatgaactggtaaatttccccaaggcgcgtcaggaacttgtccttcatttcgtcgttttccagcagctttcggatcagcgtgtttcgaatcttctgctggccggcgcctgattccttcaagtagctggtagggctgtcaaagccggaattgaacaggccgtagtccgcgtcgtagaagatccagcgccacttggagccttcctgcttcagcttgtagaagcggatgttgccggggtcggagttgccgaagaacatttcaaaggccatgtagtcgaagtagttgtccacgtctacattgtccaaaatgtactgcagatcgtccgggttggtgccgggagaggatttctccacacgctccaccagcgccttgtattctttgttgctgccgtagaaaatctggctggaacgggtaccgctgctctccagaatatccatctggtcggcttcgtccagcgacagtccttcgtgctgggcaacgaagaagcggtcgacgcgttcgcgcatgttgtaatggccccagtacgcgccgttcaggtagaccactaccgggttccacgcctgatgaatgactgtggagggattgtccgtctgctcgttgaaacggtcgatcaagcggctttgcagaccgtcgttcagccgcgtccagacggagtcgttaccggagttccgcagcacgaagcccttgtactgggtgtattcccgatccgggaacagcttcgcgttgaaatatttttcgccatatttggacttggagcggaacttgaaggatttctgcggcatgtccagactgtactgcccctgcagcttaaactccatgtcctgattcagcagctggttgttctccttgtcgtaatactccacgtggccgggctgtgcgcccagctgctcttttacggcgcggtagacggtgttcttgaaggggatgccattcgatttgtccacgttgtcgccgatggtcagcataccgtgatccgagttccacagaacgtctgggtcggccaccagactgacgatggggaaggcgtggtacaggttcataagataagtgctggtgatgacctcactgggctgcaaaagcccggtggggtcgaatgcacgcgcccgcagcaccacggtgctgttgatctcaaaggcgtcgccctcgttgtagcgggtagcgttttcctccgttgggatggaaccgtccgtggtgtagtagaccacggtgttgttgggcacggaaatggtcaaggtcagggtgcctttatattcgccgccgcgttcggagaacgacggattgcttgcataaccatagtagcccgttccgttgggctcgccgggggtgggagagtcataataatagaagccgccgtagccggacgtgcggccgtagctgtggtcggtggggatcagactaaggggaatacgatccagcaccttgccggtggggtcgcaaaaggtgacggcctcgccgcccgcccgtttgatcttgaaattggtgtggtattcagtattggaagtcagagtacttttgccgtcgcagtagacgaccagatattcaccgggaccgagcgttgttccctgcggaaactgccagcgccgggggcgcttcagagagtcgctcaggccgtagctggacagatcgacggtggaaccgctggtgttgtacagctcgatataatccaccgtcgccccggaagcacccagggcgacagagtcgttggaggccagcacctcgctgatgatgacccccgttggattgtaggcacggatcagctcattcgccttggcctgaccgttggcgtcattgctctggccaggcgtggtcaggacaaactgaaccagattgccgctggaatcacggccgacggagtagtccaccggcacgttctcgatggtgacgcgatccagcaaatggccgcctgcgtcgctgaggaccagcgtttcccgttcggcgctgatgcggaaattggtgtggggaatgccgttctgctgcattttatccttgccgctgcagtagaccagataatatccgcccgcaggaatggaagcgccttcgggaaagcaccacttcatgggcttattttccttgtcgctcagataatagccgctcagacgaatggtctggtcggtgttattcttcaattccagccagtcggacatgtcgccgtcctcgtcagggatgcccaccttgggatcggggcagacttcgttgatgaccagcgaacccaccgccatggcgttggcggaacggtaggccaaaaagccctcttcggtgttctcatacccggggctgtaataatccgtcacttcataatgacgggtgccgtcctcgtcgatcgaagccagaatatagctggtgtccggcgtcatggtgggcacggtgatctcatcgatcaggtacatatccggatcatacagggccagatgtgcgccagccgacgaaattttgaattttccatggaagggcttggtgggatcatccttttgccagctgttggacgcatatacgatcacccgctcgcccgccttcagcgtataggcggggaaggggaaggaaatacggtcgctgcggtgggagatcatcacgccttccatgtcgatgtcgtggtcagagccgttgtagatctccagccagtccgggaagttgccgttttcatccggaacggcggaattgttggcgctcatgacctcgctgatgaccagcccttcatattgggagtgccccacatgacggcccgcctccttgggaaagagtacatacatcagcgccagcagcgccacgaagaggagcagcagcggcaggttcgccagctttttatttttgtgctttttcggagcataatcccgcgtggggcggcttttgggctgtcccgcggtgttatactgcatacgcagggcctcctttcgttcctttacgattcacaaagcagcccattcaaagggcgtgcgcttccattatatcatatttctccccaaattcctaccctaacgcctcaactgttacacccgcctttaacggcgctcctaacagcggtcaaagacaaaaaacagccggcagggttttgaacccgtgctggccgtgattaaaacgtgtttttggctgaaagttgtgtttcacattggagatgaaaccggctgctcctactttctccgtatgattgcgtcatgtactgcggggccgtttcgccaatggccgatcccatcgaagcgcgatccatggcagggacattcccatagccgcgtcgatgggttgaacttcattctgcatcccatgtgcgggcagcgcggagcacgggtacgaaatgacccgcttgcataatgcgcgccgatagaaaaacaggttttcagctcgttcatgcgcgaagccgccgcgtttcgctgcccggaaaaaataaaatctccctcgcagcgcagccccagaatgcgggcgctgatgacctgcgccgccgtgatgctgcccaatatcccctgtccgccgtaggctgcggccacaaagagattgggcgttcggcggccatagggcccgatgtagggcagaccgtcggcagaataaacttccgtactgacaaagatttgtccggagggccggttttccagataggacgcagtatgttgacgaaactgttcaaggggcggctgacgggaaaattctcctactcgctggagcgtcagctgtgccaacgttccgtttcgaaccggccgcaaagcaaaacagccatctgaatcggccagcatcccctcgtgggacagggctccctccaaaggaatcagacagccctttcgctggatcgttcgaagaaaataccagccgggcgtgttaacaatagggtagcctgtagcgacaacgatatagggggcttgtacgctgccccgttccgtggaagcaagattggtttccaacgcaacgacccgggaatgctcaaagatgcataatccgtgtttttctccctgacgggccagaaaacgcagataccgcagcggatgcagcgccgccatgtttcgaagcagcagacattccttctccgcaaagcgagacgaaaaggacgtttctatttcgacagaaatgcccgctttgcgaaatgcgtccatctccgtccttggacgttctccacctagaagccggtcgtccaacgtctgccaatcccatgaggctgttttctcccggctgagctcttgcaaagtgtgaaaggcattctgctgaaagcttccgtaggcgctggcccattcctgcccgaagcgtttttccagccttgacagcgaaacgccgctcaacagactgacccttcccagacaacaggccgtggagccggaacccagcgtgttcgcctccaacagaaccacccgcagaccggcacggcacagccacagggcgaccgtcagcccggtcaggccgccgccgactactaccgcgtcggcagtacgcctgccccgcagaggcgagtaggcgcgttggtctccctgctgccaataggtttcttcggacatggctctaacctcctgaaggctttggataagggaattctacagccattttctccaaaggaaacggagggtatacagccgcaaaaggcagcgctttgatccgctttctgtcgcttgctttcttatttttgctgaaaaccgaattttttcccttcctttcgggagaaagaacagcttttgacggatcggggcgacggtctgcatacgcccgttttttcaagcatacatatgaatcgactgcgattgaaaacgcggaaggagggcgatagcggatgagcaataagcccctgaaactgattccgaaggggcggccgctggaagcgccggaaaaccaggctcggagccgggcaagccccgtgcgtcggcttttcagggggcgaaaacggctctggacgaagttggggctggggctgtgcctggcggccgtgtgcactgcctatacggcgggcctgaatcagcctgccaccaccgtggtggcgcagaaacgggagctgccggtctactccgtggaacgggacgacaaggtcgtctccatcagcttcgacgcgtcatggggcgcggataagacaattcccattctggatattctggatcagtatggggtgaaaacgaccttctttttggtaggaggctgggtggataaatatcctgacatggtgaaggagattttcgcccggggtcacgagatcggcaaccactccaatacccatccccagatgagcaagctgggggaagaaggtatccgggaagaactgcgcatgatgtcggacaaagtggaaaaactgacaggggttcgtcccacgcttttccggccgccgtatggggactacaacgaccgggtgatccaggtggcccgggcggaaggctatgaggccgtgcagtggagcatcgactcgctggactggaaagatcgaggaacgcaggacatcatcaagcgctgtacctacaaggtggaaaacggcgacatcgttctgtttcacaacgactccaacgatattgtcaacgcgcttccgacggtcatccagcattatcaggggctgggattcaccattatcccagtaggacagatcgtcctggacggcgattacaccatcgacgtgcagggaaagcagcatcctgttcaaactacgcaaccaacacaagaaccacaacaaacatgaggtgagaaacatggaagaaacgggaaacagcatccatctacggggacacgtatgccagccattgcaattcggtcatgaacttttcggggaacagtttttcgttacgacacttcgggtgccacggctcagcggcgcggaggactttctgcccattacgctgagcgaacgtctgctgatcgacgaacccattgccgccgggagcatcctgtgtctggacggccagcttcgcagctataacaaggtggtggagggctccgggaggctgctgatcaccgcctttgcccagcggcttctgccggaggaagatgaagaaaatcctaaccgcgtccagctgaccggcgcattgtgcaaggctcccagctaccgcaccacgccctttggacgggaaattgccgacctgatgctggcagtgaatcgttcctatggcaagagcgattatatcccctgcatcacgtggggacgcacggcccggtatgcggccaacctgaagatcggcgacaaagtgcagctggtaggccgctttcagagccgcaattatcaaaaacagctgccggacggcacgatcctgaataaggtggcgtatgaagtcagcgtcagcaggctgagcgctatgaaggaagacccgcttaccgaagccttgcaaagcatgaaccagcggatgcccctgcagggacagaatacgctgagccacgcaagagagtattaaatgaaaaggcgaaccgcaccagacggttcgctttttgattttataccttcagtgtcccgaaatggctttgagcctctttgaccggcagaaccgctacgatctcgtcatcgcacctctgtccgttttccacaaaacccatggagcggtacatggcccgcgcccgctgattttccggctcataggacagccagatgtactcggcaggcccgcagggaaggccagccagatagcgcagcgccgcttccaatgcggctttgccataaccgcgtccctgaaaatttcggtcgatcatgaaacgccacaggcaatagtttcctgccgctacaggaggttcgtcctcatctccgggaatggggccgtagccaaacatgacgaagccgacaggctgaccgtcggcataaacgccaaagggaagcgccgttcctcccgccgcaagggtcgtataggcttccacgatgctttccgtgttggtggctacgaaatcctcctgctcaggcaaaacctgcagttccaatagtttccatacgttgcttgcgttgactttgttcaaagagatcatgctgttcctcctgaaaagccgtcagacggcagatacggttttgaaccatcggttcccgttcagccggtgccggagcaccagcgcccgcagcagccattccaccgccagcgagatccacacgccggggacacccagcccgcagacgatcgtcagcatatagcccagcgcgcagcggcacaaaagcagcgtcgtcactgacaccgtgctggtgaaggcagcgtctccggcggagcgcagcgtcatgggtatgacatagctgtcgcaccagaaaaacggcatacaaacagctgcgatcgtaaaggaacggtaaatgatcggcgcggaagcctcagtggcgctgtacagtttcagcagcagcggacttaacggataaagaaccacgaccgtcagcaccagcagcacccggccgatggagatcaggcggcggcagtactgacgcgccagctccggctgggaagcgccgatacattgcccgcaaaccgtgctggccagcgtgaccagcgtctgccctggaatgtaatacaggttcagaatggagttggacaccgcgtgggcggcgatctccatggtggaaagccgcgccagatagatctgcaccagcagcattccgccctgcatcagggccgattccatggcaatgggcacccccagatggacgatctcccgggagacccgcctggaaaagcgaaagaaatgtccgacccgcacgccgcaggggttgtgaaagaaaagcagccaatacagtgccgccgccatgcccacgacacgcacgacgatatagcttagccccgcgccggtaatacccattttcagaacgttgataaaaagcaggcagaaaaccagatgaagcccgttgatgatcaccgtcagcgccagactggagcgggtgtcgccgatggcacggtaggcgttgaaaatggcgttgaacacggaaaagggaataaaggaaatgcacatcagacgcatatactcgatggagtaactgcgcaatagcggctccacattgggataaagccagtccaccaacaagggggaaagcgtgaacagcagcgccgccacaccaagacccagcgcaaaactgagtcccacggtctccccgatggcacagcgcatttcgtgcagatcgccgctgcctttggcccgggcgatcacgatagcgccgcccgtggatacggacagaaacaccagtgtgaccaatgcgttgatcgtccccaccatactggccgccgccatggcggcttcgccggtgcttgcgaccatcgccgttgaaagcacgctgataaagcagatgaaaaactgatccaacagcaaagtgccgaacattttcgccagctcgccgaaggaaaaaagctccgtggtcagcattccgttcaggcgggcggtcagagcgccggtgcaacgccgtatcatagtataacctcgcttcgaagtatcgctcagcatgattataggcatttcggcagggacgcgcaaggtgacaaacgcatacatccgcttcctttcctcaaaaaacagaacgcgccgaaaaaaagatctccaaaacgcaaaccgtccccaccgggcatggagcgggcccgcagggacggtttttgttcgcgctgattccctttgacagactggaaaaacgcagcgatgccttgacgtgaggacagtggttgagaaggtcaatcgtcttccggcttccggttttgatcgcggaaggcggtaggggaacagtttttcatcgatttgaacaccttcgaaaagtaaaagggatcccggaagcctgttgcataagcgacagagctgatgctgagggatgggtcacgcaaaaggatcacagactgttcgatccgatactcgcttaaataacgcatgggggaaatgtgcagataacggataaagctgcggtatagccagcttggactgacgcagactgcatcggctaattcctgcagcgtaagcggctgagcgtagttttgggtaatatagtcaatggcggtttccaaaaccacttgagtagaatccgttttgatttttttcttttgcgctccctcaagcagatctccgaaaaaacgatacaggcaggcgatcatacgtacagagtccaccgcacgagagccgtgataggtgtacagctcctgcagatcatttgaaaagggaacgtcccccggaaaatggagcatcggcttcaggtgtgaaaattcggtctgagccagcagcatttgcgcgtcgccgcccttgaatccgacccaggtatactccagtggagcgctctgatcggaataatagcagacgtggtctccggggtagaaaagaaatacgtcgtttgggacggctggataagttttctggccaatttggatccttccctttccggaaagaacctgtaaaaggataaaatattcccgcgattccggcccccattgctgcccggcgaagcagcgctgaatgccggtctcttccacatacagcgcgtaaatagaagactgattcggtgaaaaaaaggagtggctgtaaacccgatcgtcctgcatggcatagcctctttctcttcggtgagtaaatgttctcttccagtatagccgtttttgaaaagaacgcaaggggatggataaaataattcgaaaagcacgttttttccatgtaacatccttttgacaacatggaatcccgaagaatgtctttgtataattcagccataaaacaacggttgcaaaagcctccaccggttgaaggcaaactggttggaagagcgaagacttgtttttcgtctattttgtgtaccgaattttaaggggtcgcatccccttaaaaaataaaggaggttgtcccatgagaaaaaatcgtttcctgtgtctgcttcttgtctgccttttgctgctgggaatgggcagcgcgtatggcgaggaaaacaagcctgagtccctgactgtgatctgtaccacagatgatgtttcctactttgagtacgcgggtgctctttttcaggagcagaccggcgtgaagatcaatctggtcagccagaactacgaagataccaagaccaaggtgtccacctccgttgcgggcggcgttgccgacatcgcttatgtggatgtggtttggcctgccgagtttgcggctatgggcattctgctgccgctggatgagtacatcacgccggagagcatcgcggacgtgatccccgccaccatcgatcagctgaagttccagggcagcacttatggcgtccccttcgccaacaacggcaagtggatgttctataacaaaaaaatgctggcggacggcggctacgacgcgcctcccactacctgggatgagctgaaggccatgtccatcgatctgcagcagaaggggatctgcaaatatggtatcgcctgggccggcgtgcaggctgagggcctcctgtgcgacatgaccacgatgctgtccgcttttggcggcgcatggacggatgaggaaggcaaaatgaccttcaacagcgaggccggcgttaacgcgctgaactttatgcgtcagtccatcgaagagggctgggcggatccggcttccaccacctatacggatcgtgacgcgctggatcccttccttgcgggcgatactccctttgtgatgaactggtccttcgcgtgggccctgtcgaacgatccctcccagtctcaggttgctggcaatgttggcgtttgcctgatccccggcacggaaaatgtcgtcagcggcagcgtaacgggcggcggcggcctgggtgtgctgagctgcaccaaataccccgaatatgcatggaagttcctggaactctgcctgagctatgacgtgcagctcaacggccttgaaaactgcagcaccatgccctgtctgaacagcctgtttgaggatcctgccattcaggaaaaatatgagtatctggcaatgttctatccccagtttgcatatgccaagtcgcggcccgctgtcgcccgctacagcgagtggagcaatatccttcagcaggcgatcagctccgtgctgatcggcgaaacggacgccaagaccgctctggatactgctttcgaggagattcagccgttattctgatccggtttccctgcgcggcgtccgcagccggtttttccggccgggggcggacgccgcttctctgctcaaatcgtgtgtgacgggaggtagcttatgcatacacgcagatctctttccgaaggacaaacggcgatggtgctggttacaccggcttttttattgatcttcgccttgggcatcgttcccgtcgtttgtgtaattgtattcagtctgggtaaggtgcagcctgctttgctcacctggtcctatatgggtttggataattatgccgaggtcctaaaggacagttctttttggtcgtcactagggatcaccctgtattttacggtggtttccgtactgcttcagctggtgattggctccatgatcgccatgctgctgaatcaggagttcaggggacgttggttggtgcgaaccctggctatgctcccatgggcggtgccaacggtggtcaacgccaacctgtggaaatggattttgaacgccaattatggcgtacttaataagattttgatggctatggggatcattcagcaggatgttctttggctgaacgacccgaagctggccttgaacctggtagtgctggtggacacgtggcggatgcttccgctggtctttctgatgctgctcgctgctctgcaaacagtatctcagacgctggtggaagcggctcgcgtagatggcgcaggagcgttcaagcgtttctttcatgtctatcttcccgggatgaagcccatgattctggtagtgctggtgctgcgtaccattcaggccttcaaggtgtttgacgtcatctatacgatgaccaagggcggccccaacaacggcaccatgaccatcagcttttttacctactacgaaatttacaagtatttgaattacggcaagggcgctgccatttctctgatcattttggtgattatgctggcctttacggcactgtataagcggctgctgcgcacagacgattaaaggaggaaacaaaatgctgaaaaaaagagccttccgcatttttatctattttgccgcagtgctgctggtgatctggagtctcgctcccattgcatggatggtgatttccagcataacgcccagcaatcaaatggtgcagagcgaacggatcctgccggacaactttacggtagaccggtataaaatggtgctgttcggtcaacaaattgaaggcgttaaccgcaatgctgcagcccagtccgctgtatttcgccgcgctctggtaaacagcgtgatcctggcggtaatgacgacggtgatcagcattgcgatgggagcgtcggccagctatgcttttgcccgtcttcagttccgcggcagtaaaatgttccagtttacggcgctgtttttccagctgctcccgcccattgcactgctgattccctattatgtggcggtcagcaaaatggggatgctggatcatctgtcttccttgatcttggtcaatgtcaactttgttctggtttatgtgatttgggtcatgagcaactttttccgctccattccgcgggatctggagaacgccgcacggattgacggatgcagctggcttggtgcttacgtgcgcatcgcgctgccgaatgcgcttccgggcttcgtagcggtcggggcgctttccttcctgctctgctgggacgagtttatgtacgctttggtttttactcaatcagacagcagcaaggtgatcaccgtggcggtgtcggaatttggtacaaagttcggcattgactatggcatgatgatgacggctggggtcgtggctacggtgattccgatgctgttcctgcttttcttccaacggtatattatttcaggcctgaccaacggcgctgtaaaggaataaaggagagggattcttatggagcttgaactgacctttccggttcggcaggaaaaacacagcgtccgtcttttgaagccatccggcatggaggtttttcttgattttcccgtatgggtttctcatttgaacggcagcacggacaaagtgcgttatgatcaggtagaagagcagaaagacggaacctgtctcgccaacgccttgattcgcgcacgaaatggcaacgaatatgaactatgcgacctgtggcgagtggaagaaaactgcgtgaccgtggaacgacgtttttccgtcattcgctgccgtcggccggctcagataagggtctctacggattttgactgcgttgaaagaaatgccgtttcctttgacgattaccgtttcgtgattcccggcgccttctatggtcgcaacgatacggatgacgacggggtggaagattatcaggagaccttccagcaggattataaggacgatcgaaatcccgggctgtctgtactctgctatctccccgccggcaaggcctttctggcgcttctgcgcaacgataagcctgtgagggattgcagcattacgcgggaacaaattcaggccagacattttgttcacgacacggatattggctccatgggttttgcgccctccatgcaccgcggaaacggcgtatcgctgcatgtggattatcccttttgtgagcgaaattccttctgcctcaatatagacggctccggctggtctgcctaccgggaaatgaaggaaggagaatcgtttgcggtttcttattccctgctttttggcggcgcggatacgctgactgacgcctcatggcaggtaacgtcctggcagatggaccgacttttgaacgatcgcgttccattgccctttaccttggaggaggcgcgcagggaacggcgtgaaatgattttcaacagcttccgtgaattccctgaccacacggggaatcccgctggattctttatccacttttctccccggcagcgctacggaacgcatcatttgctggagtatggcttttccggtgcgcagacgttaaactgctttgcaatgctttcagcagccgaggatggctgcggggaggaatacagaagccgcgctctgaagacgctggatttctttgtggactattgcatcgatcggtccggcctgccaaacggtatctacgatgtggatcatgagaagttcgtttactggtggaccggcgtattgcttccctatcaatacaccaattcccgcaaggagctggaggggtatctgggcgaacaggtggttggcgccctctcggctattgcggaaaagctgaaggagaatgacggcaattactgccgcaccatgtgtgaggcgatgcgctatcttctgctttgctatgaaaaggagaaaaaagcagggcacaatcattccaactggctgacggcggtaaaggtcttctgtgatcgattgctgacgcttcagaatgaaaatggctcatggtgccgcggctatacgatggcaggcaatccgttgacccagccgccggaatggtttggcggcagcgaaacggagattggctccggcgcgctgttcccggcggaggttttgatccccttttaccgtgtgacgggcgataagcgttatctggaagcgtctgtccgcgccgcccgtttcattctcagacattatgtgccggaagtgcgctatgtaggcggtctgaacgatacgactcacaaaaagtctgtcaagattgacgcggtaggcgtaatgtttgcaatgcgtacattgcttctggtatatgaggaaaccggggaagacgctttcctgatgggcgccagagacgccgcccggatcctggcttcctggacctatatgtggaacattccttttgacgcaaaaacgctgctgggtcagtacgggtttcagaccaccggctggacgggctgcgacgtcatccctgcatgcagctatgtggatgatgagtttgtggaatttattccagatctgctgcggatcgcggagctttgcggagatcgtcgtctggctgtgcttggccggattgtgacaaggggaatgcaccatggactttccatgccgcaggtaacgtacggctatcccatgatgggcgtacagtgcgagggcttcctgacgtctctgtggctgagcgatacgaccagccgggaatttgcgggtgctacctgcaagaacaaaggggatgacaatgatacggtgaatgggctgatcaacgctcaggcgctgtataatctggattatttggcagagcgtttcggcacgctggattttgaccaaattcaggaagcgattttgaatggaggaagaaaatgaaactgggatgtgcaattggctgcttcacttatccgcactatagtgcgccctatgaggaaccgctccggcgggtggcggcgttggagttcgacggcgttgaaatgattgccgccgaaccggaggatctatccgcttattatactccggaacgtgtacgggcgcttgcaaagcaggtatccgagagcggcatggaggtatcggaatttatcttgtacgcatcgctggtgacggggctggcggagcgggaagaaagcgtcaagcaggccgcgctggaggtagtccggcgtgggatcggggtggctcaggggctgggcacggataaaatcaacattgtctcgaactggccgaatgcgctgaaaacgcccattgcctatcccccctgttactttcaccctaatgtcaacggcgttgagctgtacgatcccaagctccgtatgtcgctgccggagcattacgatgcttccggcgagtgggataattacgtcgattctcttcggcgggttacggagctttgcgcttcggaaggcatgaccttctgcctcgagggccacgcaaatgtgatctgcggcagcacggatggctttcttcgcgcggcggacgtcattcaggatcggcatttctgtacgaattttgatacggcatggcagatggtgcagcgggaatatcttccctggtccgtctataagctgggaaatcggatccgccatgtgcatctgagagatacggacggaatgctgtgctacactctgccgcctggagaaggaatcatcgactggcatgggtttgtgcgtgcgctgaaggaggtgaacttcgatgggtacctgtcgtttgaaatgggggggatgttagagccggaaaaggtagtacgtcggtcccgtgactatatgctccgcgttttgcgggaagaaaatgtttattcaggaaggatgagtgaaagatgattgcaagcgtaagcacctggagcgcacatcagcagcttctgagcggaaagctgagtgcggaagcctttttgcgcctgatccgcgaggaaggggcagaaggagtcgaaatcgttgattttgactttgaaaatcccacggcggaaacgtaccagaatttttacgatcaggcggaaaaacagggtgtcgaggtaacgtgcctttccatcgagcacagcctgtgccgcatgactgaaaagcgtcggcttgaggacgtggaaaaagtcagggaatggatgagactggctaaatcgctgggcgtacgaaatgtccggatctttacggggtggatggaaaacgaagcgccctaccacacacagctcgaatgggtttatgaaggaatgcgccttctgaccgatgaggcggaaaagctggatgtggatctggtgctggaaaaccacaacaacgtctgccttgctgcggaggaaatcatcaggctcatgacgcagcttcgttctccacgcttgtttacctgcccggatgtgttcaattacaaaaccttcctgaatgatatgactccagtcattggcgacgacgcctttgctgaaatcgaaccgctgattcccttcgccaaaaatgcccatgtcaaaatctgcgaagcggtggacggtgagacgcaggatcggtatttggatattccccgcttgatgaacctgtttgaaaagcatcactatgacggtcctgtggctttggagtttatgtggccttacctttcccctcaaaaggacgcgacggaagaaatgcgccgggcgattcgtgtactctgtcatcagatcaaaagcaggaggtaaatagttatgaaatccatctcaatggccgtggttggttgcggtgatattgcccatatccggtatttgtatgccatcagtcatagaaaagaaaagttccacatcgacgcggtttatgatcgcaatcctgaggtgtgccagcgtacggcgaaggagctgggagcgcaggcggaaaacagcctggagtccctgctggctattgcgaaaatcgatacggtgattgtgaccacctatcaccccagccatgcgtccatcgccattcagtgcatggaggccgggaaaaacgtaatcgtagaaaagccgtttgccacttcttccgcagacgcacaaaaggtgctggaaaccgcaaaacgcaccggaaaactgtgtatgctgatgccgtatgagctttacccgattttccgtaaggcaaagaagctgatttccgatggcgcaatcggacgaatcaccagctgtgacgccattttctctcatcagggaccgctgcatgcgccgtggtttttcaataaggcggatgccgagtggggagttctggcggatctggggatttatcccctgggcattctggcatatctggtgggccgtatacagcgggtcggcggtatggtggactgcctgattcccgaacggactgcgctggatggcagccacattcacagcacggtggaggacagcgccgcagcggtactcagctttgaaaacggctgcataggtaccatgcgttccaattggtgcaccgcagccgataaaaacggttctgtgtatcaggcaaccttgtacggaacacgcggaattctgtatctgaatatgctttctcatgaattggtcgtctattccccctatcaggcggtagaaggcgggcaaaagctcaattatctgggatttgaggaaagctatctggtgcccaccgaagactttgatgatcatgagccgcttatggattcttattacgagctgcacgaaacgggaaaattggcggacgatccggattatttggagcgccagctgaatattatcaaggtgattgaacagatttatcgttcttcccacgataaagtgattgaaacgctgtaagcaaaaggcaaagggaagaacgaaggaacgctcaaaagctttaacggcttgctaaatcaataaccttgtatagcctatggaggagccacatgcgtaacggcatgcggcttcttctgttctccgaggcaaatggccgaggggcgccgcttccccctggcttcagtttcccttgacgaaggcgacgatttgctcgtcctgcatccgctccctttcctcaaaaaccagaacgcgccgccattgacaaggcggcggcggcgctctacaataaagccagcatacgcaagggggaagcaggcatggaacaggagcaggggtatttcgttcatcccagcagctatgtggatgaaaacgtgacgatcggcaggggaacgaaggtgtggcatttctgccatctgcaatccggctgccgtatcggcgaaaactgctcgctggggcagaatgtgaatatctccaacaatgtgatcgtgggcgacggctgcaagctgcagaacaacgtttcgctttacgagggcgtgattctggaggatcatgttttctgcggcccgtcctgcgttttcaccaacgacctgacccctcgggccaggtatcccaagggacgagccgcctataaacagacgcgtatctgcgaaggtgcgtccatcggggccaacgccaccatcgtgtgcggccacaccgtgggggcgtgggccatgatcggcgcgggggccgtcgtgaccacggacgtgccgcctcacgcgctgatgctgggcgttccggcccggcaggtggactgggtgtgcgaatgcggcgcacgtctgcacgggaagaaaatctgcccggaatgcggccgtgaatgggataacgacgcgcttaaagacgaaaaataagaaattttttctacaaataaaatatgcttacgattataaaacaatgagagtaagcacattgcttcattcgtatcgttgaaaaaacttcgagaatgtcggaaacttttgattggctgccactcctgtgaaaaaagagataagggacaaattttgaccatcagtcagatattctcatttatactccatttgatggggaatgtaatgcttcaaattctcttggccatcataaaggtacgttgacatagccaaacgaggggtgtataaaaaatagagatagttcttaaatcgaaagaaagaaggttcttcacatgggtctgttatttcttgtcattatcttaggtggaa

SEQ ID NO: 1722 - DNA, 3608 bp, Unknown
  16S sequences of unknown bacteria
tgcattttaacatattatgataattatcatatttattcgactttattcgacaacagttttcttgaatttaatgataaaaaatataaataaaataatttgatttaagaaaagtctaaaagaaaacctcctttgatacaattttggtatcaaaggaggttttactatgaaaaacacattatttgaacaacatgtctgtatagtgtaaattatttggtcacgcttttcctgttcataataaggtgggcggatatgcccaaaaaagcacctaaaaatacggaatagaccggacttaaatcaacaaccatcaaaagcaccaaagcaaaggcaaaaataccgaaagtgattttatctataatgctctttttccaaagtcccataatggtgttcaaaataagtgcgcaaacgccgcttcttatacccataagtgctattgcaacatagtgatttgtcataaaagaactcatcactgcggcaattatcaaaattattataaccgacggcacacatacaccaaatgcggcaacgataccgcctaaggttccgccgatttggtaaccgcacaaaatgcttgtgtttacagctatgatgcccggggcacactgtgccattgcatagttatcggaaatcgcctctttttcaagataaggcttttcgccctcggacaattcgcgttctataatgggcaacattgacagcccgccgccgaaagtaagggcacctacgcgacaaaatctaacgaaaatatcaaaatattttttcattctcctaacctcttaacttaaatgtccgaaagctatgataacattttttgattgaataatcaaccaattttttccatagcgccgttactttacataaattttacatagccatacgacaaagccgtagcagggcaaaacaaaagcctctccccacagggggagaagctgtgattatttatttattctgtggagttatttgtaaagaagtatgcctaaaatagcgcttaaagccaaaaatgcaaccgggtgtatttttttgatgggttttatttgcaacagaacaaaaactaacagaaatataaaccatgccacaaagtttacactgcctgccattgccgaaagactgctgccgtcatagaacagagttacttgaataatgctgtacagtgcagttgctataagagccaatacacaggggcgcaggccgtaaaatgcccattccacatacttgttgttgcggaatttgtttaaaaactttgccataatggtaactataaaaagtgcagggaagattactcccagtgaagcacacaggctacccaatacaccggcagtttcaaagcctacataagtagccatatttattgccatagggcctggtgtactttcgcttatggcgataaagtcagtgagctgtgccaaggtgaaccaacctgttctgacagacatatcctgcaaaaaaggaatagctgtggtaccgccgccaaagttaaaaagtcctattttgaaaaattcataaaagagctgtgcgtaaatcattttataccccttctttaatagtaccgggggcacactgtgccatggcgtaattgtcggaaataacctctttgtccagataaggtttttcaccgtcggacaattcacgctcgattataggcaacatcgaaagcccaccgccaaaggtgagggagcctacgcgaaaaaatcttacaaaaatatcaagatattttttcatgctactaacctcctaaaacaaatatataactaatagactataacactttttacttgaatagtcaactaaaattgtaaagaaaaatcgcctgggcccaaatcggcataacaggcggttttactgtgagtaaataatactttttgtttaggccttttctgcccaaacagctacggtatttttaaatttaggaattaaaaagtctataactttaccgttaagtaccaatgcggcaacggttgcatatccccaaacgccgcccagcaaaaggcctacggtaaaaaataccgcatagcagatataacagccgaaagcgtaggttttgttaaatatatcccctatcatcaaaataaggttatccataatgccggcgccaaagtccaggcaaaggcacagggcaacgcctgcggaaataatcaaacagccgataagagggaagataaatttcataaccgctgacggcaaatttacaaccgaccaaagttccaacatccggttaattgaccaaccgggaacaaaaaccgttataagggttgtaagggtaattctttttctgtaaaaaatcaacagaacaagaaatataataaagtttacaatattgctcattgtgccgaacataacgccgaatttttggcttaaaccgcttaccataacgcccatagggtcgttgcccatgccgctggttacaagaaacgaagcgccgataccaactataatttgtgataaaataacaatgaagtatttttttaataatacacttttgtttttcatttctgtgtcctttctttttattattcaaacatcttcaaaaatagcttattaatattactatataaatatgaataagtcaatttgcaaagggataaaattttaaaaatatacataaaaacacaaaattttcatttgtatagttttaaaaaagtgatatactataaataacaaatatcttaagaggtgatttgttatggacaagaaaaccaaaatgaaaacatacgccctaaaagccgcaaaaggcgctcttaccggttataagcggtctttgataggcagggttgttttggctgatgccgctatcagcggtattgaaaaatatcaaaggaaaaattcaagaccgagttttaaggccatttcacaaaattcggttaagacggaggataaaaatatgaagaattttattgcaggtcttactgttttggcagctgccggcgcaacattgggtgcggcaggctactacatttataagaagattaaaaatgaagaagaatatgacgatttgatttacacagacgaagtatccgaagaagagggagagccttccgaagatatttcagaagaaagtgaaatcaaagaagaaacagccgaaagcaagcaagaagaaacaccggaagtaaaagaagaaaagcccggcgtcaaagaggttgtaggggcaatcgccgacgagcttgtaggtgccgcacatgacgccattgacggcgcacttgaaacagcggataatatcaaggatattattgacagtgcggtaagcaaaaagtaaacagtttaaaacaaagcactcggttgggtgcttttgttttagcatatatttagataaatatcaaaatatatattgacaaatatcaaaatatagtatatagtgtatttagatgaaagtccaaatataactttaaggaggttgagatttttgatacaagacacattaaaagctttgtctgaccctacaaggcgaaaaattttagagcttttaaagaaaaaagctatgacggcaggggagattgccgggaacttcaatgtgtccgggcggacgatttctcatcacctgtctatcttaaaggacgccgacatggtgtctgacctaaaacagggcacatttatttattacaatattaacaccagcg

SEQ ID NO: 1723 - DNA, 16745 bp, Unknown
  16S sequences of unknown bacteria
tatttccaccttagatgcgccgcgcattatactgcggtagtgcgtaaatgtttcgtagctttttttgccgtgatactgtcccataccggaactgccgacaccgccgaagccggtatgagggcttgctatgtgaagtatggtatcgttaatacagccgccgccgaaagaaaggctgtcaagaatctgcttttcagcttcccggctttttgtgaacaggtacagcgccagaggccgcggccgctcgcgtacgaaacttacagcctttgaaagatcggagaatgtaatgataggaagtatagggccaaaaatttcttcctgcattatcggcgccgcgggagatacgttttctatgactgtcggcgcaataaagcgagtttcggggcagcgcccgccgccgagcacaatgcgcgcagagctttgtgagctgcagcttccatctattagagcacaaagacgcgtatagtgtttttcgttgacgattacgggcatattatccattttgccgttgggaaagaagctgtcgagcgcttttgtaaattcaaagataaaggtgtcttttacattttcgtgtacaagcgcgtagtcaggagcaatacaggtttgccccgcatttagtattttgccgaatgccgtgcgctttgcggcaagtctaatgtctgcgctattgtcgatgatgacagggcttttgccgccaagctcgagcgttactggcgtaagattatcggctgcggcgcgcattaccgttttcccgacagatgggcttcctgtaaaaaatatataatcgaatttttcggaaaagagcgcgttgttttccgcgcggccgccttctattaccgcagcctgttcgtatgaaaatgcgctttcgatgatcttgcgaactgccgcgctcccgcatggcgcgtacgccgaaggcttgacgacggcgcagttgcctgccgcaagcgcaccgataagcggctgcatgcacagaagaaatggatagttccacggggccattatcagaactacaccgtagggctctccggatacaaagctgcgcgcaggaaactgagcgagcgatgtatgcgcccggcgtttgcgcataaacgaccgcagatgcctgatctggtagtcgatttcatcaagaacgagcgcgatttcacacatatatgtttcataagccgattttctaaagtcggaaaaaagagcttcgcagattgtgttttcgtgggctgttacagatgccctgaggcgtttgagtgaattaatccgggcttcatacgaacgggtttttccggaataaaaatattcgcgctgcttttttacgatatcacttatttccattttaaaaactccttgttagcattccatcctgattgataaacggattttcaatatttaggattattatatcacgcaaagaatgttactatcaataaacagattatttttatactaaaggttcatgcaaggcaaccggtttgccatcgacatatagttcatgcgtatagagaataaattcaattttgtattcataataggtttctaagtctgagggtgcgctgatatatgcttcatcgcaggtcataaacataaacgataataaatttttaccgtccctaaatataggtatataaccaatataaagtatcactttgtagtagtctttttccttaataatatcaatatctgcttcgagaacatcagcaagtttctttgctaattctatataactgttgaaaacaattgaagaacgatttattttaatatatgagcttttttcgttgaatagtttttcaagttcggctatttttcggtatgcggcttcaaattcctctgaggtaaattcttttttatccgaagtcagcagccagtctttttcaaatcgttttttgtatattatctttttggaactcattttattttcctcttataaaattttagtaaaatgagcaacatatattgttcgtataagcacaatgtcgcttttctcattttaatgcaataatttagagaaagcaacaaaaataggtgaaaaaatgataatatatgatagattatgggaaacaatgaaacgaaaagggatttcacaatatactcttattcataagtataatataaatgaagctcaattagatcgttttagaaaaaatgatatagtaaaaactataacgctcgatcgtttatgtaaaatacttgactgcaatattgaagatatatgtgaatatatagaagatgaagaatagaaccaaccttttttctgcgggaaattaaggtttttatttttcaattatattgttcttataagcacaatattgcaattttcgatatcgtggaataatagtcatataaagttttggaaggaatcattatgattgtatatgaccgtttgtggaaaacgatgaaagaaaaaggagtttcgcaatattccctgataaaaaattatcacataaatgaagcgcagttgtaccgcttaagaaaaaatatggtggttaaaactattacacttgataggctgtgcgaaattttagaatgcgaaattgaggatatttgccaatatgtaaaagatagtgaagctaagaaataatccgtttaatagttattgacggattattttttatattattgctcaaaactaaaaatatgttattgttttgaagactttttaataactgttgcaatatgaaaaatgatttggtaaaataaggataacattaaaagaggtttttggaggcaaatatgagtaaagatgttgaaaaaaacagcaatactaaaataattatcgcgtcaggagttctgtttggagcgggagcgcttgcagctgcgatggtaatcggtcttaaaagtgttgccagccatatgtttaaaatagctgttgtcaatgaccgtgaaagcagtaaaaagaagaatgaggagcatatagacgtaaatgaagctcttgaaggctacaaagacgagatagaggcgagcagagagtggaaaaggagccagccttttgagactgtatacatcagaagcttcgataagctgagactggcggcggagtttctgccagcgcagggcgctaaaggcacgattataatggtgcacggctacagaagcagcgcagagcgcgattttgcatgcattatgcgcgattattacgagagaggatataatttactgctcgtgcatcagcgtgcgcatggcttatcggagggcaaatatataacgtatggcgttaaggaaagccgcgatgttacggattgggcaagatgggtagaaggtcacctcggcgagaatatggacatatttctcgacggcgtttcgatgggggcaacgacggtgcttatggcaagcggtctccatttgccgtcaaatgtgcgcggcatcatagcggactgcggatttacatcggcgcgcgaaatatttaagcatgtaatgaaaacgaagtaccacgcgccgggatttcctgtcataggcattgctgacagaatatcaagaaaaaaagcaggctttagctttaaggagtgcgacacgagaaaagcgcttgcgcgcagccgtgtaccggtgctctttgtgcacggtacgagcgacgaatttgtacctgttaatatgaccatcgaaaattacgaggcctgcaatgccgcaaaggaaattttgcttattgaagaggcagggcatgcgctgtcgtatttcgtagataaagaagaatatttacgcgcgctcgatgaattcttcaaaaaatacgggaaatgctgacgcaaagctttttacggcggcgcagttgactgtacttgacagtaatggccgtaaatgatataatatatagagaatttagagcaagaagctttagcaattaaaccatgaaggtttgtacccgcagttacgctgcgagtcagatttttcgtggttttattattttgcgaaaaataagagaaagctgcggaagtaaactaaacgctgaactaagcaagcagcaaaacacaaatgtagatggagcagaaagagagagaatgaaaagcggaaaaacggcggggaagatgaaaagaaaagcgaatagaggcacaggatttaaatacgcggtcagtaaaatagtgcagtttgcagcaacgctttttgtgctgtcacttgttgtctttgttatctctcgtattgcgccgggcgatccgctgagggcgttttacggagaagcggttgaacgcatgagcgcggagcagcttgcggatgcccgcacgcgtctcggactcgatgaaagcatctttacgcagtatataaattggctgtcgtcagcatttcacggcgatttcggtatttcttttaaatataagcagagcgttaccaaggtggtgagcggcgtgtatatgaatacgctgattttgacgctgatttcctttattataatatttaccgcgggaatttttattgctgtattctgtgtgttgcgtgaaggaagcttagcggacagacttatttgcagaataggagtggctattggcagtatgccggaattttttgtggcacttatacttgtgcttatttttgctgtaaatcttggaatttttccgtcaagcggagcgtatgcgatagggcagagtgaaaatattgctgacaggctgtaccacctcgtgctgccagtgatgtcaattgtgatttcgcacatatggtactgcacatatcttatcagaaacaagctgtcagaagaactgaggcaggagtatgtgctgctgtgccgggtaaaagggcttacacagcgcagaataatatataagcactgccttaaaaacgcgatgccggcaattgtgagcataatggctatatttctgccgcatcttctcggaggcacgtatgtggtggaaacggtattttcgtacccggggctcggcagtcttggctttgagagcgcgcagtatcacgattacaatatgctgatggtgatatcgcttatcacgggcttctttgtggtggcagcgaatatggcggcgcgcatcataaacgaaaggatagatccgaggacggagtacggcgagactgtgtatggggctgaaaatacgggaggtacatatgaaaaatagagaaagctggcgcagtaaatatgagcgccgcgataattttaaacgcccgtatttttcaatagcgtttctcgcagttttgacgacaggctgcctgtttgcggaattcataatgccgcaggatcctgtgtatatgaatcttgcggaaataaatgcggctccgtcgtccgcacatatttttggcaccgacacgctggggcgcgatattttttcgatgatttggtacgggggcaggatttcgctctcagtggcgctcattgccacgcttatttctacgttaatagctgcgctgtacggtaccgcatccgggcttgcgggaagaagagttgacgagtttatgatgagaggtacggagctccttatgagtatacctaacatacttcttataatatttgtacaggcgatgatcggtgaacctactgtcatttcaatcgcggtagtaataggaataacgggctggatgcctgttgcaaaaatggtgagaagtgaggtaaaacagataagaaactccgactatattctcgcggcgagaactatgggcgggaggtttttatatctgcttacgcgccatctttcaccgaattttatgccggcaataatgtttatgattgtgacaagcgtgggcagcgctattgcggcggaggctacgcttagctttctcggaataggactgccgacaaatgttatctcgtggggctcgctgatgtcgctttcgcagcaggcgatactttcgggatcgtggcatcttctcattattccgggtgcggtgctcgtgctgacgattataagcataacggatatcggtgaatatctgcgcgcagccggcagaagagagagactgctttgatacagaaaggggcaggtgtttgttttggtacagcgaagcatatgacaagaatatgtttaacagcggcaggaagctgcttctgaaatagaaaaagtaggaaaatcaaatattaaactaagcggagaaaagtgaggaattttaaatgaaaacaaaggcgaatatgcaaatgacagaaagcgttaagtctgtgcagaaggcggaaagcagggcgcagaataaaaacggccatagagcgtttgtacgggcagcagcattgctgatggtgcttgtgatgctgacggggttttctgcctgcggcgaagacagcagcagcgcggacggcaaaactctcatatatggcagcggagactatacggcgataaatccggcgctttatgagcacggggaaattaacctgcttttatttatcgggcttacggcgcacgacgcggataataacattgtgcctgcgtcatctgagagctggacatatgacgaagattcgtgtacgtatacatttacgctgagagacaatctgacatttcatgacggagagcctcttacggcagacgatgttaaatttaccattgaagcgataatgaatcctgataacggttcggaaaacgcttccaattttgaagatgtcgagtcagttacggtaattgatgatacgcatgtagctataaagctgacagctccgaatgtggcgatgctcgattatctgactatgggcatccttcctgaacacctgctcgccggcaaggatatgacgactgacgattttaacaggaatccagttggtgcaggaccttacaagcttgcggagtgggatttcggacagagcataacgctggagaaatttgatgatttttatctcggcacgccgaaaatagacaaaattatatttaaaatagtgccggacaacgatgtacgcgcaatgcagcttaagagcggcgagcttgattttgctcagataacgcctaaagcggcagtagagtttgaagatctcgatggatttgcgctgtataagatggatacagctgattaccgcggaattatgtataattttaacagtgaattttttaaaaagcacagagagcttccaaacatcctgagctatgccatagacaggcaggcgatagtggacagcgtgcttctcggctgcggcactcctgcttattcgccgcttcagaaaggtccgtacaacaatccggatatcgagaaatttgaatataacccagaaaaggcgaaggagctgctcgaggctgcgggctggagtatggaagctgacggatattattataaggacggtgagcagctcgcgtttgtcatcaataacggacagggagaccaggtgagaatagatatgtcaaacatctgcgctcagaatctcagggaaataggcgtcaatgcgacggtaaaggtaaatgccgagacagactgggctaatcaggatgcttacctcattggctggggcagtccttttgatcctgacgaccatacttataaggtgtttggaacggataagggggcgaattacagcagctattccaatgcgagaatagatgaaattctccgcgaggcaagagaaaaggcgacatttgaagagagactgccgctttatcaggaattccaggaagaaatgacaaaggatatgccgtatacatttatagcttatatagacgcaatttatgcaggaaaagacaatataacagggattacggaagatacggtgcttggacaccatggagtaggcatatttcataacatttatgagtgggatcttgccgaatagccttcgggcttagctcgccggcgcgccgcttttgcgcggcagaaatttagaaatggtgcgatatttaaggagcagggacgacagatgagtgaaaactatgaaaatgtgctgacaattaaaaatttgacggtcgcgtttgcagacagcggcactcgtgcaaaagggcgcgccttaaagcacggcggcagctgcgagtatgttaaagatacgaagaacgatgaaaacgcgctgtatgaaagcgctgcggttaaggacgtaagtcttgaactgcacaaaggcgaaatacttgcgcttgtcggtgaatcaggctgcggcaagaccgtgctctgcaaaagcattctcggcatattgtgcgacaaagcgcgcatactcagcggtgaagtaaattttggcgggactaatcttctgacgctcggcgaaaaggagctgcgaggataccgcggaggcaaaatatctatggtatttcaggatccgatgacatcgctcaatccgacaatatgtataggagagcagattgcggaggctgtgcggctgcacgggtctttaggacgcgcgcaagcaagagtggaagcggcagagctgatgcgtcaggttggcatttcgcaggtagaagagcgctaccgccagatgccgcatcatttttcgggtggcatgcgtcaaagagtagcgatagcgatagcgcttgcgggtaaaccggaaatactgcttgccgatgagccgactacggcgctcgatatcgacatacaggagcagatacttgcgcttctcaaggagatacaaaaaaaacgcggcaacaccatagtatttataacgcacgacctcagcctcgcacgcgattttgcggacagaacggctgtgatgcagggcggcagaatcgtggaaatcggtaagaccgaggaaatatttgaaaagcctgagcacgaatatacaaaacgcctgctttcttatgcgaattacggcaagggtggctcgcatagccacgggcgggcgcttgttttagagtcgcggtcacaacagtcagctgaatctttgccaagcgatacggcaggaacttgcgataagaaaagggagacggcgaaaggaagcaaaaaagcagctttggtgaataaagcggcgctcgcgggcggacataaaaagctcattgaaataaaaaatctcagcaaatactttaagctcggcaaaaacaaaactgttgccgcctttgagcatctcaatatggacatatatgaaggcgaactgctcggaattgtcgggcactcgggatgcggcaaatcgacgctcgcacgctgccttatggaaatatatgagccgtcgggaggggagataatatacgcaaaccaaaatatgcgcgctgcggatgacaagacactcggcaaatcggagcagaaaaactggaagcagatgatatttcaagactcagcgtcggcgtttaatccgcgcatgacggttgaagagataatcggcgagccgatatatataatgacaaaaaagaaaccatcgcgggagctgatattgtcgcttatggagcaggcggagctcagcacggagtttctttttcgcagaccttacgagctttcgggcggacagagacagcgcgccgcgatagcgagagcgttatctgccgatcctcaatttataattgctgacgagccgatttcatcgcttgatgtatcggtacagtcgcagatagtacatctttttaagaagctgcagtccgagcgcaagctcacgataatgctcatagctcacgaccttccgatggtgcagcatgtgagcgaccgcattatcaagttcagctgaggagaggtgctgtaattttagcagcggatgcttaaatgctgtaaatttgcggtatatatagtctatattttaaatatgatatgattgcgttatttaatagttgtggaggtaaagagaatgagaaaaaatttaggagagggcagctatgttttccctatgccggtatttataatagggacatatgatgaaaacggaattcccgatgcgatgaacgcgggctggggcggcattacagatcacgaggagctcaccctggcgataagcgcagcacataaaacagcgaaaaatattcagaagaaaaaggcgtttacagtaagcataggaactacggagcatgttgtttcttgcgattatgtgggcttggtttcggcaaacgatgcgccaaataagctcgaagccgccggttttcatactttcaagagcgagacggtagacgcacctcttatcgaagagctgccgtttgcactcgaatgtgagctgatagaatacaatcctgaaaatggcaagctcagagcaagaattgtgaatatctgcgcggacgaggcgatactcgatgagggcggaaatattgatctttcaaagttccatccaatcgtatatgactcgccgaacaatggatattatgcagtgggagaaaaaatcggagacgcgtttaagtcgggactcgcgctgaaaaaataaagcttgaaaaagagcaggcaacgaattgatgtctggcttccgcgtccgcgtatgcggctgcggaagcaggctagattcgttttttgtttttttggcagtcgatgcattgctgctgcccattctgcacaaatgattaaaaagcaaagtgcatgctcttgatgagcacagaggtttgcttttgacaagaaagtatgtaatgaagcgatttgatttaccttgcaattacagagctttaaacccgctgtgaatcatttcacgcagctcatcttccgagaattcagatgatctgccgcggcggcggatgagaatttcgctgagccttgcttcgtcaagcggcgtaaagtcatcgtagtgcatttttatgccgtagctttcaaacatagctgtgattttctgaacaccctcctctatatcgctggcaccgaaaagacccataaaatcgagaatatcgtccttatgcctcttggcaaggcccttgagccagtgcgggaagatgatgcagatagcttcgcggtactgaatgccgcagagttcttcaccgataccctctacattgtaaaagtcgtcgccataggcgtaggttttgccgcagtcgagaagacccatagttcccatagaagccgcccacataaggtctgcgcgggcttcgtaattattcgggtctttgacagcgacatcgagttgtttgagcacagtttggatgagagtttttgaaaattctctggaaactgtaaaattgcctacgacctttgtcgacagctgcactattgttgcgaatgcgccgtaggccgttgcggttttaccgagcccatatgtaaactccggattgagtatggcataattgccaaacatatcgtagattgcgccgtgttcacccgtttcaaaatcatcgatttcgctggcgccatcaacttccgagccgcccatcgggaatgtcgggatgaggattacaggaaggtgttttgcgtcaggtctgctgtctctttctttgacaaatgcccagagatcgacgtcgtttgctgcgccgaaggctatcatcttggacatatccatacagcttgagccgccggcgccgatgacaatgtctatattatttttcttacagatttcaactgcctcttccacttttttgaaatccggtctcgtgttgccgccaaaatcaaatactgctgcgtttttgagcgcttccatcagttttccgtgagtgccgtttgccttaagtgaattgccgccgtaaacgagcaataccttttttcctttgcataagtcgtcaagattatcgtgcgcatttcttccgaaaaaaatctttaccggggcgttaaaggtaaaatcattcattttattttcctcctcaaaattgtttataacgaataacatattttattgtttatattttataatgtaaaaacaaaaaaacaagtatgaacttttatgacacatactatcaaatatgccagtgcattttaaaataaattctaaacaaaaggcggcttttctcattatgcgcgtagcaactattgcgatatttttggtataaagccgatgtaaacggtaaagcataaaaccgtatatattttttacagagaaattgttttatataattcggaggtttttatgaaaaaatttaaaatgccgagtgcgtttacaatactttttatcattataataatcgttgctgtgctgacttttataataccggccggtgcatacgattatactggcgaagcgtcaggcacacctgagccgataccggggacatacagggagattgaaagaaatccgcagggattttgggagattttgcaggcgccgatatcgggattttttgacgcggttgatatcatactttttatactcgtaatcggaggctttctggctgtggtggcggatacgggcgcaatagatgcgggcataggcagcatcgtcagaaaattttcgggaagagaaacgctgatgattccgattttaatgctgcttttcggtctcggcggcacgatatttgggatggcggaggaaacgatagccttctatgtgcttataattcccatattcatagcggcagggtttgatgcagtgacgggctttgcagtggtctttataggtgcggggataggctgtcttggttcgacagtcaatccgtttgcgacgggcattgcgtcgggctttgcagggatctccattggcgagggaataatactgcgactgttgattctggcactggcgatgacaatttccatcatatttgtaatgaggtatgcaaagagagtgcaggcaaatcctatgctttcgatagtaggagctgaacacagggaattatttgcgaatgcagagcatatggctgagtctgatggcacagctgctgccggcggcagcattaagatgcagggaagtgaaggtgaaaatacgccggcgcatactaatgtgatgagcggcaggcaaaaggcaattctggcggtgtttggcggctgcttctttataatgatactcggtgttattccgtgggcggaaaaatttgatatatactttttcgagaatatcaatgaatttctcagagggattccggtgctcggagttgtgctcggaaatacgccgccgcttggagaatggtggttttccgatattacggtactgttcctgctgggctcgctcatatgcgctttcatatggcgctggaatgaaaccaagtttacagaactgtttgtagacggtgcgcgtgatcttcttggagtagcgctcatcatagggttaacacgcggtattactgttgttatgaatgacggaggaatgactgcgacaatacttcattttggtgaagaatcgctgcgctcgctgggctccgcggcctttgtcggactttcgtatgttttcttcattttgttatcgtttctcgtaccgtcgtcgtcgggacttgcggctctgtcaatgccgataatggcgccgatagcagattttgtcggcgtaggccgcgatcttgtggttacggcgtatgctacagcgagcggcattgtaaacctgattaccccgacgagcggtgttcttatgggcgcgcttgctatcgccaaagtgccgtacggagcgtttctcaaatggataatgaagctcgtagcagtactctttgtgatagtgcttgcagtgctctgcatcgcggcagctgtcgcataatgatagccgtattcgataaagctttacttgtgcagagcttttcagtcagcgaattataattttgtcgtcgaaagctgtcaaaaaggcagtaaggttatctttaaaagcgattttttgtaaaaaagataaagacgcaattaggcgcttaaaattataatgcacttaaaaggctcgcggaaaaaggcggcaaaacaacgcttccgcgggctttactttgtctttagctttgtggtatacttgtatgtgtgttttttccgcagaacgcgaaaaagcactgtttaaaagagaagatatatcaaaaagaataaaacggagaattgaaatgagagcagacggtaaaagagtaaagcacctcaaaccgttttttgaaataataccttatattatgaacaaacgggtggacgctcagaattatataacgcaggaagtggatcttgagggcataaggaactacataagtgaaaaacgcggaagcggcgcaggcatcagtcatataagtattgtaatcgcggctttttttaagaccgcgaaggaatatgagcagctgaattattttgtcgccaacaaaaaaatatacaggcgcaatcatttctgtatatcgtttgtcgcgctgaaaaacgatggcggtgatgatgtcacggagcagacagtcataaagatatttcttgaggacggagacaacatatttacgatatcgaagaaggtgaatgatgcggtagaggctaataaagatgtaaaaggcagcaatgctacagataagcttttgagcaggcttatgcattttccggggctggcgacgttttcggtcggttttataaagctgcttgataaatttggacttttgccgcgggcgataatcgacgcgagcccgttccatacaagtctttttattacaaatatggcgtcgctgcgttcaaagcctatatatcatcacttatacgaattcggtacgacaagcatttttgtggctctcggccagaacgaaaaacgccttgttttaaaaaaagatggcgcggtttcggaaaaaatgataatgccgcttggaatagtgacggacgagcgcatagcgtcggggcattactacacctctgcgttcaggaaaatggaaagatatttgcagaatcctgagctgctcgaagaagcggtgggctaaatacaggaacggagaaacggatataaggaaaaatatgcggagcgcctttatcggaggcgcgcagcaaaacagaaatttaaaggtacggcgcattgaaacacgaaatcaaaataattaaaaaagaggaaagcgcaggcacgctttcgcatatgacgctggtaacgccgggggatgaaaaaaaggaaattatttcggaaaaggtctgcggctacttatacgtgaaaagagagtttcagtgtgtagacaaatttgtagtcgtgattatagatggtgagccatatacgctgaaagttggcgatagactcgtattttcggcgcgtcagaacgatgaggcggcaattttttgcatgggtgacggcgcaatgagtctgctgtgcacttactataatgaggatgaagctaagctgagcacggcagagacggaaattgaagaaatgctgaaagcatcagcgcctgaaactgcaaatgagccgcaagctgtagccgccgcggcttcggaaaatacaaagagcgcatcacttgcatcagaccttaagcttgtatataaaatagcttttacacagttccgcggcagtacgctcatagtacgcagcctgcgcgaagtctggtacgacagagccttgcagcacggcattgatcgtgtacaaaaagcatatattccgtacataattattataataggacttatggttataggcttttcgggggcgggaaaaataccgaataacactttgtttgcgataatggggggctgggtaatagctgcactcgtaattatagtaccgctgattttttatgcagcgctgccaaagccggtagcgccgcatataaaacgcatagacagtctgagcgaagaggagcgcagactttatgaagaggacttaagagaaaataaaagagtaaataaaattatcaagcgctataaaatgccggacagggacagggtgaaaaacggcagacgctgatgaaaatatattaacatagtgcataaaaattcatgaattgtaaggaaaggagatacttaaatgatttttttcagaagtgattacagttcaggcgcacacccgagaattatcgaagcgcttgcaaagacaaacctcgaacatacggatggttattcgctggatccgcattgtgaaaatgcggcagcgcttatcaaaaaaagacttggtgatgattcgcttgacattcattttacagttggcggtacgataacaaatctcacggctatagcggcctggctgagaccgtatcaagcggcagtatcagtggcaagcgggcacatttatgtgcatgagacgggcgctatcgaggccacgggacacaaggtaatagcgatgccgggaaaagacggaaaactcacaccggatgatatacttgcggccgttgaaatgcacaaagatgagcatatggtgcagccaaagctcgcttatatttcaaattctacggagacaggcactatatatacaaaagcagaattaaaagcgctgcacgattgctgcctcgaaaaaggtatgtacctctatatggacggtgcgcgtcttggatcagcgcttactgcggagggaaatgacgttgcatttgcagatctgccccagcttacggacgcgttttatataggcggtaccaaaaacgggtttttatttggcgaagcgctcgttatctcaaatccggcgctcaaatctgactttagatatatgataaaacagaggggcggaatgtttgcaaaaggaaggctgcttggtctgcaatttgaggaaatgttcagagacaatctctattttgatattgccgccgataccaacaggcgcgctaaaacgctccgcgacggcattgccgcaaagggatataagtttatgtctaattcgccgagtaaccaggtttttccgatatttaaggcggaaaaagttgcagaacttgagaaaaaatactttttccttccacaggaatactacgacgacggtacgattgcaataagacttgtatgttcgtggtcgacaaccgataaagatattgaagcttttctcgctgacatttagcgaggtttaagtattgcagagtttcaaatttgaatacaccaaaaaaactatattataaaaagtgcgcctgccgtgacctaaatgttcacggcaggcgttttaatattaaaacataatttagtaagtttaaaaataatattaaaataaaaaaattgtaaatattttatacaattacttgattaaaaatacaaaatgatatatcatatactgtacaaagtgtaaaggagcggaattgccgcattgtgctcattccgtttca

SEQ ID NO: 1724 - DNA, 22858 bp, Unknown
  16S sequences of unknown bacteria
atttttcaagggcactggggtggtattggcggggatagagtgcagtcaaaaatctgtgatttttgcgaacggcattcccgtccaaaagcgtgtcgaaaaattcgacacgcgcaaatgtaacctgtggttaaaatttcctgtctttacagacgagggggaagaaaaatggaagacagcagaattaccgagcttttcaccctgcgggatgaaagcgcagtaaccgagacggaaagcaaatacggcgggtattgccataagcttgcatttaatatacttggggaccccaacgacgcagaggaaacggtaagcgacgcgctgtttcagctgtggcaggcaataccgccggaaaagccgaaaagccttggggcttattttgcaaaaatcacgcgtaatatagctcttaaccgaattgaacgcagcagcgccaaaaagcgcggcagcggcgagcttcccctcgttttggacgagcttgattactgtgtgccctcatctcacagcaccgaggcggaggttgacgcgcgtatgctctcggctgttatcaaccgttttctttcctcgcaaaaggagactgcgcgcgcaatatttttaaagcgctactggtatatgcgcccgataagcgaaatagccgccgaaaccggcttttccgaaagcaaggtaaaggtaacgcttatgcgaacgcgcaacgcgctgagagagtatctcggcagggaggattttaacgtatgacgaacagggatattttaaacgccttaggcgatattgacgaaagctacattaccgaggcaaacggcagaataaaaagcaaaaagggcattattataaggtattcggctatggcggcgtgccttttaatagtagccgttggagcatttgccgcagtgaagatgataccgcgcggcaaaatgaaaaacagcgccatcctcaataaatcatatgaagaatatgacggcaatgttgcagactatgatggcgattacagcacaattgaaaaaaccgacggcacaaaggcaaacggctctgccaagggaaacggcgcgtcatcatcggaaaatgaaactgcttatgttaaaagatgggacgaaaaaacaaacaccgaaaagttccccatagtaaaaataaacggtacggagtatagcgtggcaaaccgcccgattccgtccgataaaataggaaacagcataacaaggcttacggtgttaggcagagatgaatacacaaacagcgaatacgccgcaaatgttgaaatttatgaaataaagggtatctcatcagagtgcgccgcggcggtaaaatacgatgcgggcggaaaatattacgtctgccgcaactcacactacaagcccgaaacgctggggcagtttatgaatgatttaagtcttaaagaaaaccttacctttgtttcctttggcggcacgcaaatgaaaaacggtaaagctatttgcgacgttgaatatacaaatgtggataaagcgaaggtgtgggagcttttgttttcggacgccgcagccaaagcggtaaaggactatgactctatgaattttgaaacggcggcggatatagccattgatttaaagcttttgggctatgagaatatatcgctcgccgttacccgcgacggatatttaaccaccaatattttagatactggcaaggcgttttatataggcaagcccgcggcggagaaatttttaagctaccttgaaaaggaatgcaaaacaaccgtaaagcataaatatgattattcagagtcgacaagcggcggaggctcgggtaattccgcaagctacagcgtaagtcactcggtgggaagtaattgaaatgtcggagcggaaattgcgtaaagcggcggtaattacggctgcgcttatattgattttatttcttattcccgtgaaaatcaactataatgacggcggcacggtgcaatataaggcggcgctttatacggtggtaaaatggaactgttatgtagagccggaagaatatatttatgaaggctcaacgtattattcatataaaaaatataaaaacacctcggtttatttatttcccggcagcttaaagggcatagacgagctttggaaaatcgaacagaaaaagaaaggggtatgatttatgagcaacactaaaaattcggcgataaagaacattaccgcagcactgctttgcgtggcgcttgcaatcggcgcgggctgtatgataaaaatacacagggataaaaaaacagccgtaaatttaaaaagcgcggaaacctatgatgaggtttacaacaaaataaacagcttaaagcttaaaaccaatatcctttacggcttaaaagacggtatggcaaagggcagcagccgtaacgaaaaagcagaatatattgaagacagcaacacgtccgccgcaacaaacggcgcgtcgaaaaccgccaaagccgattacagcaaaaccacaacgcaggtagaaggcgttgatgaggcggacattgtaaagaccgacgggaaatatatttatattctttcaagcgattacacattttacacctatgtgaaaatagtcgattcgaacggcggtgctccaaaacagttaaacgatataaagcttgaaaatttcaacacaagcgaaatgtttttaagcgataaccgtcttgtgcttttggggtgcgcggcgaacagcgataaaacggcggcggtaatttacgatgttacagaccccgaaaagccgaaaaaggtaaacgaatgtaggcaaagcggcggctatgccgattcgcggcttataaatggaaagctttatattgtatcaagctacggtgtgaacaccgaaaatattaaaaaagacgatatttcaacctatgtgccgtatgtcggctgcggcgaaaagaccgaaaaaatagcggcggactgcatttatatgtatgataaatgtatggaatcaagctataccgtggtgtgcggctacgatataaaggacggcgcgaatatatcggcaaaaaccgttttcgggggactcagccgcatttacgcatcgaccgataatataattgcgacctctgcttattatgacgaaaagacccagatagcgcggtttgaaataagcgacggtaaggttgaacttaaagcgacgggcgaaataaaggggtaccttttaaatcagttttcaatagacgaatacaaagggcatttccgctttgtgctgacagaaacatcagccaacggcggcacccaaaactcgcttgttatactcgacggcaacttaaaggaaaccggaaaaatagagaatatagcgaaaaacgaaagagtatattcggtgcggtttatgggggatgtggcttactttgtcaccttccgccaggttgacccgcttttcagcgtggatgtaagcgacccgacatctcccaaaataataggcagccttaaaataccgggcttttccgattatcttttcccctacggcgagggcaaattgctcggcgtgggcagaagcgccgatgaaagcacgggcagagtaaccggaatgaaattatccctttttgatatttccaaccccgcaaatgttaccgagagctttaaaacggaggtaggcaacacctattcagaggcgcttacaaaccacaaagcgactttggcggacgctgataaaaaccttatcgcgttcccctataatgatgaaaagggcacgaaataccttatatactcgcttgaaagcacgggcttcgcgcttaaagcggaaattccgctcggcggcgacggcagcacctggggcacctgccgcgggctgtatataggcaagctcttttacgccgtgagcgataaggaaatagcggtaattgatatgcaaaatttccaaaaaacagcagagcttaaaattaaatagccgcacgattgacaaagccgggcgcaagtgatattattataatataagtgttacaaggagcattaacatgaccgcaaagatattcaaacccataatttgcgcttttattataatttcactgctgctcggcgtttgctttacggcgtccgccgcaggcactgacgggcatataacggtatctaccgttaccgccgtaaacggagactcggtaatagtaaggcttaaaatggaaaataacccgggtataatggcaataaccgtttccgttacatacgatagcagcgctttaacatatgaaagatattacgagggctatttgtgggattacaccgttgccgaccaccccgataaaaaccttatccgttttgtaaactgcgaaaacggtaacgagcgctcaaacggcactatgatagcctttaaattcaaggtgaaggaggacgccgatttcggcttttacccaataggtattgaatacaagcagggtgatttttgcaactggaagctgcaaaagctgatgcccgaggtgacttcgggcggcgttaatattgaatataacggtaaaaactgctcgcacaaaaaatacggcgagtgggaaacggtagcccccccgaaatgcgaaacggcaggagccaggcagcacgcctgcgtaaaatgcgggcatattgaaataaaggatattgcccccacgggacacgatttttcagaagaatggacggttgatgagcccgcaacaaaggaaaaagagggaaaaatgtcacgtcactgcaaaaattgcagtgccgcaaccgacctgcttaccttcacgcttgaagaggcagaggaaaacggaattgataacaaggcgtcaggcggggttaagccctcaaagtttactgataaattaaaggaggagcagctgccggaggaggaaacaaagcccgataataattcaggctcgggggataactcaaagggcagcaccggcggcgtattagacagcttaccagttgaaagcggcagcgcggcggaaaagcttataaacggcctgcccgatggaataaaacggcttgaaaagctgtttataggctcgtttttcataattttaaaatcttttttaataatgctgtaaaaaaatgttgacaaaataaaattacggtgatatactgtagacaatataaacggacaaattttccgctatgggaagtattgtaccctgattgtattgtctaatcaaatttaaaaaagctgtgacgaagacggtctgaaaattaagctttaagagagccggtggttggtgcgaatcggcagtgataaatttcgtttgacccatcacttccgagccggagggctgaaatttaagtaggttttcccgtgattgctgcgtaaaggcataggaattgcttgattccgaagagcggcggttttataaccgcaatttgagtggtaccgcgagtgttaattcaacacccgtctcaaagaaatttgagacgggtgtttttttatttgaattttatcaaggaggaattaaaaaatggcaacagtatcgaccgataaattaaaagaggtagcaaagcgaattcgcgaaatgcgggagatatgcgacattaccgaaacggatatggcgaaaaaaaccgaagtgagcttagaagattacagggcttacgaaaacggcgagcttgattttccgtttacctttattcataaatgttccttggctttcggaataggaataaccgatttacttgaagggcagagcgcccacctttcctcctacaccgttacccgcaagggtcaggggcaggaaaccgctaaagaggacggaatagaaattcagaacttagcgccgcttttccgcaaaaaaatagccgagccttactgggtgcgctatgaatacagcgaagagctgcaaaacaagccgatacatttaacaaagcactccggccaggaatttgactttgttatgagcggcagactaaaggtgcagataggcgaaaatgtggaatatttaagcgagggcgacagcatttactataattcctcaaccccccacggtatgatagcggtagacggcagagactgccttttcgtggcggtagtgctgcccggcgaggacgttaaggaaaacgttatccgcgataccatagtttcggcacattcgggcaataaggaatatgtttcctcaaagttcgtggaatgtacagaagccgaaaacggcgcgctgcaaaaaatagagtttaaaaatgaggataaattcaacttcgcctttgatattgtggacgaaatagcgaagaaagcccccgaaaagctcgcaatgctgcatattgataagcacaaggttgagcgccgctttacctttaacgatatgaagcgcgcctctaaccagtgcgcaaactactttaaatcgctcggcattaaaaagggcgaccgcgtaatgctggtgctcaagcgccactaccagttctggtacgcaatactggcgctgcataaattgggcgcggttgcaattcccgcgaccaacctgttgcaggagcacgattttgactaccgctttaacgcggcagaggtaagcgcaatagtatgtaccgccgacggcgatgtggcgcaccaggtcgatttggcagagcctgcaagccccacccttaaaaccaaaatactggtgggcggcgagcgcgagggctggcataatttcgatgaggaattcccgcttttctcggcgcacttctaccgcaccgaggataccgcctgcggcaacgacttaatgcttatgttcttcacatccggcacaacgggctacccgaaaattgcggcgcataactataaatacgcgctcggtcactatgtcacggcgaaatactggcacggcgtagatgaaaacgggctgcacttcaccatttcggaaaccggctggggcaaggcgctctggggcaaactttacgggcagtggctgtgcgagggcgcggtgtttacatacgatttcgaccgctttgacgcggcggatatactgcctatgtttgcaaagtaccatataaccaccttctgcgcgccgccgacaatgctcagaatgatgataaagcaggatatctcgcagtacgatttatcctcaataaagcatatgaccacggcgggcgaggcgcttaaccccgaggtttaccgtcagtttgaaaaggctacggggctgcagataatggagggcttcgggcagacagagcttaccttaatgatagcaaaccttatgggcaacagccataagttaggctcaatgggcaagcctacgcccgcatatgacgtggatatattagaccccgaaggcaaccccgtacccgacggcgaaacaggagagattgtggttaagacctcggataaagtaccctgcggactgtttgcgggatattataagaatcaggaaaagaccgacgaggtatggcacgacggctattaccacacgggcgataccgcgtggcgtgacgaggacggcttttactggtatgtgggcagagtggacgacgttatcaagtcttcgggctaccgcatagggccgttcgagatagaaagcgtaataatggagctgccctatgtgcttgaatgtggcgtttccgccgcgcccgacgaggttcgcgggcaggtggtaaaggcaagcatagtgcttgtaaagggcacagaaccgaccgaggagcttaaaaaggaaattcaggattacgttaagcaccacaccgcgccctataaatacccgcgtatagtggtatttaaggacgagctgcccaagaccataagcggtaagattcagaggaataagctttaattccgaattggctccctacggtggttcttggcaccctcctcagagggaggcaaaaaattaaattattgacaaatttccaaaactgtgataaaataccaatatcaaattaaaaaggcgccgacgaagagggcgcagactatctgtttttaagagaggcagcggttggtgaaagctgctgaataggggtttgcgtttgtagcttctgagccgggaggaagaaagcgtgtttgcgagtagaccctctccgtgattgctgcgtaaatgcataggaattgcttgattccaagaggggcggttttaataccgcaatttgagtggtaccgcgggtaaccgaaaagtttttaaattcggcgctcgtctcaaagtaacagctttggggcgggcgctttttccgtccctcgaaagggagtaagaaaatggaacaaatgacagggcttgatttcaaattaggcgaaattgcgggcagaataagggagctgcgcgaaatcgaggggcttaccgccgccgatatggcaaaaaaaaccgccgttagcgaagaagaataccttgcctgcgaaaacggcaggagcgacttaaactttgcctttatttaccgctgcgcactggctttcggcgttgacgttaccgatattattgaggggcaaagccctaaccttaaatcctacaccgtgacccgccgcggcgaggggcagcgcattgaaaaggcgcacggtatgacctactataaccttgccgcgtctttcaaaaaccgcatagccgagccgctttatgttaaaagcgtgttcagcgaggaggcacagcaccgcgatattgagcttaccacccatacagggcaggagtgcgaccttattattgagggtaagctaaaggttcaggtgggcgagcataaagaggttttaggccccggcgacagcatttattacgacagctcaaccccccacggaatgattgcggtggacggcaaggactgcatattctacgcaatagttttaaacccgacgggcgagccgataccggaacttacgggaacaaagccgaatgaagaaataacccccatatcgcgcgacgataataaggacagaatttacaggcagtttattgatattaccgagaacgaaaacggcacgccgctttcaattaagtttaaaaataccgagcgctttaatttcgcctttgaccttgtggacgcattggcggataaagaccccgaaaagcttgcaatgctgcatatttcgcgggataaaaccgagcgccgctttacctttaaagatctaaagaaagcctctaaccagtgcgctaactactttaaatctttaggcattaaaaagggcgaccgcgtaatgctggtgctaaagcgccactatcagttctggtttgcaatgctggggcttaataagctgggagctgttgcgattcccgccaccaatcagttacaggagcacgatttcagttaccgctttaaggcggcgggcgttaaggcgattatctgcacggcggacggcgataccgcccaccaggccgatattgccgaaaaggattacggcaagccgcttataaagcttattgtaaacggcgagcgagagggctggcgcagctttgatgaggaatacaggctttacagcacccactatgaaagaacggcggacgcaccctgcggcgacgaccttatgcttatgttctttacatcgggcacaagcggctacccgaaaattgcggcgcatagctataaatacgcgctcgggcatttccacaccgcgaaatactggcacaatgttgaccccgacggtctgcactttactatttccgatacgggctgggcaaaggctatgtggggcaagctttacgggcagtggctctgcgaggcggcaacctttgtttacgatttcgaccgctttgacgcggcagacatactgcctatgtttgcaaaatatcacattaccaccttctgcgcgccgcctacaatgctccgcatgatgataaagcaggatatttcgcagtatgatttttcgtccgttaagcatatgaccacggcgggcgaggctttaaaccccgaggtttaccgccagtttgaaaaggctacggggctgcaaatattagagggctttgggcagagcgaaagcaccatgattataggaaatatgacgggcgagccgcataaaataggctcaatgggcaagcccgcgccgatatatgacgttgatattatcgacgcggacggtaaatccgttcccgcaggcgagacgggcgaaatagtgattaacattaaaaacggtttgccctgcggtcttgcaacctgctactacggcgataaggaaaagacggacgaaacctggcacgacggctattaccacacgggcgacaccgcgtggcgtgatgaggacggcttttactggtatgtgggcagaattgacgatgttattaagtcctcgggctaccgcataggaccgtttgagattgaaagcgttataatggagctgccctatgtgcttgaatgtggcgtttcagccgctcccgaccccgttcgcgggcaggtggtaaaggcaagcatagtgctggttaaaggcaccgaagcgacagaggagcttaaaaaagaaattcagacctatgttaaggcgcacaccgcgccctataaatatccgcgaattgtagtatttaaggatagcctgccgaaaaccacaagcggcaaaattcagcgaaataagctgtaattccacattcccaattaaaaacggtggtgattatatgaaatttaaaagactgaccctgctttgcgggcactacggcagcggcaaaacaaatgttgcggtaaactttgcgtttgaccttaaaaatcagtataacagtgttgcaatagccgatcttgatattgtaaacccatatttccgaacaaaggacagcgcaaaggagcttgaaagcgcgggtatagagcttatctgctcggaatatgcgggaacgaacattgatattcccgcaatgccgcagcaaatgtatatgataaccgactgtaaggacaaaaggtttattcttgatataggcggcgatgaccgcggcgcgctggcgctcgggcggttagcccccgcaataatcaaggaaaatgactacgatatgcttatggttataaactgctttcgacccctgacccgcaaggcggaggaagcaatcgaggttatgcgcgaaatagagtatgcgggcggcattaaatttacggggcttgtgaacaactcaaacttaggggaggaaaccacgcccgaggacgttctgtcctctttaccgtatgcggatgaggtgtcaaaactatcggggctgccgatagcctgcaccacggtacataacaccgtttatgacgctttaaagggcaaaacaaacggtttataccctataaaattacaaccgaaaatcaactgaaaggaagtaatacaatggcaaaactgacatttaaaaccgacaactgcaagggctgcgggctttgcgtggacgtatgtcccaaaaaggtgctgcgccttgcaaccgacaagatcaacaaaaagggtcaccaccccgtagaggcggcgaacgaggcggattgcatcgcctgcgccttctgcgctaccatgtgtcccgattgtattattaaaatagaaaggtgagtgaaaaatatgtccgataaggttcttatgaaaggcaacgaggcaattgccgaggctgcaataacagcgggctgccgccattatttcggctaccccataaccccgcagaccgaaattgccgcatatatggctaaaagaatgccgaaaataggcggcacgtttttgcaggctgaaagcgaaattgccgcaataaatatggtttacggcgtttcttccacaggtcaccgggttatgacctcatcctcaagccccggtatatcgcttaagggcgaggggctttcctaccttgcgggagcggatttgcccgcgcttgttgtaaacgttcagcgcggcggaccgggactcggcggcatacagccctcgcagtcggattattttcaggctacaaagggcggcgcacacggcgattttcatatgatagttttagccccctcctccgttcaggaaatggcggacctgaccgttaagggctttgagcttgccgataaataccgtatgacctctatgattttggcagacggcacaatggggcagatgatggagcctgtatcactcaattacgatattaagccaagtcctgaaaagccgtggaccaccacaggcaccaaaatggcaagaaagcataacatagtaaactcgctgtcgcttgtgcccgaggagcttgaaaggcttaattttgagcgttacgagcgctataaaacggtagaagaaaacgagactatgtatgaggaatatatgaccgaggacgccgaaattgtaatagcggcgttcggcatagcggcgcgcgtttcaaaaaacgcaataaccgaagcccgcaaaaagggcataaaggtgggtatgatacgccccataaccctgtggccgttccccgaaaagccgtttaaaaaggcggcgcaaaccgcaaagcagtttatttcggttgagctttcaatgggtcagatgattgaggacgtaaagcttgctacggagtgcaaggtgcccgtaaccctttgcaaccgcacgggcggtatgataccctcgcccgatatggtgcttgatgcaatagaaaaagccgcagaaaacggaggtgcaaaataatggtagtatttgataaaccccacgcgctgacagacgcgccgttccattattgccccggctgcactcacggtatagtacaccgtcttgtagcggaggttattgacgaattaggtatagagggcaaaaccgtaggcatagcgcccgtgggctgctcggttttggcttataactattttaactgcgatatgattgaggcgtctcacggcagagcgcccgcggttgcaacgggcgttaagcgcgccgagcccgacaatatagtatttacatatcagggcgacggcgatttagcctcaataggtatggctgaaacggtgcactccgctgcgagaaacgaaaacataaccgttatatttataaataacgcaatatacggtatgacgggcggacaaatggcgcctacttccctgcccggtcaggtaacccagacttcgccctacggcagagacgtaacgcagtgcggctatcccgttaaggtgtgcgagctgctgtcacagctggacggcgcggaatatttggagcgcgttgccgtaaacaacgttaaaaatgttaaaaacgcgaaaaaagctattaaaaaggctttccagaatcagatagacggcaagggcttttcgcttgtagaggttatttcaagctgcccgaccaactgggggcttaccccgcagaacgcccttaaatggatagaggaaaaaatgataccctactatcccctcggcgtttataaggacaggtcagccgcaaaggaggaaacaaaatgagcacaacgcagtatttattcgccggcttcggcggtcagggcatactttttgcgggaaaatttgcggcgtataaggggcttattgaggaaaagcaggtaagctggctgccatcttacgggcccgaaatgcgcggcggcacggcaagctgttcggttattataagcgatagccccgtaggctcgcccatagtttcaaagcccgatgttttaatagccatgaacctgccctcgcttgaccgctacgaaagcgccgtggcagcgggcggcacaatatttgttgactccacgctggttgagcgcaaggtaaaccgcaccgacgttacggcgtattacgtgcccgcaacccgccttgcaaacgaaaacggcatacccacccttgcgaatatgatacttatgggcaatattttaaaggttatgggcgagtttaaagaggaaagcgtttcagcggcgcttaaaaaggttatttccgcaaagcacgccgatatgctggacgtaaacctaaaggcgcttaaaacaggcgcagagctttgaaaggaacggtgttaaaaatggatattaaaattacaaaggctcccgttttaaaggaaaagcccgacagcagtaccttaggcttcggcagaattttcaccgaccatatgtttatgatggactattcgcgcgaggagggctggcacgacgcgagaattgtgccgttcggcaatatttcgctgcaccccgcctcaaccgtgctgcactacggctccgaaatattcgaggggctgaaggcttaccgccgcaaggacggcaaggtgcagcttttccgcccgaccgagaatataaagcgtatgaacaactctgccgagcgcctatgcctgccgcagatacccgaagacgactttatgcagatattggatacctttataagccttgagcaggattgggtaccctctgccgagggtacttccctttacattcgcccctttatgttcggcaatgatgaaaacttaggcgttcatgcggttcatcacgcaacctttgttattatcctctcccctgtgggcagctattacaaagagggcattaaccccgttaaaattatgattgaggataaggacgtgcgcgcggtacgcggcggcacgggctacgctaagtgcggcggaaactatgccgcaagcaaccgcgcgggcgaaaaagccgaggaaaagggctattcgcaggttttgtggcttgacggcgtagagcgcaagtatattgaagaagtgggcgctatgaacgttatgttcaaaattgacggcgaaatagtaacccccgcgcttacaggctcaatactccccggtattacccgcaaatcctgcatagaggttttaaaaagcgagggctacaccgtaagcgagcggcttttgagcgtggatgagctcggcgaggcgcttaaaaacggtacgcttgaggaggcctggggctgcggcaccgcggcggtagtatcccccataggcgagctgtgctataaggacgttaagtacaccattaacggcggcaaaataggcgaggtcacgcagcacctttacgataccttaacaggtattcagtggggcaggctgcccgatacaaagggttggacatacccgataaaataatgcggaataattgaaaatccccctgctgttatcaattaagatagcggcaggggtgcctttttcgtttcaaaataatcattgattgacaaaacccctcacgcgttataaaataataatcggggggtttaatatgaaatttcagttcaatattgatttaacggataaggattatgttgattttaatattttttggcagacaaaatcccgctacggcaaaaatccagataaaagcccttataaaaaacggaaaaccgccctattcgccccattcggtgcttaccttttatgaggactgctttacagaagaaacggaagacattaaaaccgaaattaaatattcgggaattgacagaataagcattgttgaaaacaagctgattatgattcataccaactcggtgcaggcttatctgctgcccgcaatctgcttcggctcagatataaaatataacctctttaaagactttataaaaacaaagtgcgccgccgttgatacatataaataaaggtgaaaaaatgaaaaaatacacaacaaaatcccccgaagaaactgaaagcataggctttcggctggcgcaaaccctgcgcggcggcgaggttatagcctttcgcgggggtctcggaatgggcaaaacctgctttacgcggggactggcgcgcgggctcggctttacgggcacggtcacgtcccctacctttgcgcttataaacgaatatatcggcggcaggctgccgctttaccattttgatatgtaccgaatttcggggtgggaagacctttattccaccggcttttttgagtacgcagagcaaggcggagtaatagcggctgagtggagcgaaaacattgaaaacgcactgcccgcgggcactataaccgtcagctttgaacaaacgggcgaaaacgaacgcgtgataaatattgacggcgcgtgcgatcttgatttaacggagactgaaacacaatgaaaatactttctcttgaatgtacggcgggtcctgcctctgccgcaataaccgaggacgggcaggttattgcctcggcctttgtaaacgtaaagcttacccactcgcaaacccttttgcctatggcagaggggctttttgccgcggcaaggcttgggctttccgatattgacggaatagccgtaaccgcaggtcccggctcgtttacgggggtgcgcataggcataagcgccgcaaagggccttgccgccgctcggaatttgccctgcgagggggtatctaccctattatcgctcgcctttaactaccgcgataccgattgcattgtgtgcgcggttatggacgcgcgctgcaaccaggtatacaacgcgatttttgaaatttcgggcggcaaaattacccgcctgtgcgaggacagagcggttttatgcgaagaacttgcggaaaatttaaaaaaagtgtcgcaaaacggagaaaaacgtgttataatagtgggcgacggaacagacgtgttcttcccgtttgccgaaaatatacccggcgtttgtaaatcggcgcccgagcgcaggtatcaaaacgcggtatccgcagcacttgcggcggaggatatatttaaaaacggcttatccgtaacgccggacaagctgctgcccgtatatttaaggctgccccaggcagaacgcgagcttaaaaagaaaaaagaggtgagcttatgaaaatagcagtaggctgtgatcacggcggctttgagcataaaaacgcaatagtcgagcacctgaccgccgaaggctttgaggtggaggatttcggcatatacgaaaataaatcggtcgattaccccgaaatagcgcttaaggttgcaaacagcattaaaaacggcgaaaacgagctgggaatacttatttgcggcacaggcataggtatgtcgcttgcggcaaataaggtgaacggtatacgcgccgccgcctgcagcgagcatttctcggcaaaatacaccagacttcacaataactccaacatattatgtctcggcggcagagtaataggtataggcacggcgcttgagctgtgcgatattttcgtcaataccgagtttgagggcgggcgtcatcagcgccgcgttgatatgataaccgaaattgaaaaatcaaattcctgaaggagcagcaaaaaatgaaagataacgtatttattatggaccacccgcttattcagcataagctttccatcctgcgtgatgaaaaaacaggctctaagcaattccgcgagcttgtaagcgaaatagcaatgcttatgtgctatgaatcaacaagagacctgccgcttaccgaggttgaaattaaaacccccataaccaccgccaaaaccaaaaagcttgccggcagaaaaatggcgtttgtacccattttaagagcggggcttggcatggtagacggcgttttaagccttattccggcggctaaggtgggtcatataggtatgtaccgcgaccccgagacgcacaagccggttgattactactgcaagctgcccgccgaccttaacgagcgcgatgtttttgtgcttgaccccatgcttgcaacgggcggcagcgctattgacgcggttaccagaataaaggaatttaaccccaagcgcattaagtttatgtgcattatagccgctcccgagggaattgaggcgttcaccgccgctcaccccgacgtgccggtttactgtgcggggcttgacgatcatcttaatgaccactgctacatagttcccggtctcggcgacgcgggcgaccgtattttcggtacaaaataagcagaaataaagcatttccccgagctttgactaatgccaaagctcggggaaatttttaattaggaattataaatctttttaaccggacggacgtatttccggaatcttttgcaatcgtggtaaaaataaaacactctgccgggggttgtatcaagctcatagccgctgctttcatagtcgaactccttcattgcacgctcaatttccgcctcaacctcggcgttctgcgtttcaaaatcaaagggtccgtgctcaaaaacaatatattcccctgcgggcacattcataataagcatttgcggcggaatttctcccgaataatcccgcggcagccgcacaccgtaagcctcggcaagcggaataccccagttgcaaattctgcccgtgggctcgtttataaacgccataagctgccccgcgcccgcgtcggacatatctcccccgacgtcgtcaagctttcccttaatgctttcaagcagaccgcacaccgtttcgcagtcctgccccggaataaggctttgcttttgccagaaatcccaatagcctatgctttcgtaatttctgatatgcagaaatttatgttccggaatcgtaataaaataagttttaatgttttctgcctgttttgccatgcccgctccctctattcctaaaagataacactcaaaggggcgcagcacggtgcgcaaaactatcggtccggggcacccgcggtattcgctcggcgttacgccgtaagccgatttaaaggctcttgtgaacgcctcgtgcgaggaaaagccgtaattcagcgctatatccaaaaaaccgttttcgccgtctctcacgtcccttagtgcaaaggcaagccgcctgtgccgcaggtagtctttaaggctcataccggatatttctctgaattttcttgaaacataaaattcggaatacccaagataccccgataattgcgagagggtcagccccgcatcgtcaccgttttttatgcacttgtcaatttcaaaaataatatcctgaatatttctgccccattcgtgcataagccctgctcccccgactgttttacttaattttaagggcatttttcccccgccgcttgatttcagttgcggtgttttcccgtcgcattataaaacataacctacaaacgagacggctatattgccgtcaggcatttgcgcgggacttattgaaaatttatttttgagccataaacggtgcgatggcacattttctgtttttaccttggcgcgtatttgatatacctgttccgctcttgcaatttcaattattctttgaaccattttcgttcctatgccgcggcagcgcagctccggctcaaatacttcaatatagttgataaacatttcttccgcctctacaggggcgggaatttttcttttatgcgcccaaagaaaacctacaatgtcattcccgtcttcggcaataacaagccgcccgtcgccgaagaaaaatttatcaagattaggatatttgtttaacaatcgctgtttattgctttctgtgcctgagtgaatcgctattttattttctgtgctattcattttattacccactttttgcaaataattataatttccgcccgtttattttttctgaaaccaaatcaatacaccaaaatatgaagcacagcaaaatcgctgcttgcaggcacagcaaaaacaaattaaaatttgagcctatgccgggttctgcctgaagtactgccacaagagggtaggtataagccggatgagcgaagaaccctttaaattgaaaatacatacacgctgtcgtaaataccgaggcagcaccgtaaaacacggcgtttatgtattttatatgatatttcctgtttatcagccgtttagcgatatacaaaataacgcaaaacaaaaaagcaattaaagccggaaacaaaaatatgttaagaagcgcttttttaaaaatggcgtccttaaaaaacaggcagtaataatttgttgtgcgcaaaaacttaggcgtgctgtttttaacagatatagcggtatatattatactgaaccaaatataaacggtgggtataataaaccataaaagctgttttgcctttttcacttaaaatccccctttgttttgacggtgcacacatttttaccccttattctttgaataaatatctgatatctctttcagcagtcaggcggttgactttaattcatttactaaaaagtaacgtccgcctgtttgccatattgcacccgcctttttaaccttaccgcctttataataccataatcgggttttaatgtaaacttattgttgaaaaatgcggcgggcggtcatataatgaaagatacacaggaggagagatttatgcttaaaattgaaaatcttactaaggtatacggcgataaaaaaaccgtggacgatttaagcctgcacatagcccccggcgagatttacggctttataggtcataacggcgcgggaaaaaccaccacgcttaaatccgttgcgggaattttacagtttgacgcgggcgagatatacataaacggaaaatccgttaaagagcagccgcttgaatgtaaaaaagaaattgcctatattcccgataatcccgatttatacgattttatgagcggaattaaataccttaatttcatagcggatattttcggtgtcagcgcagaggaccgcgcggcgcgcattaaaaaatatgccgatacctttgagctgaccgatagcctggcagagcctgttgccgcctattcccacggaatgaagcaaaagcttgcaataatagcggcgtggctgcacaccccgaggcttataataatggatgaaccctttgtggggcttgacccgaaggccgcgcatattcttaaagaaatgatgcgcgaggaatgtgacaacggcggcgcgatattcttttccacccacgttttggaggttgccgaaaagctttgtgataaggttgccattataaaggcgggcaggcttatacgctcgggcacaatggaagaagtaaagggcgacgcatcccttgaacaggtattccttgagctggaggattgagtatggttaaaatacttcttaaaaagcagttcaccgaaatattccgtgcctatttttacgacgctaagaaaaacaaagcccgctctaaggcggcggttacgggatatatagtgctgtttgtatttttaatggtgggtattctcggcggaatgttcacctatttatcgatagctctttgcaagccgctttcggcggcggggctcggctggctctattttgcaataatgggcattatttctatattgctcggcgctttcggcagcgtgttcaatacctattcggggctttacctcgcaaaggataacgacctgcttttatctatgcccatacccgtgggcactattatggtttcccgcctgctcggggtctaccttatggggcttatgtattcgggcgtggtgcttattcccgcggcagcggtttatattataatcgcctcgcacagcctgcccgccgttatcggctgcattttgcttgtgcttttaatttcggtttttgtgcttaccctttcaagcgcgctcggctgggtagtggcaaaaataagcttaaagctgaaaaacaaaagctttattaccgtaatagtgtcgctgctgtttttcggggcgtattattttgtttgctttaaggcgcaggatattataagcgatttaatagtgaacgccgcaaaatacggcgataaaataaaaggctcggcataccccatttatcttttcggcagagtgggaactggtgattttattgcaatgcttattgtttcggcagttgttttgctgctgtttgcgcttatgtgggcgcttatttcccgcagctttttgaaaattgcaaccgccacgggcaaaacggcaaagaaaaaataccgcgagaccgtcgctcggaaaaagagcgtacagtcggcgcttttgcacaaggagttctcgcggtttgtatcaagccccaattatatgctaaactgtgggctgggaattttgctgctgccggttttgggcgtagccctgctcataaaaggtaatacgcttatgcttgtaatgaatgagcttttcggcaaaaattcgggcagctcggttatactgctgtttaccgcggtgtgcgcagccgcctcaatgaatgatatggctgcgccctcaatttcgcttgagggcaagtcgctttggaccttgcagtcgctgccggtaaagccgcttgacgtattaagggcaaagcttaatatgcagcttattttaacgggcgcgccggttatattctgtatgctttgcgcggcgtttatgttcactcccctgcaatttgccgcggcgtttgtttcggcgcttacattcgtgctgcttttggcgcttttcgatttgtttgtagggcttaaaatgcccaaccttaactggacgagcgaaataacccccataaagcagagcggcggcgttatgatagctatgttcggcggatttatttatgtaggaatttactgcgcgctgttctttatggtgggtcacaaaatcggcgcggtgccgtttttgcttgccgtgggcgcggttaatttaattttatccgtccttatttattcgtggctcaagaaaaagggctgcaaaaccttagcggagctttaaattaaaaagagcgttggtttctctattttggcagaaaccaacgcttttaagtttttttagccattcgttttttctgtgcaggattgcgcatagcgctcctttccccaccaattcggcatcaggtctttcagggttacggtctctcttgtttcgtaattcaccataatttccatattctcgttttcttcattcaactgatacaaaaactcacggcaagcgccgcagggcataccgctgccgcctcccgacggtgctttatcccgaaaagcgataagccgcttaatttttgtctgaccgctgttcatatacatattcagggcggctgcacgctcggcacacaaattcataacaccactgcacgcttcaatgcaaaagcccgtgtaaatactgccgtccgcactttccagcgcacatactacgtgatgtgcataaacaaagggcgtcacatcttccacggtttccgcttgtatttccgcccagagcgcctttgtcattatattagtatgacccacgcgcacctcgttcaaaagcggcacggaaccaatgaaccgatattatcttctgatattacttttgaaaattattcccgcccttggataatgaaacaattgcaatgtctgcaattttactgcggtattcatccgagaggttttggtcggcgttgctcaaatactgaccgttgtattttatccggcagagggggatgccgtccgaggacacttctaacc

SEQ ID NO: 1725 - DNA, 32759 bp, Unknown
  16S sequences of unknown bacteria
atcgtaactgttcagagccaacctccaaaatgctacgcatttcgtcggtgtggcgcatccggtttcgcgagccgctccatattttctgacatccgtcggaagaaatcccttaactgctccagctcttcctctgaaaatccatacgtgagcaccgcttcattttcttctattgcaaggattacttcctccgcgatctcttttcccttcttattcagatacaaacggctgatccgttgatccttcggatccggcctgcggcatatcacatctgccttttccaggcgtttgaccgctaccgctaccgtcggagccttcacatgaagcccctccgccagttcccgctggctgatcccctcatgctcactgatcgccttgacaaatgccagctgccccgggtgaatcccgatttcagggaaccgcttataattgacagaagtataccggtgcatcagccgcataaaacaggcctgaatgcttcggctgccctctttgtgcggtctcataaatccattttcttcctctggatcacagtaaaacctcccctgctccttatacttcattctctatcccttctttctatagcaattctgcaaaataatgcccccctccaatctgtcagagcgtgaaatactgtgtcagaaatctttaccgtgcgttagcacgcctgcagatttcagccttgtctttcgcactctgccaaatcgttttgcctgcattattttattgaattgctataaattgtcaaagcggatattccagatccgcttcgcttcctgactcggttaaattacttagtcgactaatatcatatccattttcacaaaaaaatcaactgttttttgtgcagtttataaaaatttcagagatatctatcttccgaaaaaactatgtttttgttaacagatttttcacgatttcctgatatgctgttttcagttcggtacattattgtgtcaacatctgtaccatttctgcgtgcagaaaatcttatatcatttttattttgaaaggagttccaccatgaacctgaaaaaccacataacagcaccaaaattatccgcactgctcactgcttgtgcacttagcctctcttcctttgcaggtgttcctgcctttgcagcagaagcgcagagcgagatgcctgaagcagttgctttcagcgcagacggctcctccgagcttgtccagggcagctttgtcgcatctgacgttacatgtcctgcacaggactcttacgaatacccgtttatcggactgaatcttacgcttccggaagccctgcttcagcagatgactgacaagaccgttgccatgctcaccgatgaaagctggaccgatgagcttgatgcgatccggtatgcggtcatctccttccgtcagatgacagaggaacagagcactgccgaggttgaaaaggtcggcaccggatatatggactgggtagacagtcttgcaatgatcggtacgatcggaatgtatgatgccgattctgtaaaagaccttgataccatcacaggctgcacagagcatacagaactcggcaagagcagcgacggcgcatacacctattatctcagcctgaataaagatgcagacgaatcccttgctgcagagctgaaggaaatccagacaaccctgaccgagatcactccgccgcagcagctttccgcttttgatcagccgcaggcagaagcaagcacggataccgcagtcggcaatttccagatgaatgatatcgatggcacttcctacgatcagtcactttttgcagataatgatgttacactcgtaaatgttttcaccacctggtgctctccgtgtgtaaatgagattccggagctccagaaactctccgaacagatgaaagagcagggcgttggcgttgttggcgttgtccttgataccgtctcaaacggaagtgaagacagtgaagccattcagaaggcacagctgctccgtgaaaaaaccggtgcttcctatccgttcctgattccggatgactctatgatgaacggtcatctcaacggtatcagcgcattcccacacagctttttcgtagataaaaacggaaacattctcggagaggccgtagagggaagccatgatcttgaaggatggacagaactcgtaaatgcacagctggaagcgctgaaaggatgaaataaatgaaaaacctgacaaatgccaggtggatcggcccttgtctcgccgcggttggacttgccatggtaatattcggcatctcccgcggcgagatgaatgttgtattcacaaaggcgattaacatctgtatggagtgtataggcattggataacacaataaatcaaaccacaaaaacagccggatataccgcaaaagcagcaccgacacaggatgcacaaaaacaaaaaacggataacggctgcagcgcaaaatcctgcgcttcctgcagcggatgcagcacaaaaaacaataaaaaaagcagcaccaaaaaagcaccgctcaaaataaatgaatggaagcgccacacggtccaggctctctgggcgtttcttacaaacagtcatatagccggatttttcaccggaaagatctataccggaaagctcaaaaatatatgcgttccgggtctgaactgctattcctgcccgggcgcagtcggtgcctgtccgatcggttcgatccaggcggtagtcggcagctggaatttcaagatggcttactatgtcattggatttctgatctttatcggcgccctgatcggaagactcgtatgcggctttctctgtccgttcggtctgatccaggatctgctccacaagatcccgtttccgaaaaaaatacgcacgtttcggggcgataagctgctgcgcaagctcaaatacgtgatctttgccgtatttgtcattctgcttccgctctttcttgtagatgtactcgggcagggttctccttacttctgcaagctgatctgcccggccggaacacttgaaggcggtctgccgcttgtacttttaaacaaatccatgcgaagcgcagttggctggctttacctgtggaaaaacacgattttgatcgtcacgattctccttgcgattctgatctaccgaccattctgcaaatacatctgcccgctcggagccttttactctgttttcaataaggtatccgtcttccgttaccgtgtagatccggacaaatgtgtcagctgcggtaaatgctcccgcgcctgtcagatggagatcgatccggtccgggaagtcaacagtccggaatgtattcgctgcggaagatgcaaaacagcatgtccgacaggtgcaatcacatgcggcgtacgaaaaaaaggcgaggtttctgcaaaagcagattaacccccgccaaagtctggctcttgccattttctattttcgaaagttacttacattctctttcgtcactttctggtagggcagccggatataccggttgctctccaattcaatatcttccagcccctctccggtcgccagtgcaaaggccaggtcaagcataccttttgcctgcccttccttatcattatagaccgttccgatcatctcacctttttccactgcttcaagtcccggatccgtaccgtcaatcccgactaccaccggccattcctcctttggaattcccgatgctttcagggcatcgatcgcaccaagcgccatatcgtcattgtttgccagaatcagttccatcttccctgcatactgcgccagcatagaagccatctttgtctgcgcctgtccacgattccagttagcgattgcatagccgagcttttccacctgtaccccagattccagaagcatattcacggaacattccgtccgcacaatcgcatcctgatgtcctgcttctccctccagcaccacatactgacagattctatcctgattcctgtccatgccgtcatccgtcagaaatgcatctgctgcaagctccccttcaatccggccggaatcaaatgcatccgcgccgacataatacagcttcgaccaccgttccagatcctctgccaccagttcccggttgaaaaaaataatcgggatattatttttctctgccatatccgtgatcgtcgtcggctccgtccgatccacgaggttcacacagatcacatcacagcccttttccaccagcgtccgcatctgttcattctgcgttgtctggctcccggatgcatccagtatctcaacactgatcgtcacatccgtttcggactcctttttcagcatgtattccttaaacgcctgcatcatttccatcagaaatgtatcatactgatcatataacgttacaccgatcttaatgctttttaccgtttcttcttttccggaaccacatccactcagcagcactgccgccgtaccgagcagcagaactgccttaccgtttttaatgtaccgtcggaaacagaattttctctgcctctttttcatgcatttcctcctttgtcacggaaataaaaccggtctctacctgtgtcatactgcctgtactgtgttccagacatttccggatcagccgtgcgctttcgtaccccatcgcatattcatcctgcacgaccattccctgtatcattccgcgatccagacagtataccgcccgttccgaacgtccttctccatacagccggactttggaagtttccttcttctgcagataatccagcgccagttccatggcagaactgtcaagcgccaccagaatatccggaggtgttttcatctctttttccagctccgcctctgttttggccagaaagcttgctgtaaaatctgcgcatttttcctgcatacgcgcctggaatccggccagccgctgccgtccggccagcgtacgctgatttccgctcactacgccaaccgtctttccgtcaacattttcctttaaaaccatctccgcgatcgccctgccgatcttgtgtggatccggctgcaccagcgcatatccgttctcgagatccaggtctgatgcgatcagtacgatctgatttttgcctgcgatctcctccagtcttccacccggatcagaggtatcacaaagcgccgcgattaccccgtccgctccattttccagctcacgctccagaatcgtatattcctccgcaagcccggaaaatgccgaagccgacacgatattcaggtagatccctgactcatttgcgccctggttcaacccttccttaaatgcattccactgatcactgccactgttgtcaatcaccactgaaactgaataatgcagttcctcctttccgccatttaaaagaccgtaggacgcataaataatgaccataataatcattgccgtcacaataccaagataaattcgatccctgttcactcagtgcgtcccccttcctgttccggaatctttccttcctccagctggcggcaggtctcttctgtatatggaatatatggaatgtggattcgtaccgtcattccctcatccgggcaggactcaatctgaagaccatactgtgcgccaaaccgaagccggatccggttatgcacattcaaaagtccgacaccgcttccacggctgcgtgctctctctccctctgtcagcagtcttgctgccgctgcctccggcatgccaagtccgttgtcactgacttcaaggaaaatatctgatccttcacggtagccacggaccatgatcagcccgtccccatccatcgcttccattccataataaatcgcattttccagaatcggctgtacgatcagcttcaccgtacagcatgatagaatctccggatctatatcaaaggatatctcaaacgcatttttataacggatcttctggatattcatatagttttgtgcatgcttgatctcatcctcaatccgaatgattgtctttcccctgctcaagctgatacggaacagactggcaagctgtgtaatcataaagaccgcatcatcataccgctctcccgtaatcatccagacgatcgaatccagcgtattatacagaaaatgcgggttgatctgtgactggagcgcatccaactcgcttttacgcttttcctcctgcttcaccacaatatcctgcatcagatcctgaatctgcctcacggtagaacgcaaagtcctgccaagatgcactacctccagagaaccacccacgtaaatatccggtttgagattcccggtctcccactcccgcaccgaatcgttcagtctgcgcagcggctttgcaatccgcgccgaaacaaactgattcaggatcaccgtcgtcagaagcgccagtgaaacaagcatcattgccagatatcccgtgctgttccgccccatctcaaaggattccagcggaacaacgctgaccagcttccagccggtatagctgatcggtctttgcgtaacgatccttttttgtccaccgaagctctctacccagctttcttcctccgcagtgatcgccgagagattattctcctcatactcgcccattcggatcagctcctgcttcggatgataaataatctctccgtccgtgtccatcaggtaaatgtattcggaagaaaccgtcgacatatttgccttatccaaaatccgctcaatactgctgtaattcatatctaccagcagcacgccaagcatagaggtgccgccataggtcagatccaccgtccggcttaaggatacgacccaataataccgatacgtcagatcgtcaaacagattctgtacatgcggcgttgaaaaatggaaattttccagctgattttttgcatcctcaaaccactcctgagacgtaaccgccgcatcttgcttttcatttgccaccggtgctgcttcgacgagccttccatcgtacgtatagcaggcgatgctgaccaggttatccttatttgcctcatacagcagcgtcatctcttcgtccagattttcattttccagatccttatccttgatcacactgtaatacattgcatcggaaatccggcgcatgctgcgcagataatcctccagattgatcgttgtctgctccagcagctggcgggagttctcctgcatcaacgtttcttcttttctggaaaactgtttataaagcaacacacccagaaaacacagacagcatacggagacgaccgtaaaagacaatgcgatcgtcatctgtatgcttcttgtgcccacatattttccggaacgctccgttatttttctgaaccagcctctgatcttatccacgttcttttaacttctccaccctgtatttcgacggggatactccatactgcttcttaaatgcatagctgaaataattcgggtcagagtatcctaccttttccgcaatcatatatgttttatcatcggttgtcaataaaagctccactgcccgctccatccgaaaatccgtcaggtatccgataaaggtttttcctgtctcctttttaaataccgtggaaaaataagcggagctgacgcctaatatccggcataccgtttcaatggcaatatttttatctccgtaagagttctgcacataatcgattgccttcgtcacaaaggatttcgttgtatttgcacgctcctgccggatataatcctggatttttccacaggcctccgacagccagtcccagaattcttccggtgattctgactggaacccgcagtccaccagctgctctgccgagccgaaaatcgtttccatcggaatctgattgttgctgccgaaccgaaaaatctctgctgcaaactccagaataaagatccgatacttctgaatggaaattccgggtctggaaaaccagccgcaacacgctttgatctgctgctttaaggtatcacgatcccccatcctgatttctttgagcagtccctgaaccgcatcctgttcaaacgaaagttccacgctctcccccggatcgatctcagcgatgttgatcgcacgcgtatttccatagatcgcacggtaagaaacggcattctttgcaccctgatacgatacatgcaggtccgaccgcatactgcatatctggccgattccggccgtcacctttgccccgcagattcgttttgcataaacacaaaggctgtccatctcgtccgtatagcgcgtaatctctgtggcatccgaaagctgggagattacgacaatctcctccagatacatcagtattttacttccgtaccgctcccgaagctgctcctccgcaagcttcttcacagacaccgccatcagaaacggggacattccctccggaagctgcgatctgctgatatgtagcaccgtcacgacataaaacggtgcttccagatggatctgatagctttccagatatttttccatttcatttggctgtacccgaccttcaatcagggaggtgtaaaagctctcctgcaaaagcggcaggctttccatataatactgattcagcttatcgatattacgctgttcatccctttcatgatccagggtttccctgattctggaaaataccttgtccagttcctctgcattgaccggcttgagcagatactgctctacttcaatgtcgatcgcctcttttgcatattcaaattcatcaaagccggaaaaaataataatttttatattttggtaacgctccttgagcttacggctcatagcaaggccgtccatatacggcatcttgatatcagtcagcacgacatccgggacacattcctctaccatctccagcgcttccaccccattatgcgcataaccgatgaccgtaaatcccatacgctcccagtctattttcttcatgatcacccggatcacatcttcctcgtcgtccacgagcagaactgaatattgctgcattacgctccgtacctttcatccatctttttccataaaatgccaaatataacgacccataccacaatctgcacaacggctgcgaccacatgcaaataaagcagcactgtcatgatcagagaaccggccgccagaaacagcatcaactttccagcctccgccgcataacgctcttcatcctttaatttttttgtctgatcctttccacgaatcgctgaaatatcatgcagcaccaacagacgcacaccataataagccagtacgatcagcatcaggatcggtatcatcgccatagaccaatagctatctccctgcattttcatcctcctttctggtcaaagcggatattcacaatccgctttgctacttgcctgatttttgtcaaagcggatattcgcaatccgcttcgctacttgcctgatttttgtcaaagcggatattcgcagtccgcttcgctacttgcctgattcatttaaaaacggagctgtcacatcgttgccaaagcaaatcggtgcagcagctcctttttattttacagcgttatttattttcttgccacatattttctgatatccagagaaattgcaacgaagatgattacaccaagtgcgatccactgtgcgtttgcgttgactcccaggaactgaagagcagtcttcaacagctcgaataccgctacaccaataatagcagaagatacttttcctcgtccaccggaaacggatacgcctccgattgtacaagccgcaattgcctccatctcataaccaagtccaaggtttacagatgcaccaccggattttgcgccgagcataaagccagccagtccatacattgctgcagcctttgcgtagatgatgatcagggtcatctttaccggaacacctgctacctctgctgcctgcgggttaccaccgattgcatacatgtattttccatgacgggtcatgttgaaaatgaaccatgtgattgctgctaccaggattgcgatccagatcaggtaattgacaccgagaaattttccggttgcaatgtccgtgtactgctttgtatatccgccaagcggtgttgcatttgtatagagcaggttgattccgtatacaacctccatcatagccatcgtagaaatgaatggcggaacatgcatataagcaatgaagaatccggtcacgcagccgaacagtgcacagatcagcataacgatcagcagtgccacaaaaatattcagcggctccatatccgggaagaactttttggaataatccattttctgaagcagtgtacctgcaatacagccgccaaaaccgatcatacgtcctgcggaaaggtcgcatcctgcagtgatgatacagccggcaataccaagtgcaataacaatacgagaactcatattcatcagaatgttgttcaggttgttaccggacaggaagttctttgatgtgaatcctgtgtagataacaagcagaatcataataatgataacaccataatttaccatgatgtctttaaagctcagttttttctttcccatgtttttctcctcctatcagaactgcgttgcgtagcccattactcttgcctgtgtcatttcttctttttcggtaatctcgccgcgaagcttaccgtcacacataacgtaaacgcggtctgccataccaagcagttctgccatttcagaagaaatcataataatcgcttttccctgtgctgcaagatcattcatgatctcataaatctcatgctttgcacctacgtcaataccacgtgtcggctcatccatgatcaggatatccgggtcatttgccagccatctcgctacgataaccttctgctggtttcctccggacaggttcgaaatatgctccttcatactcggagttttaatacgcagcttcttgatgctgtcatctacaatcttattaatgctcttatgatccaggacaaatccggccttcaaatatttattgtaaactgaaacaccaacgttatccttaattgacagacagccaaagataccgtttcctctgcggtcctctgtgatcagtccgattccggccttcatcgcatctgacggtcttttaatcttcaccggatgaccgtttatcttaatctcacccgatgcaaccccgcggattccgaatacaccttcaagaagctctgttctctgagcaccgaccagaccgccaaatccaaggatctcgccctttctcagcttaaaggaaacatgctggaaagagttctcatgaatggagcaaaaatcatttacttccataatgacttctcccggctcatttttccgctccgggtaaacattcgtgagttcacgtcctaccatctttgcaataatctgctccgttgtcagttctgctgccggccaggtgccaacatacgtaccgtcacgcataatggtgatatcatccgcgatccgtttgatctcgtccatcttatgagatatataaaccattgctacacccttatctctcagatcattcatgatgcggaataatgcctctacctcattatctgacaatgaagaggtcggctcgtcgaaaataacaacctttgcctgatgcgatactgcctttgcaatttctacagactgcatctgtccaattgaaagatcaccaagcaaagccttcggattgaaatccattttaacttcatgaagccagtattccgtgtctttgtacattttcttatggtcgatcatctgaatcggaccaagcttcttcaccggaaaacgtcccagaaacaggttctccgccacgcttctcgccggaaccggctgcagctcctgatgaaccatcgcaataccatgccgcatcgcatcatccgggtcattcacctggattttctcgccgttcatataaatttctccggcatccatcttataaataccgaacagacatttcatcaatgtcgattttcccgctccgttttcccccattaacgcgtgtaccgttcccggtctgagtgccagcgaaacattatccagtgcctttactcctgggaatgatttacttacgcctcttaattccagtaaatattcggccattttcttcctcctcttttccggcctacgtcctctggtttcggccgcatctcttcctgccatccctgaaaacgttcaggcattcatccgtctgcaaaatccccgatgctttcataccccgtattgctattcaggatttttcattggatttctcggaaaaaggaggtgcgagctcacaccatccgcacctccaatatagtcattcctgcagaaagctcacaaagtgtacttcctgttctcttctttttgcctgttctcttccggcagattattttaccatatcaagaacatcctgagcattttcctgtgttacttttacgtaatcacatccgatgtagtaatcgttgccctcacctgtcaggaatcttactgctgcatcagctgcactgtgggactgtgagaagtgatcgttaaatacagtacctgtcattgtacctgcaataacatcctcaagtgcctcagaaagtgcatctacacctacaaggaagatatcctcgccgactgtacgtcctgctgcctcgatagactgaagtgcgccaagtgccattgcgtcgttgttgcagaatacaacctcaacatcatcgccgtactggctaagagagtttgctacaagctgctgagctgttgcctgatcccagtttcctacctgatcatcgagctcgtttacttcaaatcctgcatcctcaagagcctttacagagaactctgtacgatactgtgcgtctacgttctccgggtcaccctcgatcatgatataatcaacttttccgtttccgttcttatcaatagcgtccagaccaagatctgcgatcagctcgccctggtaagtaccggactgacgtgcatcacatccaacgtatgtaacgttccagccgttctcttcccatcttgcctcttcgtcagcatccggctcacggttgatgtaaacgagcgggattcctgctgctacaaccttgtcagtaatagttgatgcagaagatgagttaaccgggttgatgattagtacatctacctcatctgcgatgaagctgtcgatctgaccggactgtgtagcctgatcgtttacgccgtctacgatcgtgatgttatctttgctgaatccaagtcctaccaggtaattctccagctcggtacggaacagtgtcatgaagttatcagagaactgataaatacatacgccgactttcttatctgcaagatctgcgtttgctgttgcctctgtagttgcctctgtagttgcctctgtagactcctctgccattaccggaactgctgctaccattgtgcctgccatcatagctgcaagaagcatgctgacaaatttctttttcattgtaaaatcctccctgttttaagtttaagttttttctttttgccctctttcgtggcttctggtgaaattataacacaggaggttgaaattactatacaaaattcttctgtatttctggaatattcttctgattttatatattatttaatgatttttttatgtttcccgaattttatccgttgtttcgaatgcttatctcgttttctttctcgctttttccgtcattttgctgcatctgcttcgctttccatcattttgccgcatcgattccgctttccatcattttgccgcatcggcttcgcatttttaccggaataatcacgtaacggttcaggccagccgtaaaacggacattcgcaatccgcttcacctcttgcctcctcccggccaggtatggtatgataagcactgtgaagacatttgtccgcccaaaggagacccagtctatgattactttaaacgactatttatattccggagatacgattccgaaaatacttatgaaatacatcgccgacctgcgccaggatgcaaagtgcacccataatgagatcgacctggttcactgtaattttcttctgcagatcaaagaattactggagcacaacgatttcctgacagcccagtcacagcagatccgggaattttacaaatacatggcaaaagaatatcccaccctggcctttaccttcaaaggccgcatcaaatccctgatccgcgcggaagaaaaattcaatggctacattgtagaatatatttctgattattacagagaacaggggacttatcctccggttgccgagctgaaaaataagctgaactgtttccgggatctgatcgcctaccgcattgtgatctccattccaaaatgccatctgcagccaggccaggacccggaaacagaggagctgaaatacctgtaccggattgccaacgtcctcccggaatttctggaagaacggggcttcaccaccgaatccgcaaacggtataaaatacagcacctcccctctcatgagtgaggacgtgaaaccttattaccgggactacatctgcgaccagacgatatacggctaccgctccctgcacatcaccttttacgacaacagctccagatcctatatggaaatgcagcttcgcaccaagaccatggatgatattgctgagatcggctctgccaatcatatcaattatgaaaagcggcaggaagatgagcgcaccagacgaagtctgatcccactgggcgaaaaccgttatttcgatgaggcctacgccagaggcatgcgcttgctccgactggatctctccgaactggatgtgaatatgttcgccgccatcaacaacagtctgatcaacgacggctgcggactgttccgcggacggttgattttaccttacgagcatttgtccaggtttcagaatgatctgattgattagcgaggccttcccgaccggggcaggctctatattcgtttatcacgtaaatatgccagtcagctttttcacgctgactggcagttgtatataaatcatataaatatagatccgttcattttacagagtttcttcttattataattactctatttataattattatttttcttttttcttggcaagcatattgccctgtacgatctcaatatatgctgcgataataattaccacacctgtaacaatatactgatagaacgtatcgactcccataactacaagtccgaccttcagtgccgagaacagtaccgcaccaattacggttccgaaaatatttccgcggcctccagccatagaagtaccaccaattgccgctgccgcaatggcatccatttcatagccctgtccggtagacggatctcccgttccgagacgtccgatcataacgagcgctgccagcgttgtaccaagcataccaataccgtaaatgagtgcctttgtccgctcaacacgtactccggaaagtcttgcagcgtcctcatttcctccgactgcatatgtataagcgccaattttcgtttttttcaaaacaaacgtaataataactgcaaacaggaagaaaataactactgcaaaggtcattacagacgtaatcttgaagttaaatacatttcgataatttctcggtacatttaaaaccgggaaaccaccggtaattacgtaagctactcctctgtagacctgcatcgttcccattgttgcgataaacggctgcagtttcatttttccgacaagcacaccgtttaacacgcccataaggaaaccaagtgccagacacgccagaatccagatcggtatcggaagtcccatctttgcaagctgtgcgccgatgcatgccagcaatgcaagggaagatcctacggacaggtcaataccgccggaaataataacacaggtcattccgattcccatcaaaccgtacgttacagcctgcgtaataatcgttgccacattggttgctgataaataagaaggctccagtgcactgaacagtacaaacgtaatcaacaaagcaaccagggtactccactctcttcgatattttttataaatagcgctcatctctagtttccctccaccgtataatttaaaatattctgttctgagaattcttccttagcaagttctcccgtaatctctccgtcccgcattacgatgattcggtcactcattcccatgacctctgtcagttccgacgataccataataatcgccacgccctgctcagccattttttccatcaaaagatagatatctgcttttgcaccaatatcgattccttttgtcggctcatcaaaaatcataaccgttgcatccgttgacatccaccgcgccagaattaccttctgtgcatttcctccggataagctgaccgtcatgaaagccggatcattcggcttcaatcctacctgctttcctttctccagagcattctgtttcttcttattatcattgatcacaataccggacatatattttttcagactggccagtgaaatattgtccttattatcaaagttcggaagaattccttcttcttttctgttttctgaaatcaatgcgattccacgttcgattgcctcatgcggagatttgcagtgaatttccttcccatttagtatgacgcttccctttgtgtacggatctgccccaaaaatggccctcatcacttctgttcttcctgctcctaccaggccaaaaaatccaaggatctcacctgcatacaagtcaaagctgatctgattaaataaatcagaacacagcccgtctacgcgaagcaccggttccgttccttttttctggcacggcattgtccgctttgcaaacaatgagatatcacgtccgaccattgcctggatcacttcatctcttgttgtttttgccatctcaattgttttaatatattttccatcgcgtaataccgttgcccggtcacacatctgaaaaatttcattcatcttatggctgatataaagtatcgttattcctttttccttcagatcatgaatgattccaaataaggtttccacttccttatcactcaaagaagcggtcggttcatcaaaagaaataaccgttgcattcacctctagtgcctttgctatggataccatctgcttctgtccggttgacagatctcccatccgatccgtcggctgaatattacaattcaaccgcttcagcagcgtctcggtatcctgattcatttttttcttatcaataatcccatatcttcccggttctttccccataaacagattttctgcgaccgtcatatccggaatactgacaatttcctgatgcaccttcgcaattcctgcgtcaatcgcatctgcaatttctgcaaattttactgccttcccatcaattcgtatctcacctgtcgtagccggaaataccccatgcaatatgttgagcaatgtactctttcccgcaccgttttctccgataatcgcatggatctctccttttcgtattgaaaagctgacatcatccaaagctttttgccccgggaaagtcttcccaacatgctcaaactcgatgtacttttccatagatgcacctccgtcttatctatatagtacaaatatttaaatccactccaaaattttcactctgctttgattgctttccgtatccctgattcaggtatatacctcaccaaataacggcattgcagcatattctgtaactgttcagaaccaacctccaaaatgctgcgcatttcatcggtgtggcgtatcctgataaaatacgggacggtttttacgccgtcccgcctctccaactttcaaaaattattcaaataccggcgcatactcatatccaaagatttcctcaaagcttgcttctgcattgcttgcatcacgaatgctctgcggtgcataaacaaccttcggaatatcctcgcctgccagtttacgaacctgcatctcaactgcgatctgggacatgatattcgggaagaagtcaacagttgcatccagctcgccagccttaatagactcaacagcctcgctcgttccgtctgttccaacgataacacaatcgctgtctgctgcggttactgcctcaagtgctcccatagccatggtatcattgttgcagtaaataccaccgagatccgggtactgctgaagcagtgtttctgtaatatcgtatgccttctgacgatcccagtcaccgttctgaactgcaactacttcgatatcagatttatcagcatagaaatcattgaatccctgtgtacgtgcctgtgctgcagttgcctgtgaaagtccggtaatgcaggctactttgcccttctgtccaatcgtattgtaaatccattctgcaccctgaacaccagcctgatagtgccatgcacctactgttgtgctggaatacggtgtaaatgcatccattactgttgtcagatcaattcctgcttccattgctgcttccattccaggaacaagatttgcttcggagattccggataccagaattgcgttgtatcctttatttaccatatccattaagagggtaagctgtccttcctcgtctgtctcagtctgcgcacctcttacatccactgtcagtttatagcctgcatcctggaaagttttttctgctgtttcagctccttcgccttccattctccagaactcattctcaaaagtctttgttgcaaaaccaattgtaatctcttcatccagcttcgggattgcgccgagcgtttctcttaaatcattgtaggaaactgcctgatcataaaaatcatatccctgctctgctacatctgcactcggaagatctgcttctgctgcaaatgcgctcattcccattgctactgttaatgccattgctgttgctgctgccattcttgtctttttcattttgataccctcctgactggtctgtaaactattttctttttttgataaccgcattatgatttttattttttagatccaatgcggttatcaaacacgcattttttaacttcttatcttattctcttcttattctctgaagcaaaactctccgtctgtaaaatctagttccggaagaatgcccggcttattatcgccaacgtatctgtctgcagtcagaaccttaacactgaattctcccttaagcagaccatcctcactcttctcgcccagcgtaaccttgctgtctacattacttcccgttgatttctttgaaaaatagtagccaacagatgctgcatctgaacttacaacttctatctgagtgatcgcattttcatccatttctgttccaacttcaagagccttattgagcacaaacgacaatgtaaaatcttccgcttcaaaattataggtagttcctgtcataccggatgttttgctttcgtattcaaactcaacctctttatcgttgattttcgcaacaagccatcctgtaccttcctcaggatcataatttctttcagaagcctctgcctctgtctcctgtgcttccggaagttccgtctcagcagcaaatgcagtcgtgccaagcatcatcgtagcaagtgcaagcattaccaacagtctttttttcataccgttttacctccgctcaccaaaacttaaaactgtgttccgtaaaggtctgttacaaatgtccagaatgcatccctgtcgatgttaaatacgatctgtacattcttagaggagtaaggtccattgccgctttcccatgttgttgcatttgcatagctataggaagttctgttgcagtcaattgccagatctctgttttctgtttcggtaatcagatccgggcaaaggaagattcctgccgtaatagcatcccagcaataatgtgactgtgtcggattttcttcataactcggatatacacgatccataaacagctgtgtaattgcagtattgttcttctctttcatcatatcaaatacatcttttgcaagcggaaccttggatgcgatgtcgtgcggaacaacgatctgatacgggaaatcattattcagacagatctgaacagattccggatcatagaaccagttgaactctccacacacattggcatttccaggaacatcgattgcgccgcccatgtaaatgatacctgctgtattttcagcaaatgtcggatccatcatgcaggctaatgccacgtttgtgcaggcaccaactgcaaaaattgttacctttccaggattttcttttacagatttaatcataaattctgccgcattcatatctgtctgcgcatccgttttagaatatccccaagattcattaagtaaatctccaagattatgataatcgtttggcgatacgtactgcgaaagctcacgatatcctcccgtccactggaatccgcctgtaattggctgatctttttccaggtcacggaatcccatgatcggcacatccgttccaacatataccggaatatcggttctgtcgattgcttccagctgattcaaaatcgcatttgcaccagttgcacagatttcatttccaccaacagatgttacgccaagaagatcgatccagccggctgcatctgcctgtgtcaaaatatacatacagtatgcatcgtcaccaaggtaacccatatcacagtcaaaaattactttgttatcttctgcattcgttacaatactgtaatcctccagtgctgcggatgcagaggtcggtgccataacgcctcccaacattgttgctgcaagtgccattgatactactctcttcttcatgagtttcgctcctttctttaagcatattttctatttttgccgggtccggtacttcgtaccggatccgatcctgtttgttcttaacgtttttaaacgaatttaaacgttggttgtcagaatatctacatagaagtcccagaatgcctctctgtcaatgtcaaacagaatatcgcacttctgtacgccgtacggcattccttcgcctgtttctacatcacggttacgtgatgtccaccagctgattgcatttccgtagcccgggccgtaatttgtgtctactgtcaggtatctttcctgaatatctgttgcaatttccggatggagccatactgctgctgtaatggaatcccatacatagcttgacgcttccggattctcttcaaatctctgtgcctgtccttcaacgataagctttgaaatttcattaccctgtttttctacgatgcgatcataaacatcttttgtatagaatacagcctcagcgatatcgttcggaacaacgagctgatttttccattctgcgttcagacaaatccgaataccttccggatcgtagtaccagttgaactctgcagtagtattacagtttccaggaacatccactgcaccacccatgtaaattacgcctgctgcatcctctacaatggtcgggtcctttcttactgcaagtgccatattcgtgcctgcgccgattacgaaaatagtaacctctcccggatacttgtgaacctgctcaataatgaaatcaattgcatgctcatcctgtgcttctgtctctgcatatccgtatttcggttcgcttggaaggttcttataatctgtcggtctctttgttacatctccgaaagttttttcgtcccaatcccagtaagcaccactgtactccggcataccccaaatctgactttctgcttccatattacggaatcccatcagcgggatatctgttcccatataaaccggaatgtccgatctgccgatcaactccagctgtctcagcgctgcggttgttcccggtgcacaaaatgtatttccacctactgtagtaacaccaaggaaatcacactcgccaaggctgtctgcctgtgccaacataaacattacaatcgcatcatcattcagataactcatatctgtatcaagaattgctctttttacctccggagtttctgctgttgcttctacagctgcctctgttgttgcctcttcagcaaaggatactgccggaactgccattgatgctgccatactcactgccaaagtcgctgccataagttttctcttcatttgttaatcctcctgtttgccttaattgtttttgtcatgtttcctttaaataaataacaagtacatcaaaacaagtacatcaagctttattttttaagctctttacttttgcctccttccatttttcatttttttatttcactgtttcaatgttttcattacttcctggatcgtcggaatcgaagcaaccgctccttctcttgatactgcaatagaagccgcttttgatgcgattctcaatgcttctgaaatatcatactcttctagcaacccggcaatgaaaaatcctgtaaatgtatctcctgctgctgtcgtatccactgccttggtcggaaagatgtcctgatgaatttcccgattggcatctgcgtaggttgctccggctcgtccaagtgttaaaacaaattttgcatccggcaatttttcccgtaacgctttaagcattttttccggttctgactgtccggtaaattgttctccttccacttcattcaataaaaacaaatatatttttgaaaaatcacattttttcaatttgtcatcaaacggagatggattcagaataattcgcattcccttctcgtatgctttgtcaataatgtaatccagcaaattaatctcattttgcagcaacagataatctcctgcattaaaatccgaaagaacataatccatatattcttttgtctgcatttgatttgtcccgccaaataaaataatgctgttctggccctttttatcgacctggatcactgtgtgcccgcctgaaaccggaagttttttcaaatactttgtatttactccatattctctgcaggcatccagcaacaaatctccatcttctccgatcattcccgcgtgataaaccggtactccggcttttgcaagtgcgattgactgattcaatcctttgcccccgcaaaatatattcaaatcatctgacaggatcgtttctccttctttcacgatatgatcaactgaatatacatgatccacattcaacgatccataattcaatatcttcaccagatccagatgcctccttcctttcgcccgtacatttttattgtgtatttttttattaaaatattttcgtaaatcattttcgtaatgcgatattacctcttttccaattttgtgtcaatgcatttttcgttattttatccgttttgtaaatagttaataatttatcattcggcgttttgttcattttgtcggtttgtttttctgaattttattgcatcacatctcattatcgtttataataaaatcattattttccgtatcatttctctcgtttatcaccaacactgctgcagttttgattttcagattctttgtttttcgtatttctgtttttcgtatttctgttttttgttttttatttttcgtatcttttactattttttgttatcttgttatcactgaaaggatttctattatgacaataactgatattgcacgaatggccggagtctccgcctccacggtttcaaaaattatcaacggaaaagacgagcacattaatccgcagacgcggacacgagtccttgaaattgtaaaagaatacaatttcaccccctacagtaccgtaaaaaatatttctccgaccaaaaaatttcttctcggcgtcctgctgcgttcaacgaaacagtccgacaatatgcttcacggaattctgcacgctgcccagaaccgcggctatggaattctccttctggaaagctactatgatctgacacaggaaacaaagcacataacaaagctgtgtgcaaacagagtggacggaatcatatgggaaccggtttcccccagcagtctttcttccgtggctatattagaacgccacaacataccttactgcgtcacaggaaattataattttccatccgcgtatcgaattgattttcacaaaatcgggaatcttctgactcagaaactaatagacagcaaacactcacatatcgcctgtttgctgaaagaagaaaatgcagattcagacttatttctggaaggctatcacaagtgtttatatgataatcatcttcctttttcgaaaagcaatatttattacgatccaggcaaagaatttattcaggaaattatcaagtgccattacacggctgttgtctgtaaccactatgaattatctttgtctctgtatgaaatgctggacaaacagcacattcatattccggaggatttttccttaaccagcattttaccctcctacacgcccgatgtttatcttcctgaaatttccgggatttctgtgcctttttatgactttggcgttcatctgtgcgaggatctgatcgatacctgcgaaaagcttcccagcaaagaatgtacgtataccgttcccctgccgcttgacctgaatcataaaaaaagcatagccacacctaattcgcctcataaaaattttgtgatcgtcggttcgatccatcaggatacaaccttcaacgtcagtgaactaccgcagtcaggacgcacactcaaaatttcaagttccgtatccactctgggcggaaagggcgccaatcaggcggtgggaattgcaaaactaaacggcaacgctcatttgattgctgccgtcggaaatgattatgacgcaagcctggttctcaacatgctggacgaagaaaatatctccacctccggaatttgcagaaataaatccagcaaaaccggaaaggcctacatctatctggaaaatgacggtgaaagtgccattacgattctgcccggtgcaaatgatatgcttacaccggaaaacatccgtaaaaaagaaggattcttcaagcactgccgtttttgccttctgtctaacgagattccaatcgaaaccgtgatcaccgcagccgaaattgcaaagcaaaacggtgtcgagaccattttcaaaccggctgcacttaaggaatttcctccgcatctgtgtgaaaacattgatattttcataccgaaccgcagagaagcagctgagctatgtccgcagtattcttccgtcgagcagcaggctgatttcttttatcaccttgggattccaaccgtcattatcacgcttggctccaaaggctgttacctcaaaaccgctgagcatgctcaatttttcccggctgtcgacttaaatgccatcgacacaaccggaggcgcagacgcctttatctctgcctttgccacctatcgcagtgaagactatacgctggaacagtctatccagatcgctacaattgctgctgctttctgcgtttccagacaaggcgtacactctgccttgattgacaaaaacagtcttgaaatgtatcttgcaaagaaacacccggatctcttaaagccagatcatatgatcgccggttaacccggtcagtttcgcgtaaagaggacataagcattccaccgcttagtgctccgcgcacttgaagcgggggaatgcttacctgcgttcaatacaagagctggatcagaaagcagaaaaagagctgctgctctacatccgaaaacaaaaaaaggagctgccgctccacagatttctctatgaaacgtcagctccccatcacggtcactgcgggagaaaaattttaatattcaatcattattcagccggacgtaccagcacctcttctgtcgtgccaagcaggatagaatactctgacgggcgaagctgtcccttattctcatctctgccctgaagcacaaagcgtgcatccgcatttccgatcgtctcagctgcctcagcagagccctgccagatcggatcacttgtcttacggtagcggttgaagataacgccgagctgtgtatctccgctctccatccagtcagtcatcatgttccagtcacctgcgctgtcgccaaataccatcagaggtcctgcaccgtcataattcggagcaataaagttggtgatcgttgtgctctttcctgcagcctgggtctgtgcacattttccttcgccgccccagttgtagtcatactcgttcgtgtaggttccgtcttctccaagcacgttgcgcattgcgaatacatgatcctccggaatattgtagccgaaattatcatttgctgcgcggattacatcgataaacgatgcggaaatgatatatacatcaatatcatttgccatcagggtctgatagagatcctgcagctcatccgtaaacgttatgccggtgataaagcttgtggagataatgccgctttcgccctcaagctcaaccggtgaagtccaggtctccttgctgtatctgccatactcagaccagtaggtgtgggatgcaagtgccagatcatatacttcgtccggtgtcattccggtgaagaggtatgtgacccacggataagatacggatgcatcaaacgtatctccgactgcgctgtacatgtagcgcagcttggctgcaaaatcctcatactgattcgttgcatgaatgtaagtcaggtcgtgcgttccgcctgccccaaagccctcataattttcatacagccactgataatctgaagtgatatcggcaacgagatttgctaccgtcacatcactgtctgtcagattctttccgaccggctcatccaccgacggaatctgcgtttccagaacgtctgcaagattttccggggcaatcttgaactccagattttcaatctgataagcaagaagcgcttcttctacgtcaaaaatagcggaagtgttatcaaagtcaaatactacataccgtccgctgcctgcattggcatcgatcactgcctgaatgcgtgcgcgggtggccggagcccagttgccttccatcagtgttttggcatcggccttgtctgtttcctcacttacaacagccaccgcagcttcggttgtttcttccgcatataccgaaacaggccaaagactggttgtagcaagcatgatcatggacaggaataatccggtctgctgggttctctttctcatagcttccctccttgaattatttaaccgggtatctacccggttatgagtcagcaggcagatattttcaatctgccttggttccgcagtcggtattttcacggagacttacctgccgaatcctcttcggctgtgatttacttcccgccagtgtgggataccgctttctctccgccctccactgacactgtgtttctctcgcaattccatgagccgattgtaacatgcccgtctctagttttcaatataaaaagcgtaatttgcgcttaaaatctgttatttttttatcaaaaatatttcattcatatttttttacgtcacaatttatttttcagaaaaaatgccatgcttttctgtcaaaatacctgatttgcagcatcagaaaaataccagttttttcaacttctccgcttgcagaattataagaaatccaccgcttagtgctctgcgcacctgaagcggtggaatgcttatctgcgttcaaatattttcgcccgatctgctcagaacagattcccaagccccgttgataccagaaacagtaccagcatcaccaccggcaccacataccggatcatgaagcgatacagcttcgctcgtgtaaagtgctcgccgttgcgctcgacctcatcaacgatcaccttcggaccgaccacccatccgatcagaatgctggtcagcagtgaaataaacggcatcagaaagctgttgctgatgtagtccatcacatcaagcagctgcgccgtcgcaccgttcggcagcttcagttcgaagtagagcacgttgtagccaaggcagatcagcaccgccgtcaccagtgaataaattccaatcatcgcacacatcttctggcgtgatttgtgaaaaatctccatgcagttcgccacaagtgtttccatgacggacacgcatgacgtcagtgccgcaaatcccatcatcaggaaaaatgccagcgcaatgatacggcccacaccgcccattgctccaaatacctttggcagtgaaataaagatcaggcttggcccggaagccattccatctgtaccgagaaatacgaataccgccggaataatcatcattcctgccaggaacgcaactcccgtatcaaaaatctcgatctggttgatcgacttattcagatctacatcatcctttacatacgaaccgtatgtaaccatgattcccatggaaacgctcaaagagaagaacagctggctcatcgcatcaagcaggatctccagaaaacgtttcacagtaagaccgctgacatccggcagcagatacaccttcagtccctgcaaaccggtgcgcaccgtaccgtttgcatcttcatgagaaagcgtcagagaaaagactgcaattccaagaatcagcagaatcaggcccggcataataaaacgggaaaatttttcaattcctttttccacgcctctgtatacaatccacgccgtcagcgccaggaacagcagcataaacacgatcggagctgcttttgacgtaataaaggagataaaataggaatcctccataagcgccgatccatccgacaccacatactcgcagaaatatttcatgatccagccgccgataacagaataatacgtcatgatcagcgcaggcacaagaaacgtcagataacccagaaaacgccattttgaatgcaatgttccgaatgctttcagcgcattctgcttcgtctttcttccgattgcaatatcggtcgtcagaagcacgaagccaaacgtcagtaccagaatcaggtaaacgatcagaaacaatcctccgccgtccttcgcacacagatacggaaaacgccagatatttcccacgccaaccgcgcttccggccgccgcaagaacaaatccgatcgatccggtaaaactactccttttctctttcataatcaatcctttcgtttgccacagactcccactgtcttgcatatactccgggagtcttcccccgtctgcatttgcagctgctttttccccggctgcattatccgatgatttctgctttcatcacacgttttctctctcccagtcgcccctgcggtaaaacagcagcgacaaaatcgtcgcgatcgaccagcccacaggccatgcgcaccagatcccggtcacgccgaacgcacgcgacagcaaaaccgcgagcgccacacgcagcagcagatcggtaaacgtcgtcatcataaactgtttcatcagcccggtgccgcgcaggattccatctgccaccagcttcgccgatacaatgagataaaacggcgacagaatccgcaaaaacaaaatgcccgtatgcatcgccgtatcggtcggctgatccataaacagatacaaaagccatcttccggccagaaaatacagcacgatcatcggaacacagatcgtccagatcatcttcagcccggcaaaaaagccctgccggatgcgctcctgctttcctgctccaaggttctgcgctgtataatttgaaatcccgtttccaatcgttgtaaacgaagtgatcaccagattattaagcttgaccgcagccgcatagcctgcaataacacttggtccatatccattgatgaccgtctgaataatgatatttccaaaggaaataaagctctgctgcagaatgctcggcactgcgatccgcacgatccttcccagaatcttccacgaaaacagcgccacttttttctccgtacggatttttgccagccgctttaataccaccgcaatcgcaagaaccgcgctgattccctgacacagaaaggttgcccaggccacacctgccactcccatatgaaaggctgccacaaacagaatatccaccagaatatttgccgtcgaagacactgccagaaagataaacggtgtcttagaatctccaagtgccgaaaaaatgccggttgcaatgttataaaaaaacagaaatggcagaccccagatatacacatccagatacagctttgaatccgccatgatctcctgcggcgtacggatcagcaaaagcagtgcctgacagctcaaaataccggcaagcatcaaaatcgcacacagtatgccgcttgcgatcatcgttgtatacactgccgtcttcacgtctgccaggcgctttgccccgaacagctgcgagacgataactgagcagccgatattacagccaaatgcaaatgcgataaaaatcagcgtgatctcatagctgtttccgactgccgccagcgcattctccccgataaattttcccgccaccagactgtccgcgatgttgtacagctgctgaaaaataatacttccaaacaacggaagacaaaacatccataacacccgttccggcctgccgactgttaaatccttattcatttgtttctttttctctcctttcttttccgtcctcacttcttatcctttactgtaacagagtgtaccatcaaaattctttccttttccaaaaaagaaaaagagctgatctcccacatacctgcaggagttcctctctttcatcagtacggagacggagggattcgaaccctcgtgccggttacccgacaacttgatttcgagtcaagctcgttatggccacttcgatacgtctccacattataaaatgtgtcaccacatctaaatattataaagcaggggcggggatacgtcaactgttttcttgttccttctccctctttttcttctccctcagctcccggaaaaatccggacagcatcgtcgaacactcctcctgcagtacaccgcgctcgacctctacctgatggttgaattcctgcatttccaaaaggttcaggacagaacccgcacagcccgccttcggattcatgctgccgatcacagctctggtaatccgggactggacgatcgcaccggcacacatctggcacggttcaagtgtaatatagatcgtgcatccttccagacgccagtctcccagctttttgcttgccctgcggatcgcattgatttctgcatgggaagtcgtgtttttgtctgtgttgcggcggttgtagccgcgcgcaataatttttccctcgtacacgatgacacagccaatcggaacctccatcagcgcataggctttcctggcctggcgcagtgcctccttcatgtatatttcatcttcggtcagttcctgctttctcattcggtgattccctccgatcctcgtcttttgcccacgccccataaaccattttttcacgcaaattgattttcccctgcgcgcatcttacataaaaaaatcatcgcaaatcataaacgccgcttcctaagaagccctttaccctttgcgatgacttttttatccgcgcgccttgcttcgaacgcataccatggacgttacctgaacagttaactcgacccaggcacccttacggcacacaggtggtcccgcttagtgctgctccattcctgacctgacacggttcacgggttcctgttgcgcaagacccaggtgtcaacatcacttattcagggcagccccacagcagtacgccctcggctcggcatcaccctcgctgtagcggattgcgagtacagggcaccgctatctccccggctgcgcggatgtttcaactatacagggtttgcgcagatttgtcaagtatttgtaaaaacaccacacctcacctatcacccattgcttcgcgcagcctcgcagacagcttgcctgactcaattaaaatacactacttcatctgccggcttctccgcagtctcgtagctgatgccgtaaagcaccggtccctcttcgccgtactctttcgcgtattcgttacggatttctgccgtaatccagatccactgacgggacttgagcagacctgcaaattctgctttgcacagatagccgacaaaacggatatcattttcgcagcaggtcatcgcattgcgacccggaataaatacgccctgcggaaagcggtttgacttcatgacttttgcaaggaaacgcacctttttaccctcgtagcgctccggattgtcggaaacatcgagataccagaggccgtaatccatatcgtcaatctgaatcacagccgcattcagatcatacggcggctcttccatgccagggtcgaccggattgccttcctcgtcctcaaaataaaccattgcccgcggattgacgccgcgtaccgcacggcggaaggaatgcagcggcatgtcctcggtgcagcggttgaaaattaccatctccgtatacgtgaagagattacttaaaatgcccttcatattgttgacatacacctgaaacgtgcttccgtccacgattgtgattacctgcgcgatctcaacctcacgcggcagagcgctgtcaaacatccatttgcagtcccacataccgttcatctcgacgaaaatacgtttcggacggtatttccgaatgcagtttctcaagtattccccgttaaaatccttctcctcgtcaacggtcagagagagaatattcaaattcgtcagttcggactgatcgtactcgacctcgccctcctcacacaggatcagcagggtcttctgaccatccgcaaaatcgccgttcgtgagtacatcctgaatgaaggaggtcttgccgccctccagaaatccgttgattaaataaagtggtatcgtattggaaaacattttgtcacttcctttttttattttgcagatccctccgctttggcagcggaagaatccttacaagtcttttgttgaacagttccctgtctgtaataattcagacctgcagcgaaacaaccgcctgcaggtctgttttttcgtttttatcaccagcgcgtacagcaaatcccacccactgcttattgctccgcgcaattgaacgcagataagcattcccccgcttcaagtgcgtggagcactaagcggtgggtaagggggatgcttatgtcagtgggagttgaaagctcccactgacaggtcgcgaagcgactgcgttcatgagcaagtagcaaagcggattgcgaatgtccgctttacgcagtggacttgcctgattcggtcaaaaataccctcaatgactgccacatcttccggaactactgctctttacagcagaaacaatttttcaagttttgcctcatcaagcttcgaaccaattacacacagtcttccggtgtagtctg

SEQ ID NO: 1726 - DNA, 18635 bp, Unknown
  16S sequences of unknown bacteria
aaaatataaataacagtacaaaacaaaagggctgtaaagaccttttaaattttatattctatttttaaagggggcttttagctatcttaccgccgtttctcggcagtgatttcggcgtactttcccgctttttacatattataaggcatcttttgctgtcatcgggcaaggtgaaatcctcggttttcacatacgctcccccaagcctgttaattgcctttacagccggagcaagctccttttcgccgtcccccttcatggcgataaagtgtccccctaccttaacaagaggcaaacaatattcggatagaaccctcatatccgccacggctcttgcggtggcaacatcaaaactctccctgtatattttgcgtgccgcctcctcggctctctcctttaccacggtcgcctgtatgccaagggtgtcaatggcatactgtaaaaaggtacatctttttccggtaggttccataagagtaagctctatttccggcttgtatattttggccacaattcccggaaatcccgcaccggttcccacatctaccacttttccctcaacaagaggattttttgcaaaaagcagactgtctaaaaaatgcttgttctcaatgcccaccgggtcggttattgcggttaaatttactttttcgttatattcaaccaaaatttcccgatacttatcaaacatatccagctgccgggcagtaagggatattccgtactccccacaagtgtttgcaaagcgtgatttatctatcattttttctttaattcctttaattttaattccatcaaaagccgagttatatcacttgggcttactcccgaaattctcgatgcctgtccaacatttgcaggtcttatcttcgtaagtttttcccttgcctcaatgcgcaagccctgcatttcgttgtagtcgatatcctcaggcaaaattgtattttcaaggcgcttcattttttcaatctgttcaagttggcgtttaacgtagccgtcatattttataaaaatctctactttttcagcgataaattccgttacttccgggtttttgcctattatctcaaccagttctttgtaacttatctgaggtctctttaaaaattcatttgcccttacaccggtggttataggttccaagccctttgcaatcagcaaatctctaacctgtgccggctttatggtaattgattcaattctctctgtttcggcctttttaagctccatacaatgattgaaatattcccatctctcgtcgtctacaagacctatttttcttcccagcggtgtaagtctttcgtcagcattgtcctggcggagatacaaacggtactcactgcggctggtcatcattctgtacgggtcaagtacaccctttgtaatcaaatcatctataagggttcctatataagaagattgtcttgaaagggtaaattccggctcaccttttacctttaacgctgcgtttatgccggcaataagtccctgtgcggcggcctcctcatagccggaagtaccgttaaactgtcctgcgccgtaaagtcccccatagtttttaaattccaatgtggcttttaattcaagagggtcaacacagtcatattcaatggcataagccgggcgcataacttccaaatgttcaaaacctttgattgttttgtaaaattcaacctgaacttcctccggaagtgaggaagaaagcccctgcaaatacatttcatctgtttcgtagccacatggttctataaagaactgatgtctcggcttgtcggagaacctcataaccttgtcctccaatgacggacaatatctcgggcctatgccctcaatggttttaagtccgtacaaaggtgatctgtctatatttcttgtaataaccttgtgtgtttcttcatttgtatagtcaatgtggcaaggcaatgtgtttttaacttctccccttgtcataaatgacataggcaccggattttcatcgccgttttgcacttcaaggtcggtaaaatcaatacttctcttgtttacacgggcaggagtacctgttttaaatcttctaagctctattcccgcccgggtcagtgattgagaaaggctcattgcggcgtggaaaccgtccgggccggagtagtaagacgcctcacctacataaatcttgcctttaagatatgtacctgtggcaattataacggcttttgtgttgtactgtgtacccaggtgagttacaacacctgttacattgtgattatcgtcaaacaaaacctggcaaatttccgcctgctttaaatcaaggttttcctgtctttccaacagctttttcatatatgtgtggtaagcctgcctgtcgctttgtactcttaaagaatgtacagcagggcctttgcccagatttaacattctgtactgtaaggctgtggcgtctgcagctattgccataacgccgcctaaggcgtcaatttctctcaccaggtgtccttttgccgtacctcctatggcagggttgcatggcatattgcctacgccgtccagtgtaagggtgaatatggcggttttacaacccagtcttgccgccgcaacggcggcttcaattccggcatggccggcaccgataacaactacatcataagttcctaaaatcatttaagtctcctttaagtagctttgcaatccctttcaccgattgtaagcaattttaacattttattatttgccgacgcagaattttgagaacacctcgttcacaacttcgtcggaaacattctctcccgttaaggcataaatggcgtaaagagcctcgtcaacacttacacccacaatatcaagagtaaatccctctttaaatctgtcatttgcgtctttaacccggttgtaagcggtgcgcacggcttcgtactgcctttcatttaccacaataccggtatttacgtctaaatttgcaatgcccaaagtttccataacttcggtttcaaattcttttgacatataaaaatccttagcagtaataaacaaaacctttttaaaacagccctctatttttgaaaaatcaaaccgctgccgcaagtcctgcttgtttaccagggctatgctgttaagatttctgcatctttcagccagttcaatatcctcccgggttatctctcggcttccgtcaaaaacacaaaaaaccaagtccgcatcggtaagtctgtccaaggaccttttaatacctatggcctcaacttcgtcatctgtgtgtcttatgccggctgtgtcctgcaaaataaggtttactccccctaaaataacctcttgctcaacaacatctcttgttgtaccggcaataggggtaacaatggctttttcaaaaccggacatagcatttaaaagggtgcttttacctacattcggcctgcctacaatagcggttttaattccctgtttaatttttgccccaatatcatagccgtctgcaagttttttaagctcgtcttcagcattttgcaaaattctgcctacttcccggtcggaaacatcttcaaccgcctcttccgggaaatccgtataagcggaaatatgtccaaccaaaacaagcaaatcatctcttattttagccgcacgcttgtataaatgcccctctaaggcactgtgggcggcacttaaagcctggttggatgtggcgtttatcatttccataacagcctcggcttgagtaagggtcatttttccgtttaaaaatgctcttttggtaaactctcccccttgtgcggcctttgctcctgcctcaaagcaggcctttaaaagccgatcggctgcggcatatcccccgtgaacagaaatttccacaacattttccccggtgtaactgtgaggagctctaaagaacaaagccacagcttggtcgatttcttcacctttgcggtaaaaagaaccgaacattgcggtgtaccctttccgccgtgaaacctttttatttttattgtaaggaacaaacaccttttcgcaaattgaaaaagcgtcgtctcccgatattcttactacacacaaagacgccttgcccggcgccgtagccattgcggcaatagattctgacataatttctccgttataaataattttctaacatattattttaccttgtttttcttctgtttacaagacctttataaaaaattataagtaaaattgtatggcaattttttctgtttgctatataaattcattttattttaaaaactttctcacaataatatacaatatgtaatattttaaaacatttattcaatatgtaaatttaataaaaccgcctgcaattacaggcggcttaaattttataataattacttttggggcatataccaccaagtgccaaagccgtgcatatagcacaaagaaccttttggcatttgtgttgcggcattaaaaacatttatgtaatcccctgcacccattgaaatacaaaaagccccaaacataccgagagatacccattcggggtttatcataaaaattatgtagggtaaaaatccaaaaacaatattcggcattagcgacataattataaatcttgtctttgtaaaatcttcgcccccagtaacaaacatcattccttgctttaaatttgtgtacatataggctttccctttaaaacaaaggccatgaataatttcgtgtgggtacaaagttcccagtggcagaatatacgcccagaaagatattccgctaaacttaccggctgtaaaacatcttgcaaaaagcaaaataatcgctgtggccataattacaatagaaagaacatttgcaactatggcaagtttattcatattttccggctctttaaatctcacggcaccgggccggtgttcctctctcatgggcaaatcattttcatcgccgctgaatttacccataaagtaaatattcttaaaatgcttcacaaaatctcccccaatttttccaattcctttattttcaaacctgtgtcaattcggcttttaccggtgatttttaaaggtttttccgatttatatccgccgtttatgctttcttttattcccatttcctctaatgtatagacatagacggtgccgggcagtaaagataaatctccgttattttttcttttgattttatcccaaaagtatataaaagatttatttaaactttcagtaattttaaaatcaggatttttgtcttttaacttaggataaatcagtccttttagtccgtctttatcacaaaccatgtagtacatcataaggtattcctttttgttttgtacaaattgtattattttatataattattacaaatcaccgagtgaatattttcacccggtgattttttattattcaatatcctcgtcggcactttgctgtacaagttcttcctcttcggcgtcataatctcttataagatcttcttcctttacggaatttccctctgcctctttttcatcatcgggaagttcttcacttgtaggccgtgcgttttcaacctcgtcgtcactcatagtcacggcaaatgtaactgctctgtcattttcgtccaagcgcattacctttacaccgcctgcgtatcttgactgctggttgatctcattggctttcattctgatgataataccgttcatggaaattatgataatatcgtcatcatcatttacaacacctacgccacaaactttgccgtacttgtcaacatcaaagtttttaacgcccataccgcctctaaactgaatacgatattcgtcggcaggtgtaattcttcccttgccgtcctcggtaacagtcaaaatctttgtaccgcttttagcaattcccattcctacaacttcgtcatcgccgtttaactcaatggccttaacaccccttgcggttctgcccacaacacgaacatcattttcgctaaatcttatagcctggccgttcttggttgcaacaataatataatcattgccatgggttaccattgtccatgccaaatcgtctccatcgtcaagatttattgcaataagacccgactttttaacatttgcataccgatttaaaggcgtcctctttataatgcctttctttgttaccataacaaggtaactgccctcggcttttgcctcggtaggaataacgcttgtaataacctcaccgggcagtaacggcaggaagtttacaatatttgaacctctccgctgtcttgaaccctcaggcacttcgtaacctttcatacggtaaactctgcccatattagatgcaagcataatgtaattgtgtgtgcggcacaagaacaattctttgatataatcgtcctctttgttgttggatgcgcttatacctctgccgcctctgcgctgaacctggtaattttccttgctctggcgcttgatgtaaccggcatttgtaaatgtaaatacattttcgtcattcggtataagatcctcaatatcaacctcaccgcttaccgtctgtatttcggtttttctctcgtcgccgtatttttcctttatctcggtgatgtcttccttaattttagaaagaaccattgtttcatctgccaagaatttctgcaaataatctatcttttccgcaagccgagcaagctctgcctcaattttttctctttcaagtccctgcaaacggcgcagctgcatattcaaaatggcatttgcctgaatttcggaaagaccgaatctctccatcaatttttccttggcgttgtcatagctgtttctgattatatgaataacctcgtcaatattgtcgcaggctatcttcataccctctaaaaggtgctctctttcaagggctttctttaaatcgaacttagcttcccttgtaagaacttcctcctggaaagaaacatactttttcagcattgttttaaggtccataatcttaggcacgccgtcatccaatgcaagcataataacgcctacggtatcctgcaactgtgacagagagaacaggtgattgagaactatctgagcatttgcgtcctttttaagctctataacaattctcataccctctctgtcggactcgtcgtttaagtcggcaattccgtcaacacgcttgtccttaacaaggtcggcaattctcttaataagctccgccttgtttaccatatacggtatttcgtttactataatctgctgtctgccgttgggcttttcctcaatggtgtacttacttcttaaagtaattttgcctctgcctgttgcataggcagagcgaataccgcttctgcccataataataccccccgtcggaaaatccggtccgggtattttttccataagatcccgatatgtgcagtccgggttgtcaataagatatacaattccgtcgcaaacctccgacagattatgaggaggaatatttgtcgccatacctaccgcaataccggtggagccgtttattaagatattaggtattctggatggcaaaacagaaggctctgttgtgtcctcattgtagttaggcacaaaatcaacggtttccttttcaatgcctctgagcatctcgtcggaaatctttttcattcttgcctcggtataacggtaagcggcaggcgggtctccgtccaccgagccgaagttaccctggccgtctatcaatgggtatctcaatgaaaaatcctgtgcaagtcttaccatggccccgtaaacagaggagtcaccgtgtgggtgatagctgcccaacacggcacctaccgtatcggcggattttttgtactcatgggtggagtccaggcctctttcatacattgtgtacaaaatacggcgatgaacaggctttaaaccgtcccttacgtccggcaaagctctggacactataacagacatggcatagtccaaaaagctgtcctgcatttcggcgcttatttctctgtcgtcatatctggtgttgtcaatttcgttgtgtaacattcacattctcctaaaaatcaaaggcaaatcaatccaaaacatcaagggtttgccaaggtttcaaatcatatttttcgcatatttcccggcagattttatcaaaacattcctctttgcctggatctatgtttctgcgtggaataaccatatagacaaatcctttcatgtatatatctttgctttttttcataacaaaaatataatcgtgctttgtcttttttatatggcggatattctcatatccgaaatatcttctctgccggtcggtaagatattcgcatctgtccgggtaaaactcggcaaatcccttttccggcttaaaaaaggtgtggtcggcacgattttcaagtaaatgatttaccccataccgaaattctcttttgtaatttgaaaaataattaaaccgaaaattcaaccggaaaaaagcctcaaacagaaaaggcaaaaacagcgtccagccctccgtattgcccttgcggtaggtgataaacagtatcactcccaccgccagtgcaagaaaagattgtactataaaactgattaaatcttctctgcggtctatttgggtgtccgcacccatttccaatatctccgcccgaataaaatcatcctgacttatgtctaattcgatgtgaaaaggatattccatattttcaccttaaatgtcaagatttttaacatattttgcgtttttctcgataaattcacggcgtgggccaaccttgtcacccatcaaaatcgtaaatgtttcgtcggccttctttgcatcctcaagggtaacacgcatcattcttctgttgtccgggttaagagttgtctcccaaagctggtcggggttcatctcaccaagacctttatatctctgtatcttataacctgtctgcatctgagatgtaattgcgtctttctccttgtcgtcgtaaacatatcttacctgcttgccccttgttattttgtaaagaggaggcattgcaatatagatatagccccggtctataaggggacgcatatatctgaaaaagaatgtaagcaacagcgttctgatatgctggccgtcaacatccgcatcggccataattacaactttgtggtaacggagtttttcaatgtcaatatccgtgcccaagccgcagcccaaagcggttaccacaggggtcattttttcgttgccgtaaaccttgtctattcttgctttctcaacgttaagcatcttgccccaaagaggaagaatagcctgatatcttctgtcacgtccgctctttgcggaaccgccggcagaatcaccctcgacgatatacaattcacattcacttgggtcacggctggaacagtcggaaagtttacccggcattcttgcggtttcaagtgcggactttcttcttacaagttctctggccctctttgcggcctctctggcacgctgtgcgctttgtgccttttcgtaaattgcctttgcaaccgccggattttcctccaaaaattccttcaatttgctgtaaaccattgaagaaacaattcttctcacttcggtgttgcccagctttgtctttgtctgaccttcaaactgagcctctgtgattttaacggaaataactgccgttatgccctcacggacatcgtcgccggtaaggtcggaatctttttcttttatatagtttttttcatggccgaaatcgttaaatacctttgtcaaactctctttaaaacctgtttcgtgagtgccgccgtcaacggtgcgcacattgtttgcaaaggaaattatatttgcgttgtagctgtcattatactgtaaagcaacttccgcaacgcatttgtcggtttcgctctttaaataaattaccgggtgcaaaaccgcaaggtctctcaaagttctgttttcatattccacataacttttgataccgccctcgtacatcatagattcctgaacaatattttcagggtcccttctgtctgtcagggtaattctcactccggcatttaaaaaggcctcttcacgcaatctctcttccaaaattttgtaatcgtaaacaaggctttcaaacatctcgtaatccggcttaaattctacggttgtgcctctcttgtcgctgtcgcccactctctgcaggtcgccgtcctgcacacctctcttaaaagactgtgtgtattccccctcgccgttgcaaacagtaactttaagccattcgcttaaagcgtttacaaccgaagcgcctacgccgtgcaaaccaccggaaactttgtaaccgctgttctcgccgccaaacttaccgcctgcgtgaagaacggtaaatacaaccgtaactgccggcaagccggtactcggctgaattcccaccggtatgcctctgccgttgtcggcaactcttatggcgtttcccggtaaaatatcaacttcaatgtgatcgcaataacctgccaaggcctcgtcaatggagttatcaacaatttcatataccaaatgatgtaaaccccgaggccccgttgaaccgatatacatacccggacgcactcttacaggttcaagaccttccaaaacctgtatctgttcgccgccgtagctattttcaactttgttttcaatactcgccatatttatccgcctttttatttattcaaatcttttctttaatatttgtgatgaaagctccaccacaaatacggtgccgtctttcataagtataaaacttttcggaatgtcggacacaagatattctatctttccttccgcctgcattttatttaaaaattcgtttgtaaacttgtttactgtggtgttatccaaatcaaaaataccaaccacatcatcgccgtttacaaggctgtcggtgtcaatatctacatacattccgtcaccgttccgttttccacataaaactttttgctgttgctcaaagcaattctgccgctgtcgcaactggttataaaaacctgcttgtcttttatgttgttaagcaggtagtcctgcctttgaaagtcaagttcgcttaaaacgtcatcaagcaaaatcaccggggcaattccggtaatttcctccataatgtcgctttccgcaagttttaaagctattacaatgcttctctgctgtccctggcttgcatattcctttgcaggcacccggtttaaaaatatatccaagtcctcacggtgtatcccgtttacggtgtggcctgccgccacatctctctttctctgccggcttaaaatatcgtatatttcccgccggctctctcccgtgggtttatacacaagagaaagttcctctttccccatggaaattttgtcatagtaatattttgctctttgggaaacatacccgcaaaattcttttctgctcttgcaaatttcatatcctgcggacgccaaagctctgtccgcagtttcaaacataacctgtcggtgagcatcgtcatacataacatagttttttaaaaacttgtttctcagttcaagggcgtggttatacctgcggtaattgtccacaaaccccgggtacatctggcaaaggcaggcgtcaataaatttacgccttaaagcaggcccgccggagacaatattcaaatgaaccggtgaaaaaataacgcaataaaaattgcccactatttttccgggtgccaaaaagtcgccggtacccaattttgccattcggctttggaattttgggtttttgtttgaacaagccaccgtgattttttcatctccgcctgctccccgaacaattccctcaatcctgaactgttctttgccaaagcctatcatatctctgtcttttgtgccacgaaagctctttccgccgcttaacagccaaactgcctctataaaatttgtcttaccttgccggttttcaccgtagattatgttgatttcctttgaaaaatccgcctttgcatatgaaatgttgcgaaaatcccgcacttccacactgcgtatatactgtttaggcattattcccggacaaccctaaaatcgtctccgttaaatgaaaccacatctcccgggtgcaattttttacccctcattgtgcaaacttccccatttaccttaacgctgccgtcctgcacaaagccttttgcgtcgccgccggtgtaaaccatgccggaaaatttcataaaagcgtctaatttaataaattcggtgttaattttaatatcaatcatttttaaatctcactggtaataccaaataggtaaaatcgtctccctctttaggaataattttgcaaggggccaaagggccggaaaacttaaatataagttcgtcttttttgctccgtctcaaagcgtcaagaacatatctgttgttaaagcctatttccaaatccgggccaatctgatttacgttcaattcgtcgtaaacttcacccagttctgttgaacatctgatgctcataaccccttgattaagtgtaattcttacgggatttctcaatctttcggttatgataagagaaactctctcgatggcgtccgataaatctcttgttttaacaataacatcggtcataaacttttcgggaattgcttttctgtaatccaaaaagtccccttccaacaaacgggaaataatagtaaattcatcaacctggaaaacaacaaatctctttgccgggtaaacggctatttttccgtcgtcaacacaaaggcgtcttacttcgtccattgcctttttagggataaccattttaaattccccttcaaaatcaacggctctttcacaaactgccaaacggtaaccgtccaaagcaaccattgtaaggtgcatatcttcaagattcatcaaaacacctgtgtgagcagggcgcttgtcatcggttgcaacggcataagaaacataatcgcacatttggctgaaaagactcttttctatttttacgcaattatcgctgtttgccgatggtaaatccgggtagtctgtgctgtctatgcccttgatattgtatcttgcgtttccgcactgaattacacagttcattttatcgtcggcgctgatgtaaatttcgtcgtcggaaaccttttttactatgtttcccaaaagccggcttgaaagaactatgtctccttcttcctctattcggcaatcaaaagttgttttaatacccagttcaaaatcgtaacctgttaaagtaagggtttcgttttccgcaactaagagaataccctcaatactggcaagattgcttttccgtgcaacagcttttgaaactacctgaatagcatcattaagtttgtcacggtcacaataaattttcataaaatatattcctttcctgttattaacagacaatggtaatttagtaccataaaatttttgcaataaaaagtttttttgcttttacttgctatataaattcagtcgtagtagtagaggccgttgaaatgtggaaaatttgatttaccggcttttcaagcggtttttctctacattttaaatgtttaattcttgtcgattaaatgttgaaaccgacaaccgtaaaacctaaccggttgaaaatgtcaaaaactctctgttgaatgttgaaaacaatgttgataattttaaagccctcaactgcatatttatgcaatattcacggtatttcaaagaataaaaattctaaaaccggcggttgttaaaacttttgctcggttgttttcgacaagacctaagttaatataattaagtttaaatggtttttacgttcttgataatatcctctaccgtatcatgatagaaacggtcgctttttatcttattgcccacaacttttaagttgtaaacaacagtagaatgatttcttccgccgaacaaatcaccgatgtctttcattgtcataccgcaaacttcttttataatgtacatggccatttttcttgcgtcggcaaattctgttttgtggctttggccggttaaatcggcaggtgtgcagttgtgtactttggcaacttccgcaataattttgtcaaccatagccgggctggacaaagtttcgtttaaaatatccttaaccgcaacctgtgctgtggcaataacaggaggtttaccctcaagttcctgtaaagcgttcagctttttaacaacaccctctaactgacgaatatttgtctgtaccttagaagcgataaatgtaaccacatcattttttaaattcaaaccgaaccgctcggccttgcgatttataatggcacatctggtttcaaagtccggggcttgaatatccgccataagaccccactcaaatcttgtgcgaagtctgtcttcaagactttttatctctttcggagaacgatccgatgccaaaacaatctgcttgcctgaattgtgcaaagcgttgaaagtgtggaagaattcttcctgtgtttgggttttgccggctataaactgaatatcgtcaaccagcaaaacatcgctctttctgtatttgttttggaaacttgcggtgtcgttttctctgatggcggcaataatctcgtttgtaaaagtctcgccgtcaacataaactatgttgtaatcgggataatttttgtgtatctccgtttttatggcgttcaaaaggtgagttttgccaagaccgctgtccccgtaaataaaaagcgggttataagccgttgaaggtttttgagaaaccgcatacgctgcggcatgggcaagtttgtttgatgaacctacgataaaggtgtcaaatgtcaaatcgtaacttccctttttaacttctttcttttccgccggctccgttgcaggggctgcggcaggttttgctttaaggtttataacaaccgtaaaacctaaaatttcctcaaagcctttggaaatcaaatccaaaaactggtattctataactccccttgcccaatcattgggggcataaagcgtaaccgtctgcccgtccatagggccaagttcgataggggctataaataaattataggacgcttcgttaatgctgcttttgcacctggccttaacagcggtaaaaacatcgttaaaagattccatttaattactcccgtttaatttccctggcgcagataggcttaaatgcccggtaaagggggcaaattgccattaaaaatgtttttaagcccaaaacgccatttttacatacacatcgattataccataaatttgccgcctttacaatattttattatataataaatatagtatatataatatttttaattgttaatactatatatgaaaacaaaaaatttataaaaagataaaaaaacaaagaaaatttaaaaaataaatcctttttaaccaataagttaaatatttgcacttgacaaaaacccactgtttattatatactttctaaatgcaagggcttactttgcgctaaaatattgttggcagcggaattaccgtttgcatatataaaataaagacaggaggacacaaatcaatgaagagaacttaccagcctaaaaagcgttcaagaaaagcagttcacggctttttgaagagaatggcaagccacaacggcagaaaagtaatcgcaagaagaagatcaaagggcagagctaaattgtcagcttaatcgccatccttttgttttctatttttgacatttcgaaagttaaaaagcaagaccacttagcgtggtctttatttctattcggattttcaaaataaaaacaatcttcttggttttccaaattgaaaaggaaaaaacgatgaaatttaaagcagttaacaaaaacaaagagtttatcaaagcttaccgcaagggtaaatgcagcgttcagccgggggttgtggtttactgtattaaaaacaggtatcacggcacccgcataggaataacatcaagcaaaaaaatcggctgtgcggttaagcgcaaccgttccaggcgtgttataagggcggcaattcgcagccttaacctggatatgtcaaaagggtacgaccttatttttgtggcccgcggcaaaaccgcaaggctaaaaagttatcaagttgcggatatgataaacttacggcttcgggagacaggttatttggatgcttaaaaaaatttttatagccccaattaaattttacaaaaaatttatatcccctcttctgggcaaccactgccgctatctgcccacctgcagcgaatatatgatgcaggcaatagaaattcacggtgtagttaagggtttaatccttggcatatggcgcattttgcgttgtaacccatgggcaaagggcggttatgacccggtcccgccgaaaggaatgtggacaaacaaaattaaacagtagcctttattaaaaaggccggaggaaaaatgagcagtatattttcaattttctcaatacccctcggttggttgatgcgtggcatctacgaccttgtgggcaactacggtgtaacacttattctgtttacacttttaacaaaaattattcttcttcctctttcaatcaaacagaagaagagcacaatcagaatgagcgttttcagtccgcttattcagcaaattcaaaagaaatacgccagcgaccctcaaaaacagcaggaggaacttgcaaggcttcaacaggaacacaacttttcaatgacaagcggttgtgcacctatgcttattcagttccctattctcatcggtcttatcaatgttatttataaaccgttgcagtatattgcaagggttcctgcagatgtaattaaaacaatcacccctattgccgaaggcattatgggttccgtttcaagatacagccgggaaacaagcataatagttgcggtaaaacaaaacccggatatgttctcacagtatctttctgcggaacagctttcatttgtaaaaaactttaactttacattcttaggctttgatttatcggttacaccgtcaatcaaaaacctcaatatgttggttcttattcctatcatttcggtaattgtaatgctcattcagcagtttgttacaatgaagttgaacggtcagaaaatggaaggccctgctaaatttatgcctatttacacaagcgtaatgttccggtatttcggcttcgttgttccggcaggtgtttctgtttactggatttttaacagcgttttcggtattttgcaggaatacattctttcaattttctttgatgttgaaaaggaaagagcaaaaatcaaccgggaagttgaagaagctcgcaaaaagagaaaagaagagcggaaaaaacgccctgaaaaggctaaaaaagccattcggcaggacaaagaaaaatacgccgaagaatcaaagagttttgacggcgatatgaccgaagaacagagaaaacgccttgaaaaggcaagggcattggacagagaaaaatacggtgataaataatgagagaagttattaaaactgcctcgtcaaaagaagaggcaatagccctggcacttgaagaattggatcttacacgggacagagtaaccgtggaagttaccgatgtcaccaaaaagggctttatctttaaaaaagaatatgtaaccgttaaagttaccgaaaaagaagacgatttcagtgtaaaagatttgtttgcacagcctgaaaaagaaactttcaaaaaagaaaagaaagaaaaaaagccggaaaacaaaaagcctgaaatcaagagcgaagaacctaaaaaagaggaacaaaatcggcaggaagaaacggaagaaaaacggcagccggaagaatatgtaattcccgaagaagaacagagcgcaaaattaaaatatgcaatggaattcttaaaaggaatactcagtcggtttaacgaggaagaatacactctcacccctgttaaaagcgaaacaggctgcaccattaaaataagcggccggaatgtaggggctttgataggcagaaaaggcgagacaatggaggctctctcctatcttacaggtcttgccgcaaaccgcacagaggacagctttgaaaaaattaccgttgatgttgcggattatcgccacaagcgtgagggcgatttggttcacaacgccaaaaagcgggctaataaggtgttaaaaacaggccgtcctttcggtttcgagcctatgaatccttatgaaagacgcattattcacgctaccgtaagcgaaatcgaaggtgttaagagcgagagcaaaggcgaaggcagcagccgcagggttgtaatttatcctacaaacccaagaccacgctacaataataatcgtgaccgtggcggcagaaagccttacaacaaaaactcatcacgcagagaaaagagcgaacctcaggcacagaaaacaagagacgaaaaactcaatgacagccggtcattcggtctttactcaaaaatagaactttaaaaatttacaagccgtccccagggcggcttgtacttttattttggcagattaaatatcaaatattgtcagaaaataatattatttaaaagaaaacctctttttaaaaactctttcaacatttttaagtataaatgtcaaaaactattttgaattacaaaaatatgattaaatttttggattttgtaacaaaaaagttaaaaatcgttgcacatacagcggttttgttatattataatctaaaagcaaaagtaaaagaggaaaaagttatgaccttatcagaaatatataaatccagaaagacaaatttaatcgaaaggctcagccgggctaaaagcctgtatgaaacaggcagtgtcatttccgaaatgtttgaaaccattcagtatcaatatctcagccggggtgacaagacagatgttgccgacaaattagatcggcttgtggctttggaaaaagccaatttcccta

SEQ ID NO: 1727 - DNA, 2589 bp, Unknown
  16S sequences of unknown bacteria
atgccttttccagcttttccaaatagctgtaaactgtttcgttatcaagggcgcgccgctctgctttcagataatctgcaatcgactttgccgaaaaggtgttgccgacattattaaaggtatatttgacaacgcgctccagttggtcgattttcctgacctgatttcgctttacaatgtctgaaaagattgtggaattatatatatcccggacaaccgtgtagatctcatcctgagaaaatgcctgtaaatgggtcgccggaaatccgcccagacggacataattggcaagctcagctttgggttcaccgacagtcgtgaacttgcttctaaacatcagatattcgctgaaggacagcgtaaaaatgcggaaagacacataccggccagtaaggtaggtggagatttccgaggacatcatccgagagttggagcctgtgatatacaggtcaacatcaaagtcggacgccagggagtttacaaccttttcccatcccttgacctcctgtacctcgtccagaaacaggtaggtctttccgtccgggcaaagacgctccttcaactgtgcgtacatctgctttgccgtcatatcctcaaattccatagaatcataacggcagcttatcatgcgttcagccggaatattccgctcggtctttaaccgttccataatcatcttcaatattgtggatttcccgcagcggcgtacccctgtgagtatctttacaaacggggtatcggcataagccatgatcttatccacatataacggcctgtaaatcatcgtgaccacctccattgtaaatagtatatcgcaaaacctgtttgtggtcaattagttttgcgattataaaccgcaaaacatttcgacaatttatttgactgcggattacctcaaaaaagtactacggctccatacccctgtccttgtgccgcaaataccattcttttttggcggccctggaaagatcacctcccatagccttctggcaatcgtcgtactccatacccatgttgacggcgttctgttccaacgccatcaggatttcacagatcaaccgctctgtatagtaggcttttcgggcctccgcatactcaaaagagccggtttcccgatccttgcgaagcatggcgcgtatggcctccaataccttgttggcgatcaacttgtccgcttccgcgattcctttctgctgctgttcctctacatgggcggggtcggtatcatagagcatggcaagctggcacttggcgtccgcatattcgtttaccaaatcaccgatgtatttacaattcgctttcaagctggcgacgaaggtatccaattcggcctttacttcttctggtaacagtttataggccaggcggccttttttcggcatcttttctttcagggaaaacaggccgggaatgaaatgggccagctcatccgcactcaaaatgccgtccagtgggacggcgcccaactcatcatccgtgatatggccgaaggtttcccgcaggcgcttatactcgctgggatgaagccgctccatatattgctcaaactcatcaaccagatcaacggcggctgcggtaagctgctctctggcccgctgcttcgtttcacaatatgcctgaattttgtccgcgaaggtgtcacggatcaactgcctgcgtattttatccggtatgctgggatggacaaagggaaccattgtgcgctgatttttgtcccagaacaccacatggatgtgcggatggcctcgctcattatggtgggcggctgcccattgtagattttgcacccggattccgttgtattttgccagcgttaaaatgtgacgctcaatatagtcctcccaggctttgtgatcggtcagccccagctcggccgctgtttccggggaaaaagagataataccccgatacatattcacacggcggtaagacagctcccgcaccagacgggctgcctcctgccaggtggcaaactcccgcacctcgccgggttccagcttcccgaacaggccgtgacgcatcccctcatttttcaccgcgccgggacgggtggcgatatagccgatgtgggcatagttgcacttgggcgtctttttctgattggggtgccggtggcactgcttatagatcaggatcgacacggcgacctccctgaacagcctgaatcgcctttttcatttcctcgtcatccagaaaaatacgcagggcgtcggcgttcttctggtttgcaaacgccaacgcctcttttcgggccgccgcctcgatcttctcaaaagaagaatagcggtcccggtcgatcaggtcagcgatgatggcaatattggcatagtagcctgcggcggatatgatcgtcaggcggttgataagtccggccagccggtttcccagccccttgatctgtccgctgagttcctgccgaattacgccgcttatcatgtcgatgttctcagcggtactttccaaatccagatattcgtcaatcgcccgccgcacctctttggagaagtccgtcccattcctggccgccagcttattgagcgcctgaatggtgtccgggggcagatggatggttttgcgctcggttcggat

SEQ ID NO: 1728 - DNA, 6428 bp, Unknown
  16S sequences of unknown bacteria
ccgcgctttgtacgctttgccaccaaggtcatgggcgtggacaacgacgtgttccatccggaagaagtggtgctggaaggcattgcgagggtaaaggcttatatgtccagcattgggctgccgacgacaaaggaagagctaggcgtaaaggaagaggatattccgcagctggccaatatccaatgcggcgggtttgtaccgttgggccaaaaagaaatcatggagatttatcagttgatggtataaagaagggagcctacaggctcccttttttatcaatagggggaatcaatttaaaaaagaaacgatggacggcattatgttgtttcgttgcgctgtgtgttgcgggctgtgtaggccagcctgtttcccaggaaaaccaaacgggtgcagaaaggactgccacagcacctctggcgcaggaaacaccgtatccgcaggcagagatcccggtgccttccttttccgcagaacagctggaggccatgggattgccggaggatttaagtgaagaatccattgcaagcatgcagtatatatacggaaaccaggaaattggcatgatgatttcagtaccgatttactggatgcaggtaaaaccggagaacggggcgcccaatcaatgctatttttatttgcgcgccgatgaagaaaatataacttccttttccatttcctcacaagattatgtgctggaaaatggtacggaggaggcagtgataaaagcgtttgtggaaaatgaatggaaaaattatcaggcgttgcaaaaggaattgaatggaaaaccgatggagatccagaaggaacagccattggagatagtacaaataggcaattgcttgggcggcaagatttgttatgaatacaacaatgggcagacggatatggtcaatgaattcatcgtttgggtaagcaaggagaaaaggtattgctgtacactgatggcaaagccggcctacagcaaatatgcaaaggaatctttagcggaaatcttggctggctttgaagagatataaagaaaaaggcatctttacagatgccttttttattcaaccaaacaacggtgggaaaagtacgccgaacaactggcataccaggacaaacacgcccatgcaagctacatagatggcaaatccgtacagcttatgattacggaccaggcgaagcataaagcggatggacatcagccccacaagagcggaaaccagcacgctgaagatgatggcaacggtgctgacatcgcccggcccctgggtgatcatatccttaaatttaaacaccacagaacccaggatggcggggatggacattaaaaaggaaaagcgcacggccagatttcgatccaacccacggaacagaccgcctaccagcgtactgccactgcgtgaaacgccggggaacattgcaaccgcctgcataccgcccatggcaagggcatcccagttgttcatttggcgatattttctgggacggcgtacctgttttcgctccgctatgcaaagcaagacggcagtgataaggaaaccaaaggaaagaaaccggccgccaaatgcttcctcgatgagattatccaaaagcagggtggcgatgacagcgggtatggtggcgatgaccaaaagccgcatggttttgcccaacggatggcggaacagcgcgatgatatccttataaaagaccagcagcacggcgatcaaggtaccgagatgcaagatgacctccatgatcaaaggctcggtttggatgcccaagagcgtacgggccagcacaagatggccggaactggaaacgggcaaaaattcagtaagtccctgaacaatccctaaaaagatcgcttgtaaaaaagtcatggcgtcaccccttctaaaaatgaaaactcactattcatactataacaaaaaaattgtcgaatgtttatacgaatctcttttttgccatggcagcaaactggcaaaaatgaagaaaaagaggtataataatacgatttcaggcacataggaggaacgaggatgaagctcgggattgcagggttgccgaatgtaggaaagtcaactctattcaacgcattgaccaaggcgggggcgcaggcggccaattacccgttttgcaccatagaccccaacgtaggcattgtaccggtgccggatcatcggctggatgtgctggcagagatgtatcaaccggaaaaaattacgcctgctacgattgaatttgttgatattgccggcctggtaaggggtgccagcaaaggcgaaggcctgggcaaccgatttttggcgcatatccgcgaggtggacgccattgtgcatgtggttcgttgttttgaagatgataacatcacgcatgtggacggctcggtagcgccggtgcgcgatatggaaacgatacaaatggaattcgtgctggcggatctggaagtgttgcaaaagcggtatgataaggccagcaagcttatgaaaacgggcgagaaaaaatacaaggaagaatgtgccgtgctggaaaagttgctaaagcacatggaggatggcgcgccggcccgtacattggaattgtctgaagaagaaaaagaattggtaaggggattttccctgctttccatgaagccgatgatctatgcggccaatgtggaggaagacgctttatcgggcgtggaaaacaatgcattggtggcgcaggttaggcaggcagcgcaaaaggaaggcgcagaggtcgtcgttgtatccgccaaggtggaagaggaattggcccagctggaggaagaggaaaggacgatgttcctaaacgagttgggactagaaagcgctggattggatcgattggtggaagccagttaccgtttgttggggttgatcagttacctgacggcaggaccgaaagaggtacgtgcctggacaatagaaaagggtacaaaggcgcctcaggcggcaggtaagatccactcggattttgaaaagggatttatccgcgcagaaattgtaacatatgaagatctagtggcttgtggatcgattgcagcggccagggaaaagggcctgtaccgttcagaaggaaaggaatatgtgatccaggacggcgacgtggtgctcttccgtttcaacgtataagaaaataaggagtagagatttctctactcttttcttttagaaaaaatcgtatcaatggggcagaaatggcgatacagtttgacaatctgttgtagagacaatacaatgatgaaacaatctgaaagaaaggatcgggctgatttggtagagacctttaagcgatttagccaacgatattgccaatgcaatgtgctggatgcatttttgatctgcttgctgacagcttcgctattctgccctccttttgtatgcgtaggaccggcagtagccgtactcgtgcgctttttttgtacaaaaaaaatctttcaaggcgcgctacgcctgcccggtgcggtagcgttgatggcctttggccttttgatgctgcttgtgacctgtgtaagaggcgaggaattcaatatcattgtggcgctgggcattgtggcatcgctggtggtaggtttgtatttcaggcaagtcatgacgcttccgatgtttcatacatgtttggatattttttgtatcggcggcgcggctaccggcctgtacggccttattgaaaagctgatgcattggggtgtgcctggctttcggggcccttcgatgtttttaaatcccaattattttgcgctcatgatggtatttgtttgcatttgtgccgtggttcagctggtgcaaagcgaccattggtatttgtatgccaccgtgcttgtgctggggctgacgggcattgtcatggcggatgggcgggccgcgttgatcacgggcgctgtatgtattttgctggcgctggtgctgctaaagcaatggcggctgaccatcattcttttgatgattgccattgtggtgattccgctgcttttaacgctgttccccaatttgtttatccggctggagggggtcagcgtttcggcggatcttcagcatcgcatcatgatttggaaggccgccatcaagggctttttacagtcgccagtgtttggccagggggcctggatgttcgaaaaggtgtgtacgccgttgtatgcgggcctgtatgaggtacacgcgcacaacctattttttgagatactcctgatgagcggggtggtgggcacatctctgattggcggatatgtattgacgatggtacgcgatttgacccgtatgtatcgcgtaaagcacgtggcactgtttgccgtgcccggcatctgcacgctatgtgcggtaacgctgcacgggcttttggatgtggccattgtgtttccgcagacgggcattgcgatgtttttactggtttcctgcatcgggatctacgacaagctatccgaagaggaaaagcaagggtttttgcaaaggcatctcaaaatcatagacaaagtggaaattccacgatgaaaaagcggcttttggccgcttttttctttgggaagaccggtccgttttgcctgcgttttcataccatactatgaggaggaaatgcaaatgaaaagacatctgcggacgattcgggggccccagggcctaaagggagaaaagggtctgtctgcgtatggtgtatggctaaaagcaggacataccggaacaaaggacgattttttttcgttcctacggccaaagccttacgtatacacagccaaaacgggacagaccgtgcctgttggcaaggaaatagagctggaatgcttgacatcgccgttgaccaagggacggtatttggtacaaatttccggcgggccggaagatgctgttttgggcctttgctatggcaaagtgccggtagacggcgggatctgcgtgatccatcatgggcatgggcagggcgtatgccaatggccctgcacgagccaccccatccaagtgctgaattattcggaggaaccattgtgtttttccaaaaaaagccaaacttttttgctggtattcactgccattgattgacctttcacaatcattttgctatcgtaaaacatagagcggaaaaaggaggcattctatgtttgatacgatcatcatcggtgcgggcattacaggcacggctgtcgcgcactttatatctaagacagccttgtctgttttggtcgtagaggccaaagaggatgtggctgaggggtctaccaaggcaaacagcgccattgtgcatgcgggctatgatgcaaagccgggtacgctgaaggccaaatacaatgtagaaggcaatctcatgtatcctgcgctggcaaagcagctgggatttccctttctcaacaatggatcactgatcctatgctttgatgaaaaggatcggccggatctggaagcgttgtatcaaagaggtatacaaaacggcgtaaaaggactggaaattttagagcgcgaccaggtattgggcatggagccgcacatcaatccccaggtcgtagcggcgctgcatgcgccgacgggcgggattacctgcccgtatgaagcatgtattgcgctgagcgagagcgcggcgcaaaacggcgtaaaatttatgtttgaatctcctgtgacggcgatagagaaaatggaaaacgggtttcgggtcacggcgggcaatcagacaatagaaaccaggaccatcgtcaatgcagctggtctgtatgcagacgaaatcgccaaaatggcgggcggcattgagcggacgatacggccgagaaagggcgaatatatgctctttgacaaggcggcgggcactttggcgaccaaaacgctgtttcagctgccaacaaaaatgggcaagggtattttggtgacgcctacggtggacggcaaccttttgatgggccccacggcagaggatattgaagacaaggcggatacagcgaccacccaagaaggactggatgatgtgttgtctgccgctgcgctgaccatgccagacatcccgcgccggcagctgattacacagttcagcgggctgcgcgcgcatgatttggcaggggatttcttcgtgggagaggaccccgaggtgaaggggctgtaccatgcgctgggcattgaaagcccagggttgacgggtgcgcctgccatcgggaaagagctggccgagcgcatccaaaaggatttgggcgcgccagacaaggtagactggattgcggaaagaaagcctattgcacgctttgcacacatgacggacgagcagcgcgccaaagccgcggcggaaaaccccgcttacggcaaaatcatctgccgctgtgagacggtgacgcaggccgaagtggagcaggccatagacagaacgttgggccgtgtgaccattgacggggtaaagcgccggacgcgctgcggtatgggacgctgccaaggcggtttttgcatgatgcgcgtagcggagatcatccataaaaaaacagggatgccgatgga

SEQ ID NO: 1729 - DNA, 5667 bp, Unknown
  16S sequences of unknown bacteria
ttttcgtccgaatcttcactaagcggccgacggcatatttatatattccgaggccaaagagaaaaccaatcggaggaaatatacctgcctctttgctaaaatgcgcagatttttcgtcaggcgttctcgaaacaggcgcagacatatttctatatttcaagtccggagagaggacgaaatggcggaaaaaccgccttcttctttcactaaaacgtgcggatttttcgtccgaatcttcactaagcggccgacggcatatttatatattccgaggccgattaggggagagagcggacggaaaagccgccgttttaggctgttaaaccattttttcttgcttaaccttatggtctataatgtgccttgaagcaagctctttgtggacgtcgtccaccgagatgcccatttcaaccatgaggaccatggcatgataggcaaggtcggcaagctcgtagatggtttcctttttgtcgccggctttggcggcgatgatgacctcggtgcactcctcgccaacctttttgaggattttatcaatacccttttcgaaaagataggtggtgtaggagccctcgggcttgtcctttttgcggccttcgagaagttcgtaaagcccgcggaggctgaactcggacagactgtcgctttgatagattttgccggtaaagcaggactcgctgccggtgtggcaggcaggaccgtccttttccaccgtaacaaggagggcgtcgcggtcgcagtcggtgattatcgagacaatgtgctgataatttccgctggtctcgcccttaagccaaagctgctgtcttgaacggctgaaaaagcaagtcagtcccttttcaagagaaatttcaaggctctgctcgttcatgtatgcaagggtcagcacctttttggagatactgtccaccactatggcgggaataagcccgtctttgtcgaatttcaggtcaaactgctgtgccattttcataacctcacatttatgttttgtcttttaagagcctctttaagctcctttatttttatttctccgaagtggaaaaccgaggccgcaagagccgcgtcaatgtcgggtatttccttgaaaagctcgataaagtgctcggtttttcccgctccgcccgaggcgatgacgggaacgttcaccgcgcggcaaacggccttgagcatttcgatgtcaaatccgttttttacgccgtcggtgtcgatggaattgaccacaacctcgcccgctccccgctcgacgcaggattttatccatgaaacggcctccatgccggtgttttctctgccgccctttgcaaaaacgcggaaaacgccgtccacccgctttatatcaaccgacagcacgacgcactggttgccgtatttctgcgccgcagccgatatgatttcgggattttttatggctcccgaattgaccgaaaccttgtcggccccgcatttgagcacccggtcaaaatcctcgggagaatttatgccgccgcccaccgtcagggggataaacacgttttttgccaccttcgtgagaatgtcggtgaaaagggcgcgcccctccgaggatgcggttatgtcataaaaaacaagctcgtcggcaagagaatcggaataaaattttccaagggacacgggggacgaaacgtcggccagcccctcgaaattgacgcccttgaccacacggccgtttttgacgtcaaggcagggaataattctttttgtaatcatttcgccacctcgattgcctctttaaggtcgatgccgccgatatagtaagccttgccgattatggccccgtaaattcccatggcggacagctcctttacatcgtcaagggaggagacccctcccgaggcggttatgtcgacggtatattttttcgaaagctctctgtaaagggcgcggtttgttcccatcatggctccgtcctttgaaatatcggtgcaaatgatgtttttaacgccctttttctgcattttttccataaaatccgagagggtgacggcggatttttcgagccagcccctgactgctataaagccgtcgcgaacatcggctcccacggcgattttttcaccgtattttgcgagagcctcgtcaagaaaagcctcgtcctccacggccgccgtgccgagaataacccggtcgacccccgccgacagatatgccgaaacggtgtccatgcttcttatccctccgccgatttccacaaagagagacgtgttttttaccacccgctccacaacgtcaatgttcggggtggttccgttttttgcaccctcaaggtcgaccatgtgaatatattttgccccgcatttttcaaaatcggaggcaacgctcagcgggtcgtcgctgtaaacggtcattttattataatctcccttaagaagcctgaccgcctttttttcataaagatcaatggcaggaagtataatcatttttccacctcgcaaaaggccttaagtatttccagtcccgcgtctccgcttttttcgggatgaaactgacagcccataacatttcccaccgcaacggcggcggtaagttcccgtccgtattcgcaggtcgctataagactgctttcgcaattttcggcatagtaggaatgaacaaaataaacgcagtctccgttttttatgccgccgaaaagcctgtgtggcttttttatgttaagcgcgttccaaccgatgtggggaattttaagtgccgacggaatgttcccttccatgggaacgacctcgccctttaaaagtccgagcccgtcatgctcgccgtattcatagcttttttcaaaaagcagctgcattccgagacagattcccataatgtcggttcccctgtcggccgccgcaagaagcgttttgtcaaggccgctttttttaagcttttccatggcgtcgccgaaggctcccacccccggcaaaaacagcttgtccgccgaaccaatgacgtcggcgtcgtcggtaataacggcctttgccccgataaattcaagagaggacaaaagagaaaaaagatttcccacgccgtaatctattatcgcaatcatttacaacagtccttttgtggagggaatttcgttcaaaaatttttcatcaaggcttacggcctctttaagcgctcgggccgacgctttgaaggcgccttcgataatgtggtgagaattcgcaccggtaatttttcttatgtgaagggtcatgccgccgttgtttgccagagcgataaaaaactcgccgcaaagctcggtgtcgaaatcgcccaccttttgggtcggaatgccgagctcgccgtaaaatccccctcttcccgaaaggtcgaccgccgacagaatcaggctttcgtccatagggagaacaatgtttccgtagcgcacaacgccctttttgtcgcccagcgcgtcggaaaaagccttgccgagacaaatcgcaatgtcctcggtggtgtgatgataatcgacgtaggtatcgcccttgcacttaacggtcaaatcaaaccgtccgtggcgggcaaaaagagtcagcatatggtcgagaaatccgcagcccgtgtcgatgtcgcttttgccgcttccgtcaatattaagttcaagataaatgtcggtctcgtttgtggttctttttatttccgcccttctcacttttcttcctcctttaatatctcgccgattttttccaaaaggattttcatttggtcaagggttccgacggttatgcggttataatcggaaattcgcccgtttgcgaaatgccgcacaagcacacccttttccttaagcctctcataaagcctttgtcccgagattttttcgctttttgcaaatataaaatttgcctttgactcggtggtttcaaagcccagcttttcaagttccgattttgtaaattcacggttttcaattattttttttgcgttttcgtcataatattcctgctctgaaagggcggcagcccccgcggcacaggtcattcggttgacattatagggatttgtggaaaagcgaatggtgttaaggtcggaaatgagagcctcgcaggcaaaaccgaaaccgagccttgccccggccatgcttctcgatttggaaaaggttcccgtcacaagaagattgtcgtatttctttataagtcccaccgccgactgcccgccgaaatccacataggcctcgtccacaataacaactcggccgctgtttgacgcaacaatttcctcaatgtcgtaaagcggcatgaaaagccccgtgggcgcattgggatttgcgataaccgccgtttcatttttgccgatatagtcgttcttgtctatggaaaaatcctctttaaggggaatttcggtgtatggaattccgttaagctcggcaaagacggggtaaaaaccgtaggttatatcgggaaaaatcagcggtcgttccccgtcggcaaaggccataaaagcaaaattcagcacctcgtccgagccgtttgtgacgatcgtgttttcgacgccgacgccgtatttttcggcaagagcctttctgacgttaaggcactcggggtcggaatacagcataaggctgccaacctcgccggccaccgcctcaagcacctttttcgacggcggaaagggcgattcgttggtattaagctttatatatttttggtccttgggctgttctccgggggtgtaaggcgtcagcccctcatatttttttgaaaataatctgctcatgcttttccctcaaatctgacggttgcgcttcttgcgtgagccgagagaccctccttttcggcaaaaagcgccaccttgccggccaccctttcaagggcgtcggccgtgaaataggtatactgtgattttttgacaaaatcgtcaaccgaaagcggcgacgaaaattttgccgttcccgatgtaggaagtgtgtgattcggtccggcgaaatagtcgcccagcgcctcggggcaattcttgcccataaatatcgagccggcatgacgaattcggtcgagataatcaaaggggttgtccacgcaaagctcaagatgctctggagcgatctcgtttgcaatgtctatggcagagagaagattttcggccacgattatttttccgttgttatcaatcgacgccctcgcaatttcggctctgggcagtgcgggaatctgaagctcaagctgctcgctcaccttttttgcaaagtcgccgtcgtcggtaacgagaacggcggtggcgtttttgtcgtgctcggcctgggacagcatatcggccgccacaaattcgggattgcagctgccgtcggccacaatgagaatttcgctggggcctgcaatcatgtcaatcgccaccctgccgaaaacctgctttttcgcctcggcaacgaaggcgtttcccgggccgacgattttgtcgacctttttgaccgtttcggtgccgtaggcaagagcggcgacggcctgcgccccgccgattttatagattttatccactcccgcaatttttgcggccgcgagaatttccggcctgacgctgccgtcctttgaaggcggagtgaccatgaaaagctcggggcagccggcaatcttcgcgggaatactgtccatgagaacggtggaaggatatgctgccgtgccgccgggaacgtatagcccgaccctgtcgagaggaatgattttctgccccatgacaacgccgtttttg

SEQ ID NO: 1730 - DNA, 1965 bp, Unknown
  16S sequences of unknown bacteria
gacggcagcgagcgcgcggcgcccgagtacgaagactgcgcccgtcttgcccgtgagcacaacgtgccgctccaacgcgtgatgcgggcggcccagagtacggcactgcgatttgagtaacacggccgagcgacgcgacgcgcccggccacatcaaccccactccgaaaggactccccatgaaatatctcatcgcttccgacatccacggatcggcatattggaccgagcgcctctgcgccgccatcgagtccgagcagcccgaccgcatcgtcctgctgggcgacctgctttatcacggtccgcgcaacgacctgccgcgcgactacgcccccaagcgcgtgatcccgctgctcaacgccctggctgaccgcatcatcgcggtgcgcggcaactgtgacgccgaggtcgaccagatggtcctcgactttcccgtcatggcggactacgccacgctgttcgacgagagcggccgcgagctgttcctgacgcatggccatgtttttggcgccggcatgcacaacagcatcgaccacgcgcctgcgcttcccgagggctccgcgctcgtctacggccacacgcacataaaggttaacgaggaaagcaccgcgcacccgggcctgtggctcttcaaccccggcagcgtgagcattcccaaggacggtacgcacagctacggcatctacgagggcggcgcgttccgtcacgtgatcatggaggaggaataaccatggcacagcatatggctcagcaaaatgccgagggttcgcgcgacctgtccacgctggtcgacgcgtcggccgagctgcagcatctggtgcagaccatctggcgtctgcgtcagcccgatggctgcccgtggaatcgcgagcagacgcaccgtagcatcggcaagaacatgatcgaggaagcctacgaggcgctcgattgcatcgaggccgatgatgccacgcatctgcgcgaggagctgggcgacgtgctcatgcaggtagtgctgcatgcgcagatcgcggcggacgccggcgagtttacgctggccgacgtggcgcgcgatatcgacgccaagctcatccgacgccatccgcatgtgtttggcgatgcagatgccgatagctccgacgaggtgctcaagatttgggatgaggtcaaacttgccgagaaggctgccaaggacaaggccgtggcagcaggcgaggctgcacccgagggcctgctcgacggcgtgcccacgcatctgccggcgctgatgcagacccagaaggtgtcgcgcaaggcggctgccgtgggctttgagtgggagacggtccaggatgtgtgggacgaggtcgccgaggagcgtgccgagtttgaggccgaggagcccggctcgcccgagcgcgagatggagtttggcgacctgctctttgccctggtcaacgttgcacgcaaagagggtatcgatgccgagagcgccctgcgcgcgagcacggccaagtttcgccgtcgctgggctgcgatggagcagatggcggccgatgcccatgttgatcttgccgagctttcgacccacggcctcaacgacctctgggatgctgccaaggcagaggagtaagactgcgggaacgacgggctgacatgccttgtcgttcctgctgatttttcgaaaaacaattgtatcccttggctaacttagggcataatgcaaaaagtgcgacatggctaacttacggaggcgcaccgatggtgcacggtcagccggtcgcttgcatccactacgtttccaagtgagagggagacaacatgagcgatattttggacgtctacggtcgcgaggtgctcgacagccgcggcaatcccaccgtcgaggtcgaggtcgtgctcgaggacggcagctttggccgcgcaatggtgccttcgggtgcttcgaccggcgcctttgaggcctgcgagctgcgcgacggcgacaagggccgctacctgggcaagg

SEQ ID NO: 1731 - DNA, 32759 bp, Unknown
  16S sequences of unknown bacteria
tgctcggagcggggcagcaggtacccgccgactgcattatgctggacgggacggcagagctgaacgaatcccttttgacgggcgaatcggtgccgatgaaaaaggaaaacggggacacgctttacgcgggatccttcgtggcgagcggacactgcgcggtgcgggtggacaaaatcggcgaggacacgtatatcagcaagctgaccgcacgcgccaaaaaatacaagcgcccgaattcggagatcatgaactccatcaatctcttcatcaaggcgatcggcgtcgtcatcgtcatcatcgccgtgctcatgttcccgaacaactttaaaaatctcggcggcagctgggcggacgttaaggaaaacggcggtttcttcgctctgctcttttccaataacgaaatcatgaacgaaacggtgcagaagacctgttcggtcatcatcggcatgatccccgcgggactgctgctcctgaccaccgtcgcgctctccgtgggaatgctgcgactggcaaaatacaacacgctcgtacaggatatgtattcgctggaaatgctcgcccgcgtcaacgtgctgtgcctcgacaagacgggcaccatcaccgacgggcgcatgaaagtgagcgactgtatgctgctgaataatcccacggaatactcggtggacgatattttaggctccatgctggcggctttaagcgacaacaaccagacctctatcgctctttacgagcgtttcggacattcctccgccttacaggcgaccgccgtcatgcccttttcgtccgcgagaaagctgtccgccgtcaccttcggggaagcgggcacattcgcgatgggcgcgcccgaattcgtgttgaagccgctgcccatccgcgtggaaaaaatcgtcaaacaatatgcgcagatgggattgcgggtgctggtgctggcacattccaccgcgcagattcagggggataagctgccgaccgccttccgccccatcgccattcttacgctctcggacaatatccgtcccgacgcggtggaaacgatcaaatggttccgcgaaaacgatgtcgccgtcaaggtgatttcgggggataaccccgtcaccgtatccgaagtggcgcgccgcgcgggaatcaaaaacgccgcgcagttcatttccctcgaagggttatccgacctcgaagtggaaaacgccgccaatcagtacaccgttttcgggcgggtgacgcccgagcagaaggcgattctgatccgttccatcaagaaagcgggcaacaccgtggcgatgacgggcgacggcgtcaacgacattctggcaatgaaggaatccgactgcgccgtttccgtggcgtcgggcagcgacgcggcgagggacgtttccaacctcgtcttgcaggacaacaatttcggctccatgccgaaaatcgtcaacgagggcaggcgggtcatcaataacatcaaggattccgcttctctctatatcatgaaaacgctgctgacgatgatcctggcgctcgtgtgtatcctgacgggaagcgtgtacttcttcaccaccaacaatatgctgatgtttgaaatactcatcagcgccatcccctccttctgtctgtccttacagccgaatacaaaccgcgtcaaggggaaatttattcccttcgtcgtcagcagggcgctgcccggcgcgctgaccatggcgtgcggcattctcgctctgtatatcatcaatcagacttccctcgcctatatcttcgaaatcaaaaacgaagcgggagaaacgataggaaacgtctacaacgccatgctgatgatcgccctgacctttacgggacttgtcatgctgcttagaatctgccagccgctgaatattttgagaacggtgctttgggtttctatggcggcgctatgcgtgacggtgctcgccgtgcccgtgctcggcaatatcgtttacgacgggtgggcggacgtccgttttaatctgacgcaaatcctcgtactcatcgtcatcattcaggcggcgattcccgtatccgcaatgttgattaagttcttcgatatgttcaatcccgccgacgaatagagttttcgaaaaagtttttaaacaaagccgttcgcaaaaatagcgaacggctttgttttattcttttttcaattccgaaaaaatagaaacggggatttcgtcatagcccaataacgagttcggcgtttcgtccagataaacgcaaatttccaaaagcgtttgaaaatcgggttcattgattccatttaaccatctgcttactgtcgcttgtgtggttttcaatttatcggcaagcgcttgttgagagatgtgattaacgattaataccttttttaagttttcaggaaattttaataaatccatttttcactcttgaagcgcataggtttcgagaaattctttatatttcttctgaaaaagtctttctatttccctttcgatttctcgggaattttttttctcttccgacattcttaccacagtttcttcacataaagttttaaattcgttactactttttatccgttcttcaatcaatatttttctatatttgcgaagctctttttcgtcatatcccaataattcattaggcgtttcgtctagatatgcccctatcaataagatcatttcgtaattcggtttcctatcccctcttaaataattactgattgcggtctgtgatatgtttaataattctgctagtttttgctgtgtatatcctttttcgctcataatttcctctaatctctttataaagcgcgttttctctttcatgattttatactcctttgaccgtatattttaattataccattttgaaagtataatcaattgttttattacaattgatataaaaatggttgacttcttctaaattttttgatacaataaatataacaattgttttaaggagaaaaacaaatgaaattatctgtttttgacgaactgctgcacaaatcttttgagtatcatttggacgaacctatccccgtttccgaaagcacacacgaggaatatgcggaggcagaggataaattattagaacaattttccaaaatgcaaaacgaactttttgaacgatatgattttgctcgtttcgccatagaagaagaaagaatagattaccgctttaaattaggctttcgctacggcttgttgcttgcaatagagtcctgttatctgacaattcccacccctgcggaaaccttggacgaactgagaagaaatgcccaaaaagtcgcaagggaacggcgccgcgaaaattctaaacgttccaaagactcctctgcgtccgatgcggcggaggagggagggcgggaaaccgacgtttcggcgccgtcggcttccgccgaaaaaactgcggacgaaaaataaaaaagcgcccgttttcccaaaaaggaaacaggcgctttgtagcgctttcttattcttcgccgtccgtaggttcggcttctccttcgacgacgatttcctcgtcgttttcgggggtatcgtccccctcgtcttcatcgagcgcttccgcgccttccgtaagctccgcgatatccacgtcctctaccgtttcttcgggcgccgccgtttccgcttcgtcgtcccgttccgctacgtccaccgtcgcaaccaggctgtccttgacgttcatcacgcggacgccgcgcgtcgcgcgccctatctgactgatcgaatccgcgtgcatacgaatgatcgttccgcccgtcgtgatgatcatgatgtcgttttcgtccgacaccagcttcatattgacgagatagcccgtcttttcgttgaacacgcccgccttgatgcccttgccgccgcggctttggatcctgtaatcctctaccgacgaacgcttgccgtagccgttcgaggtcagcgtgaaaatgtcgaattcgggattgaccaccagcatatccactagctcgtcgcccgcgctcagtttcatcgcgcgcacgcccgtcgccgttctgcccatcgaacgcacgtcgttttccgagaatcggatacacttgccctctctcgaagcgaccatcagctcgttgtcgcccgtcgtgaactggacggagatgacttcgtcgccctcgggcagacgaatggcgatttttccgtttttggggatgcggtcgtattccttcgtggtggtctttttgatgacgccctttttcgtggcgatgacgatatatccgcccgtatcttccgtcacgggcagcaccgactgtatcttttcgccctgatccagacgcacgatgttcaccaccgctcttccgcgcgaggtgcggttggcttcgggaatttcatagcccttgaccgagtacaccttgccgagcgacgagaacagcaggatgtcgtcgtgcgtagaggaaataaacattttctccacatagtcctcgtccttgggcttatgcgccgtaatacccatgccgccgcggttttgcgccttatactccgtcaccggcaggcgcttgatatatcccgaatgcgtcagggagatgacgacgtcctctttgtcgatgagatccgcgtcctcgatggagccgtaatccacggaaatttccgtgcggcggggagaaggatagcggtttttgatgtcgatgaggtcggcgcggataatcgccatcaccctttcctcgtgcgcgagaatatctttgaggtcggcgatcgtcgcttcgagagctgtcaattcgtctttgagtttatccacttcgagagaggtgagcctttgcagacgcatttccaaaattgcgttcgcctgcttttcgtccagctcgaaagcttccgtcaatttggcgatcgccgcgaacttatccgacgattccttgatgatcttaatcacctcgtcgatattcgcaagcgccaaaacgagtcccgaaacgatatgcgcgcgctcctccgtcttgttcagctcatacctggtacgccgcgtaatgacttccttctgatgcgcgaggtagtaagtgaaaatttccctgagattcagagtcctcggctccgtgccgttttccacgagcgccagcatgatgatgccgtcggaaatctgtaaattcgtgcgcttatagagagtattcaaaaccacctgcgcattggcgtccttcttgcactcgatgacgatgcgcataccgtcgcggtcggattcctcgcggatgtcggaaatgccttcgagtcgtttgtccttgaccatgtccgcgatggtcttgatgagcatcgccttattcacctgatagggaatctcggtgacgacgatgcgctgacgcacgttgccgcccgtgccgtattcctctatctcgcacttggaacggatgacgatcttgccctgtcccgtgcggtaggcgttgcggattccgctcctgcccatgatgatgccgcccgtgggaaaatcgggcgcggggatatactccatcagctcgtccaccgtgatctcgggattgtcgatcatcgccaccgcgccgtcgatgacttccgcgaggttatgcgggggaatattcgtcgccatgcccaccgcgatgccgtccgagccgttcaccaaaagattggggaagcgggcggggagcacggtaggctccgactcgttgccgtcgaagttcgggatgaaatccaccgtttccttgtcgaggtctttgagcatttccgaggcgagctttgtcagcctcgcctccgtataacgcatcgccgcggcggggtcgccgtcgacgctgccgaagttgccgtgaccgtccaccagcgggaaattgatggtaaagtcctgcgcaaggcgcaccagcgcgtcgtacaccgagctgtcgccgtgaggatggtatttaccgagcgtgtcgccgacgatacgggcgcacttgcggtaagatttgtcgttgtataagcccatttcgtgcatggagaataaaattcttctgtgcacgggtttgagtccgtcccgaacgtccgggatcgccctcgatttattgactgccatggcataggcgatgaacgaacgtttcaattcttcgtctacttccatatccaagaccttcgtcatggcgagggtctttttaaattcctcggtcaattcggggcttgtttcctttttagccattctttactccttaaatatctataaaacgtcggaaacgcttgacgcgctgccgctttttccgatccgtccgctcctgttttcgcagacggtcgccgcttcttttctctgcatggaaccctgcgggcgcggacagccgcgccgacgcgtttttcaaaacgcccttttgtgcgcgggcacgccgacaggcggcggagccgacgcgcgtcattaaggcgccttagcttaaatatccagatcggtgacgagggaagcgttctcctcgataaactttcttctcagctcgggattttcccccatcagcatggtgaacatggtatccgcctccgcggcatcctccatcgtcacgcgcaccagcgtgcgggtggagggattcatcgtggtttcccaaagctgttccttgctcatttcgccgaggcccttatagcgctgatattctatcttggaggtcgcctgcgcgtcgtaagcgactttttcctcctcggaatacagatagtcctctttgcccttgctgctcgccttatacaggggcggcagagccgagtatacgtgcccgtgctcgatgagagggcgcatgaaacggaagaggaaggtatacagcaggatgcggatatgcgcgccgtcgacgtcggcatcggtcatggaaatgatccgatcgtagcgaagcttgctctcgtcgaaatcgtccaagatgccgcagccgaacgccgtgatcatcgatttgatctcctcgttttcgaggacgcggttgagccgcaccttttcgacgttcagaatcttgccgcgcaggggcaggatcgcctgaaagcgcctatctctgccctgctttgccgtgccgcctgccgagtcgccctcgacgatataaatttcgcaaagttcgggacgcctgtccgaacagtcggcaagcttgccgggaagcgtcgtgctttcgagaatcccctttcttctggtcaactcgcgcgcgtttctcgccgcgtcgcgtgctttctgcgccgtgatacagcgcagcaccagttccctggcgaccgcgggattttcttcgaggaaagtgctcatgtgctcggtgacgcatttattgacgaacgcgcggatagagctgttgtttagtttatctttcgtctgcgattcgaactgcgcgttgacgagcttgacggacacgaccgccgtgatgccctcgcggacgtcctcgcccgtgagtttatcgctctccttcaagacgttcagctttctgcccgcgtcgttaatgactttggtgagagccattttcagtccctcgacgtgcgtgccgccgtctatcgtgttgacgttgttcgcatagctgtaaatgacctcgttataactctcgttgtactgaatcgctacttcgcagacggtgtcgccgtccgcttcctcgaaatatacgggctcggggaaaaggacctcgtcgcggtttttattcagttcctcgacgaaggagcggatgccgccctcgtaacagaaggaatccttcttttcctcgccgggacgcttgtcttcaagcgtgatgcgaagccccttattgagataggcgagctctctcaaacgccctttcagggaatcgaaactgaacgtggtggtttcaaaaatctcgtcgtcgggcataaaagtgaccttggtgcccgtgatgtcggtgtcgccgacgaccgacacggagcgctggggcacgccgcggttatacacctgtttatagacgcggccgttctgatagacctccgcttccagccattcggagagcgcgttgaccgccttgacgccgacgccgtgcagaccgctcgaaaccttatagcccgagtcgccgccgaacttgccgcccgcgttgaccttcgtgaacacgacttccagcgtggaaatgccttctttgggatggatgtccgtggggatgcctctgccgttgtcctgcacggtgcagcttccgtccgcgttcagccacacctcgatatgcgtacaatatcccgccagcgcctcgtcgatggaattgtccaccacttcgtgcacgagatggtgaagccccttcgcgtccgttgacgagatatacataccgggacgttttctgatgtgctccaagccgtccaaaacctggatttgctcggcgccgtattcgccctcaactttttccgtcattcttttaaactcctgttcgcgcgcctctccgaaagtcggaaccgcgcacgttattttttacctacttattataccatattggaagaaaaaagtacagcattttgccgtaattttttcaatctttattttaccaatcgcgtttttgggcgtttttttgcccgcaggcgcattttgtatgcgtccgcgataagtttatcaccccccgaggcaaaattgattctggggcttttaaacgtttcgtcgcatttttccccgaaagcgcgaaacgggattttttcgccccgacgccccgtaaaaaagtcgaaggattttgaaatcgatccaataaaaaataaagggcttagggaggatatttttaaacgcttcccattttaacgaaagccgaaaaacgcgggttaaattaaaataaacgcacttttttctgagccgttcaaagaagaatccctccctgtttatttgcttttatggccgcgggaaacagagggcaaaagacggcaaaagcgaagagtaatactttaaaaacgcgtttttttaaaagtctgcctgtaaatcccatttttgttccgttctccttttgccttgcccgagaatcagagattttctttcgttttttatgtttgttatgcctaaaacccgaaacattttcttttgccgccctgtttactattcctgaaaccggggaaattttcttccgcctttattttcgccctataaaattcgggaaattttgttccgttttcctgtttgttattcttgaaattcggcgggtatagctcccatacgatcacagcgccttttgggaaattttttgcaatccatcccccgcgcgtcggtgaaacaggtccccatactctctcctccctgtctgacgaacattcatctccgttttttccgatctgtatttgtgcctgcgcgctctgattccgttcgtctttcagtcgccccgcccgttgcttagaaaagttccccttgtcttgaatttgtcttcgaaagcgcggcagaaaaaacgtcgctatcgttccttcccaaggctcgaaagggaagaagaattttttaggagaatttcgggcatacttgtgaataaggagggaaaaaatgtctatcgattattcccctgccgccgcctgtcgcggctgcaaaaaatccgtcgacgcgaaaagcgcttatttctgccccacctgcggggactgtatttgcgcggactgcgcaaagaaaaacaacggcgtctgtcgccgctgtttttcgccgctggaaagattcagttgattctcccgggtcctcttccccgacctgtttttttcaattcgtccgatcttgtttttgcgcgcggaaagaatcgcaaaaaggaattagcaaagccgtcgcctccgatcgcaaaccgcaaagagaaaccgcctagcccgcgcgggcaaggcaaaacttcctatcccctatatagtcaaacgcggacgaaaatctctatcaggcacccatcccgcaaagacagcggcacacagaaaaagatacgaaaagcgcaaaggcccttggaatccacaaaaatcgcagcgaaagaaacgccgtcggtaccgcgcgcgcagtatccccgtcgtccgataagaggcgaaaagcaggcggttttccatacgcttctttatcgtaggcggaaagagctttccctatctcaaagagttcgaacagcgaagcgccgttttttcaccgtatacagatcaaaacgggacagggacgcaaacgggagatagaaaagcacgtcgccgcgctgaaaaacgccgcgactttcaaggggaggtacggccgcgctgtcccgcgccgccgaacaaaatcggcggacgtttttacctctgcatttcctttcggcgggcagcgaaattttcaaggcgcggtttcctcaaaaaacgctttcctgcaaaagcggaaattttctctcgagcgcgggaggcagcctccaaacggacgactaaaatgtcgggtatgtaaaaacgttttctttgaagcgaacgggagcagtcagttttgctccccgttttcttcgttttccccgtcgtccggatcggagcgcggcacaggcgtctgtatcgcagcggaagaaagggcttcgttttgcgtaggagtttccaccgcactcggctctttattgtccgccgcggcattctccgagggcgcctgtacgttcgatggaacgggcgcggaggacgaatagcgcgaaaaatattgaaaaggatcagacttgggagtttgcattcccgatgcttttgtacccccttccacatcttctaatctggcatcgcaatagaatgcggcagaacagatctgcactgcgggcatcacccacaacatgaggattccgaaagtcgctacgcaaagcaaaatccagccgatccagctcagttccagcctaaacaaccgccccttatttcccgtcatcacgctcatactttcctgacgcgcttcgtttacgcccatttcgggatgatccgcgagaatataaaaggaaagcgcgtactcgaaagtctttacgataccggggatgatcaaaaggaacgaccacagagcaatcagtatcgagttcgaaatgctgagtccgatagatttccaaaactttccgccttgaaagccaaaaagcaggtctttaaccgttactttttgcccgcgcgccgccgacaaagatatctttaccaagctaagttgaaggggcgccgtaacaaacaaggttgcaaaggcaagcaacgaacacagcatcgaataacctaataatattttcgaatcggacgtattatattcgaagggatattgataaggatcccactgtttatataaccgcgaaaaaattaaaatcaggatccctatgtatagcaattccatcactaacaaaaatagatacgataaaagacatacgccccaataattattgtgttcccgaatacgtttccagccgatacccctcagttccttagcacttttatacatttttccatacctcactgtaatatactaaactaattatagcatacgaaaaatggaatgtcaataccctttataaaaaaagcgttcccaaatcgggaacgtttttttcatacgccataccttaaactcgcgcgtctttaaaagagcgcttccacgctctttttggagtcaatcgcgccgcgagttcgagcgcctttcaaaaaggcattaaaactcttctccgagcaaggtgcgaagaagcacctgcgcgtaaattctgtgcatgaaatcgttgggatgattcgtattggaagaagtggtatcctggaatttttttcgcgcgagaatttccgtatgcgccgccgtgacgtccgcgacgcccacgccttcccacttttcttccgcctccgcaagaagcccgggataaacggcgtgataatttctcaaacaagtcccctgctgataccccactttctcgttgggcagcatactcgtcaccaccgcgatctccgcgtcggggcagcgggcgcggatatttttgacgatatttttaatgttggcgacaaacgtgcttccctccgtcaccaccccgtcgttcattccgaacgccaaaatcacgaggtcgggattttcgtcgcagacctttttataattggcgtactcctttgcccaggcgctcgtttctccgctcttggaaaggttgacgcgggaaatttccgagccgtatttgctttcgaggtagtccatggcgagatcgcaatagccgggacagcggggcgctctgtccacttccgcgagagcggtggatccccagccgtaagtgatgctgtcgccgtaatatacggctttgacgggctcgcctttggaaagtttttcgcggagaagggaaaagcgctcgcttttgttctcgggcacggacagggggcttttgcccgaatgggtgtacgtgacggccagacaccaagccgacattcccgcgctctctttcgtcgtttccgcgaccatgtaagcgcccgaagcctgcgaggagggaatctgcgtcttcaatccgtcgtccgtgtacgtttcgaaataatacttgtcgtaagcgagtacggggatgtttccttcctttaaaattttcagttccccttccgccgtcacctcgtaatcccttccctcctcgtacttcgtcgcaaggtcggcgctgcgcaccgatacgattttttctatcggatagagaagctttatcggctccgtttcccctttcggattctccatcacgaacgccgcttccgcatacgaaacccgccccttccaaacgggagaaacgtacttttgcagatcgaacgccgataaatcgtaagccgtcagatcctcggcagaggaatccgaagcaacggacgaggaggcgctctcctgcgaacttccctttccgtccgacaaatcggaagacgcaggcgagccgcacgccgcgagcggcgcgagcatcgtcattgccaaaataaaagccgccattgttttcattccttttttcttttcagttttcacaattttcctcccgttttttcctatgtcatttcgatatgggaaaacagccgcatttttattccctattccctcttacaaaagagcttttaaaaaggcaggcgccccgccgtcgggatttttgttttcccgctttttcccaaccgttcttctgcgccgtcatcgccgacgctttcgccgcctcgatttttcaagccgcccttttatgccctttcggatgggaattatccgcgccgtctttttaggacaagcaccaatcccgccgcggcggcgcaggcgaagggaagccctacgaaactgccgcagccgccgtcctccgacgaggaggcggaattttcttccgacgcgtattccacccgcacgacgtcgctcaaaagcgaccacttgcccgtttcggcgcgcaagatcacctccgcgtattctcccgcgtcccgataagcgtagagggcgccccgcgtttctgtccgcgttccgtcgtaactttccacgaatacgggcagcgtaaactcttcggacaaaaactcggattttttcacaggggcaagttccccgaaagtcaatttttcgggaagcgcgcccgccgccacggcgtcgttattcgtgatgccgtagacgccgtcccgtatcgccgtttccacgtccgtctttgtggaatacgtccaataggcgggcgggaatcccctgtccagcatagagcgcgtgagctggggcagcacgttgccgtaggacatatcgattcccactccgcgcgtgcaaaggtcggtgatcgtcttgccgatattctccttggtataattgagatcgagcgcccaaagatagggaatatgctctcggaccgccgaaagctgcgttctgtcaaaggagatgacgacgatattgtcctccatgccgtattcctctatcttgcgtttgaaaacggaaacaaaatcggaagcggaactcttgatctcgaagaaaatcaggatttccttatccctgcaataggagaacagttcgtctatcgtcggaatgtccgattcgctgcccgtcgtcatgttgccgagattgcggatgattttatactgccggatctcttcgagcgtcatcgaacgaatgttccccctgccgtttgtggtgcgggaaaggtctgcgtcgtgcatgatgacgatctgatcgtccttggtcaaatgcgcgtccacttcgaggtgggtggcgcccgcttcgcacgccgcccgaaagccctccatcgaattttcgttatacttgaacggatcgccgcggtgcgcgacgttgaggggagagcgggacagcgttccccctttgagtccgtccagctccgcatacgcctgcgcgatattcttcggatctccgtccgtcaccaagccgaaagcgccgctcgctatccccgccttgacgtcgaattcctccgccgattcgagctttacccagaccgttttcatgcgcgactgcaaaaagttcaccgtttccttatccgcctgcctttgcgacaacacgagcagcatcgcgcccgcttcgttcgcagcccgcgccgcctcggcggggcggaagggatccgcggaagaaaaatcgagcgccgcgcggaaatagggcatcgccgttttcgccgctttgataagctccgcgtcgggagagatcaccgccgcgtccgtgagcttttgatgcgacgcggcataggcggaaagcgcggcgagctgctcttccgaggacacgtaaaaattgggaatcgccccgccgtccaattcgtccagcgccgtttccagcggctctatcaccttgccgtcctttcccgtcgcgttgccctctccgtccagataataccacgcgtttaccgccgcgcgcgcgtcgttgtccgcggacacgtaatacaagcttcgcgcgctcgtcagttccgccgtcaccgtcggcgcggcgagaaggcgggaagaggaatagtccaccgtcttcgcaaactcgtaagtttccgcgttcgccgctgccctgccgccccgaaatcctatgaaagacccgttcagacaggagagggacgaagcgaagacgaacgccgccgtacatactgcggcgattatttttcgtaaaacgcgcccttcttttcccttcatgcttttccccttttaattttttccagcaaagcgaccgccgccgcgagaggtttgccgccgataaaaattttcgcttcgcccttttcgcaagcggcgcggccgttgccgtaaacggataccaggcgatacccctttgcggggaatacggcttcccgttccgtttcgccgtaggcgaatccatagcagaggagcctgttgccgtccccgctccttctcgccagccgcacgatccccttcgggtgccgcaaggaacgtatctcgtccgtatcgatgaggatcgtttctccgtctttgacgatctccttgatcgtccgataataatcgacgcccgccttgacgacggaaaacacctccggggaaacgtccgaaagcctgcccgaaagacagattctgcccagcatggctttgaccatcgtaaaatatacctcgtcgagagtatgcgtcggcaggacgctcgcccagatctgcatggtgcgcggctgcatgacgcggtgcaggtccgccgccaccaccgcgccgtccgcgttttcgtgcgcgtcggaaaaggataccatgctgccgagcgtcataaacagcggttcgtgccgcatcccgcccgaggaacatacttccatgacgagtcccttgacgcccgcgcggagtttttcaaagaactccaccaccttctccatctgccggcgcagcccttcgccgggactttccgcgccgtccgcgcccaagccgatattttcgttgtaatcgatctttatgtagttaagacagttttcgttgagcgtgtcgatgacccgcttcgtgagatagtcggtgacttccgcttttcggaaatcgagaaacatacgcccgccgtggtcgatgacgactccgtcttcctttaagagccaatcggtttttttagatacctcggaaagggcggtgacgccttcgaattcgtaccagacgccgcccgccgtaaagcccgcctcccggaatgcgtcggaaaattcttttagcccgcgcgggaatctttttttagatacttcccaatcccccagctgagaatcccagcagtcgcagaaccagcccgcgtcgatgacgaaatactccgcgcccaattcccgcgcgagcgcaagctgcggacggatattgtcgatggtagggtttccccagctgcaaaggtattcgttatagacgacgggcagagtttcctccgacggcgggaagcgatagcgggtttcctgatacttggtgagcgccgcgcacgcctcggtcagtcctccctccaccgccgtgaaaaaagccgaacgggtcttaaacttttcccccgttttcagcgttttgcgccagtggccgaagaggtagtccgcatggccgccgaacagcgtgatgccgccgtaacgatgcaccgcctccatctgccaggaatcgggcgcctctatccacgccgcccacgtgacgccgttcttttgatcctctatcgccgtaaagggcatatagccccgcgcgggcatggaccccaccgctccgatccgctgcacccgcacgccgagcgacgaccacgaatcctcgaaattgaatttggaaacgggcgtgctctcctttcgcccctcgcccgaccaattgctctgtaaacggtgcaaaatcaaagagtcggggtcgttttcctcctcgaagggagtgagggcagaaatcgcgaaggaagaagcgagttctatcgtcgtatccgcgccgcaattttccagttccattctcagctccgccgcccgatagccctttctctgggtgagaatatgcctgaccttcaagccgtcctcgttttcgagaagggtgacgatctcgcgcgtttcctccgtttcggagcacacctgatcgcacggccggaaagaaaaggaggtggagctgtcgtacatggtggcgcccgacgaaaaatcccgacggggagagttgcccgtgcgggcgatctgcaccatcggctctatctcgggatagggatgggaaggattgaattccttataaagcttggaaggctttactttgtccgaagtgccttcggggacgcaggtaaaggacattaccccgtcttttaccgtgtagatcgccgtcattccctctaagggacgataaataatctgttgttttgaaaaatccataactattctgccttttactgcctgattttattgaaaagcgggagaaccgccgtttttgcgaacggataaacataccaaaagaaaacttttcctgtacaaaggcgaaagcggggaacggaaaagcgtctttaatctccgagaagaatacttttcctatctttcgccgcaagggagaaacgggaaaaaaggactcccgtatccctccgcgaaaaccactttcaccgcgctttgaaaaattcggaaaaaagaaagtttccttttaaatttcccctccgctctcggaaacaactccctgtccccgagcctttttgcgccgaaattttcttagtcctctccgccgagggtattgattttgacgtatttttccgcgttccagtccgccctgaccacgaatttgagcatatactcgtcgtcgcgcgtttcctgcgtcagcgcaacgccgtttttcgagagattgtcgagataaaaagtcccgaagcgcgccgccgcgttttccaggttgacttccgcaagccgcaagaggtaccccaccgcgtacgaacaatgcacgtccttgatatagatttcgtcgatgagcttgccgctctgtttcagttcacagttgatcacggcgggagaataacaacgataaatttctatattttcaaaacggatatttttcaccgtattgtaatgatcccccagctgcaccgccagtgcgccgagcctctcgtcccaatccgattgcgcgaagcccaccgagcagtcgatgaacgtgacgtttttgacgtcgtgattggtttcccacaccacgccgtagccgagtcccttatccgtccagcaatcgttatcgcggaaggtgacgttgtccgtgtatccctgagaagaggtggacttcgtttccatcgcgtcgtcgcccgtgcgcacgaaacactttgtcaccaaagagtcgcggcagtcggaaagcatgatcccgtccgaataggtgcggtagccgaacagtaggcttcgggaaacgttgacgttttcgcaatcggtgaaacagagagtccaagtattggaattgacggacaagattccgtccacggcgatattttttgcgccgtggaaatcgaaagcgcccttttgaatggaatcgccgcccatacaggcggaaaaatcgaccgctccatgaccgtacaatttgacgttttgcgtgccgtttgtgcggaatacgggagaatatttcccctctccgtccgcgtacgcttcgagataggcgcccgcttccaaatacacccaggcgtccgaaggaatggaaacggagtcgacgagatgcctgcccttttcgaaataatatacggtgtcggcgtttttaaacgtcgtttctgccatggtatgcttctttgcggacagacgctccaccgtccagccctcgggcgcggaaaattcttccgcctccgccagatacagcgtcagcgcttcctccccttttttattgaacgcaaaggtgaagctgccgaaatcggaaatgcgcgccgtcaccgtatcgcccgaaatttccgcttccacgcccctcttttggggcagcaccgccacggacggcttcgatttggaaagcgccgtacaggaaagccgcgccgtcagcctgacctccacctcgaaatccttggttttatccgttttggaaatgtccgcataagcgaaggaatggacgctcttggcgcatctcgtcgcatacacgggtacctcttttccgcccaccgtcagcgtataatacgggcttacgatcattccgttttgcaagggagcgtcgtgactgaccgcgccgtccgtgacttccgccgcatacgcgtcgacgtcggaaatttccgaaacgccaaactccacgcccgccacctcgcagttgactttttgcccgcccggcgaaggagagctgtccggcgaaagcgaagcgcctccgccgccgcaagccgaggcgcaaagcagaaagccgcctaaaagcagggtgcagatctttatatttctcattttttctctccttatggatgcggggacaaagttcaaaacgcccgcgttttctcccctgcgcgatcggatttggattcccgaaaaacgagggcttccaaaaagcgtttttctcccctcccgaaaattttaacgccgtcggagaaagcgccgaactgtccgattggcaagagaatgctttttctctcgtcaaaagccgccccttcataaaaaactcttttttccgaaaaagcgcggggagcgtttcggaaaatcttaaaaagcgactactcctccccggacaacttgttcactttgatgctggaacgggcgaagcgcgcgccgttgtcgagcgcgatattcgtgtactcctcgtaattgtccgccgcgatctccgcgcccgcatagcggatattgtcgagatagagcgcccctatcgtgctgttttgccaagtggcgccctctttcaggcggatcaccacgctgaggcaatagacgggaagattggtctgaaccgcgtattttgccgtaatattctcgaaataaatatccttgatcttgccgccctccctttcgttgttggcgcggttgaatacgctcaaaagggcgcaggaggtcttgtatacctccatattctcaaagtggatatcctcccatgtggaagtctttaccgatcccatctgcacagtgcagcagccgagatgctcgctccaagaagcctgtgcgaagccgatggaattattgcggaaaatcacgttttttatgtcgtgtttggattcgtagatacagccgtacccgatgcccttatccgtccagacgcagttattttcaaagagcaccccgtccgtgtagcaatcggggtcggtggaatcggtgaacgcctttacttccatcgcatcgtcgcccgtgcgcacaaagcaatcccgcgcgcgggagtccttgcagtcggaaaacatcactccgtccgaatacgtcctgtacgaaaagaacatacagcgggaaacttccacgttcttcgaattatggaagcacatcgtccaattattggaattgacgctgacaagcccctctatttccaagccgtccgcttgggaaaagctgtatacgcccttcgtcttactgtccccgcccatacaggcggaaaaatcgagcagcgccctgcccagaatcttcacgttctgcacgcccgaagcggaaaccgccgcaaaataatcgtttgcgccctgttcgtaaatgcgcagcgacgtgcccctctcaaaatagaggatgctgtccgatggcagggaaatgctcgtgacgtcgtacgcgccttccttaaaataatagagggtgtttccttccgtaaaagtcgtttcctcccgcgcgtatttccgaggctcaaagactttcgtctgccatcccgacggcgcggcgatctctgccttgggtgccacatatagagtgagcgcctgttctgcttcttcgtcgaaagcgaaggaatagctcccgtaatccactattttagcacggacgacgccgtccgcgagcgaggcttccacctcggctttttcgggcaggacgacgacgctttccttttctcccgcgagcagttcgagctgtacgtcgagagagaacgccccgtccgtttccacgtccacccaggcaaacgagtgaacgttatagccgcagcgcgccgaatatacggggacttcctttccgtcgacgagcaaagaatgccacacgccgtccacaaagccgtaggcgagggggccgtcgttgctggcgccgctgccgagcctggtttcggcgtaaaacgcctccatatccgcctgtttattcacttccgcatattccaagggataaacgttgcagtagctcgcttcgccgtccgacgaggaagaggaagaggagccgtcagccgaggagctttgctccttggaggaagcgtccgtcgacgtatcggaaggcgatccgccgcaggcggaagaaaacacaaacagcaggcaaagcgccgcgcaaagggaaattttcgtctttttcatatacactccttactcctcgtccgtccgcgtgttgatatgaaggtacttttccatattgtagccgcccgtcaccttatccgagatgtagccgttttcgagataattgtcctctgtgagcagcacgccgttggaaaggatattgtcgagatacagatcgtaaataaagcaattttcgctgtcgtacgtgcgcacgttgaggaaagcgccatagttccgcgcggcggtaatatttttgaaataaatatttttaacgatgccgtatccctcgcccctgccgccgctgccgccgatgtagacgttgagcagaccgtcgttgtgcgacatataaacctcgatattttcgaagctgatattctccatcacggcgccctttctattccccatctgaatgacgcagcagcccagatggttgctccacgtgcccagcgcaaagccgacggaacagttttcaaagcgcacgttgcgggtgtcgtgattggactcgtaaatgcacccgtaagcgaccgctttatccgtccacgccgcgttgttgcggaagagcacgttgtccgtaagcccctgcgccgtcgtggatttcgtttcaaacgcgtcgtcccccgtgcggataaagctgtcttcgacgacggcgtttttgcaatcggaaagcatgatgccgtccgcatatacccggtacgcgaaaaacaggcagtttttgacggagatgccctcgcagtcgttgaaacacagcgtccaggtctgggaattgatcaccgtgattccgctgaacgaaacgttatccacctgagtgaagatcagcccgcccttattgttatagtatccctcgggcacctcgccgccgcagcaggcggaaaaatcgagcagccccctgcccgccactttgacgttctcgcccgcgcccgccgtcatcgcagacgacgaaccgccgccttcgggcggcatcacttcgatatacgcgccgcgttctaagtagagcacgcagtcggagggaagggagattttgtccgtcttataacgccccgccttgaaataatagaccttttcccgctgcgtaaacgccgtcgcggatttcgtatccgcggacgaataatcgccgggctgtaaatattcgatctcatagttcccgaacagcgcctgcgtatcctccttttccgtcacgaacaccgtcagcgcttcctcgggctttttattgaaggcaaaggaataactgccgaactctttgatgacggacgtgacctttttatcctccaatcgcgcggaaacgccgctgctttcgggcagcacgacgacgctcggttttttgacggagagcacggtgctgtcggagagaagcgtcacctccgcgttcagcgcgaaatccttggctttatccgacacttccacgtcgatataggcgaaggaatgaatgccgttggcacttctcgccgcatacacgggtacctcctcgccgttgatggtcatcgtatagtaaggactgtaaacgacgccgttgcgggtggggagattcgtgctcacctcccccgcgtaggcggatatatccgaaagactctctattccctcgtattcggtgggataaatgcggcagttgggttccacgcgttcctcggacgagggcaaagcgctttgggaataggacgaatcctcctctttgccgccgcaggcggcgcccgcgcacgcgagcgcgaaacaaagagtcaggcaggcggttttgaatattctgttcattcgcgtttttcctcctcgaaattaaagcttcactccttgacggagccgatcatgacgcccttgacgaaatatttttgtaagaagggatagatcaaaaggataggggtgatggacacgacgatcatcgccgcgttctgtccctgagaaaacaatttggtgccgtccagcccgatgttggggtccaagatcggaagagcgtcgtgtttcgcccgccatattgttgaggacgtttctcaattccagcgccagcggatataaattgtccgcggtgggcaggaaaaaggagggccagtaccaatcgtcccatttgccgacgagataccaaagcgccaccgtcgcaagccccgccttggaaaggggaatcacgaactgaaagagcactctgaactcgctggcgccttccatacggcaggactccaaaagactttccggcacctgcgaaaagaagttgcgcaggatgatcatattgaacgtgttgatgccgaagggaaggacaagacaccagaggttgttcagccccatcatcgacttcaccgccaaataaaacggaatgatgccgcccgagaagaacatcgtgatgagaatgacggtaaagcagattttcagtcccgggatgttcttgcgcgtgaaagcataggcgccgagggaagtgagcagcatagaatacaaggtgccgcccaccgtgatgatcgcggaaatcccgaacgcacggggaacacgtccctgaccgaagatatacttatacgcttcgacgttgaaatcccacgggatcaccatgagattggcgttgagataatccgctttggatgcgaaggacaacaacagaacgtatgccacgggaaaaatacagatcagcccgaacagcgtcaaaagcgaatagttgatgacgtcgaaaaccgtgaccttcgatttaaatttttctttgtgctgctccgcgggagcgtccgacggtatccgagttttttcttccatagtattcatggcgctcctcctttaatccagcgaatacatactgtatccgtttattttcttagtcaacaaattgccgccgaacagaagtacgaaattgatgacgtttttgaaaagccccaccgccgtggcaaattcgtaagagggattttttccctgactcttggaatacaccagcgtgtcgatgatctccgaaacgtcgagaatcgttttattatagaggttatacacagagtcgaatcccgcgttcatgatattgcccagctgcaagatgaacatgacggtgatgatgggcagaagactggggaaagtgatgtagcgcatatgcccgaaccgcttgcatccgtctatcgtcgccgcctcgtacaggcagggatcaatccccgaaatggcggctatgtagatgaccgtaccccaccccatgcccttccacaattcggtgaggatgaggatcggataaaaataagaggaattttgcaggaaagccaccctgtcttttcccatgcccgcaaggatgttattgaaaagcccgtcgtccacggcaaggagctgcttgacgatgccgccgatgaccacccaggagatgaaataaggcagatacaccatccattgcagcgttttgcggtatctttgactgtgcacctcgttgagaagaatcgccagaaaaataggcgcggggaaacaaaacacaagtttcaaaagactgatgacgatcgtgtttttcagcgcccggaacatactcggccgggtaaaaaactgttcaaaatatttccagccgacgcccggactgccccagatgccctgtttggggagatattccttccaggcgagcacgatgccgttcatgggtacgtaactgaacaaaatataaaagaccatcacggggagaagcatcagataaatctgccagccccgtttcatgcgcccccatatttttttagcgcgtccgcccgttcgattcggcgcggaggcaatcttcgtcgaagcccgacgcgtcaggcttcccgcattctctttttctgccatgtcttcctcctttttccttttgccgccttttttcctattcgtccgccagcgtattgatctttacgtttctctttttcgaccaggacgcattggcgttctccacagcgattatctcggaattgtcgatatcttcctcttcaaggcgcctgccgttatacaaaatcttgtcgagatacaccgttcccagcttacagcccgagcctacgtaaatgcgcacggggaagccgtaacacctcttggaaacgatattcgaaaaatagagattcttcgcctgaccgccctgtatgccgttgccctccggatcgcgcagggtgatattgacgagcgcgcagtcgttcttatacacctcgatattttcgaaaaagatattttcccacaccgcgtttttgttgttgcccatctgcaccacacagacgccgagcatgggcgaccaggtgggctgcgcaaaaccgaccgaacagttcctgaatcgcacgtttttcatgccgttgctgcattcgtaaatggcgccgtaagcgttggctttgtccgtccacaccgcgttgtcttcgtaaaggatcgtatccgtaccaaaagcgcccgtcgacttggtttccaccgcgtcgtcgcccgtgcgcaggaaacaatgtttcgcgccgctgttcctgcaatccgagagcatgatcccgtccgaaaaagtgcgatagccgagcagcatacaacgggagatgtcgacgttttcgctgtccgtaaaacagagcgaccaattattggaattgatggaaacgacgcctgaaaattccgcgttcgtcacccgcgaaaaggaaaagactcctttcaccttggaatctcccccctgaacggcggaaaaatcgaaaagtccccgccccgcgatcctgatattctgcgtgcccgcgctcctcaacgccccgtaatagtcccctttcccgtccgcatacacctccatataggcgccgcgttcaaaccacacgacgctgtccgagggcacggaaatcgaagtgatctcatacctgcccgcctcgaatacgtatgccgtccgggaatcggaaaaggtggtttcctcccgcgtgtaccgcccgggggaaaagcgctcgattttccagtcctcgggaacattcagctcttcctcgggcgcgacgtacagcgtgagagctccttcgggtttcctgtcgaagacgaaggaaaaactgccgtacgcctctattgtcgcgcggacggtcttttccgacaactccgccgcgacgcccgcgctttcggggagaacgacgacggacttatatgcgctttgcacggtcaggaaaacttcgagaagaggagtttcttccgattttgccgcgtctatccaggcaaaggaatgaacgcctaagccgcagcgggtcgcatacacgggcacttctatctcgttgactttcagggaaaaccagggagaggaaacgatgccgttttccacgggatcgtcgttgttgacgccgtctttcctcacctgcgcggcgtaggcgtccatatcggaaagggaggccacgccctcgtaagagatgggagccacctcggaaagaggcttcgccgcgctttccgaagaaaacgaaacgccgtccgaattttccgatccgggcgtatcgccgcaggcggctgccgaaagaaagacaaaaaacagaccgatccccaatgccgcccgacgcagtatctttttcatccttttcactccctcaacttcttttttcttccggcggaaagtttttcgccggaagaaaaatcgtgcgctttgttactttctctttcttaaagcgatcgccgccgcgacgccgaggagcgccacgcccgcggagatgcccaccacgctgccgcagccgcttctttccgaatttccgcccgacccgcccgaggacgttccgctgtcagaatcggaagttacgggcgtattgcccgcttcgtatttggcatagagggaaagatccgcgggattttcgtaatcgagcgccgtaaacgccttggtgagagccgcgtccgtataccagcccacgaacgtatacccctccttatcaaagcttttcagtttttcgctgccctgatagctgtatttgctcgttccgagctgctccgtcccgtcgtaataggtgacggtgaatttctttgcggaagcctcgatgaccacctgcgcgccgcccgaaacggaaacgtaatagttgccctcttcgtcttcgggatcccattccatgtccatgctggaaacgccgtctatctcgctgtattcccccagcgtcgccactttgaaagtgagcgcgtgcaattcgtcgtcgatgggagtgcccggcgtataggcgttgccgtccagcttgatctgggaaacgcgcaccagcttatcgtcgtattcgaagcggatggtatagccgtaatccgcttccagcatcaactgatccacattggcgtaagcggactgaatatatcccttgattttggtttcggacacgacgtaccaggcgatcttcgtggaaagttccgcgcccgtggagagggtgattttcgtcttttgaggaaggacctcgctcatgatcacgtccacggtattgacgtccgtcgccaagaggtcgagctgagaggtatccaccgattcgactgcggtgatatatcgagtcccgctctccgaggtcgcttcttcgcccgcgtacagtttctcgacgttagccgcggagagggcgctgtcatacacccggcattccttgatgtccaccgtcgcgtaacaggtcgccgcgatgcccgtgatctggcactgcgcgccgagcgtgaaagcgtacggatccgaacgccaggagaaaaacgtgtccgacatcctgatcggctccgccacggcttcgccgttgacgtatacgatggcttcgttcttgaccgaatcggtgctcaccgtcaccgtcgtccaatccgtggtgtcgcaggtatattcaaaggtatttgcctccatccaggcctgcttttcgtccagcgaatttcccggcgccatatctatattgttgacctgaatctctatgcagcccttccagggcgtaatctgaaaagcgtcgttatatctgccgaccgcaagcatataatgatcgccctgccacttggagttgtcgcggcggaaggtgatggaaacggtgtaggagtcctctatgaggtcggaaaaatccttgcccgagtttcccagctgcggggcgtacagacaggcgccgcgcttgccgcccttgtcttccgcgtcgcggtcgctgacgagggaaagatagttttccccgtcggtgtcctgtttgattttgagcgcttcctctttgtttgcggaagtgttgagcgtctttaaatggaactcgttgcccgaagtatcttttccgggaagggaggcgtcgtcaaattcgtaaagcgccatgggtttgatgatcttcgtttcctccgcggaagcggaaaaggaggcgggaacaaccgccagacttcccgcggcgagcgcgagcgtaagcccaagaccgattaatttcttcatgctttcattctccttatctttctatttggatttttaaagcggcgggaaaattcagtttttccctgtacccgctttgacggcatgaccgccgtcgatgtagctgttgtattcctctatcatctcgtcgccgctgtacgattccttataattcctgacaaacgaattccatttgctttggaaggctttggaaacgatatagagatcgtcccagccgaacgtcaaagcgttgtacgtccaatcggcgggattccagaacatatttttctgattgctttccaaaacggagatggtttcttcgaacaggctatggcactcggtgagatactcgatgcccgcctccgtttgaagatcgggatagtcggagaaataggaatgcgcttcggagcgctcctgacgggcgcagatgatctccgcgttagtgcaggtagtcaccttataatgcatcgtccaatcgacgagcgcatagagcatcgtggcggtatccacgctgacgatggtcttatagaagccgtccttatccttttcgagaagggaggtctttttccccgccgcgtccttttcgtaatgtacgccttccacgccgtattgaagcagctcgtatccctcgtcgctcaaaagataatcatagagttcgaggcacttgcggatgcgggaattgctgttgttggcgttgatgcagaagccctgccaatatcccgcttcccccgcgccgttccaggtgccgtttttgcccgcgggaggatcgcacatggcgacttttgccgtcgcgtcttcgagagagcatttgtccaccgccatgatccccgaaacaaaattattcagccaattgtgcgcatagatcatgcctgccttgccctgcacgaatctgtcctgcttggtgccattgtccgccgtcagggagtcctgggacatatatccgtccgcgatcaggcgggtgatgaacgccgtggcgtacatggagccttcggtgatgtcgctgtgcgtgtattttcccgtcgctttgtcctcgacaaactgattccagcccgtatcgaacgccatatagatccacgcgtccatgtcctgattggattcggacatatagccgaacgtatcgtccgcgccgttgttatcggggtcgtacaaagtgaacgcgcgggcgaggcgataaaagtcgagcagagtttcgggagttttgaactgccactgcgcgcgcttttccgccgtcagctccccttcggaagagatcacgccttcgaggatgagcacgtccgcgagtttattgttgagattgtctatccaatcctggcgcacgtacagggatttctcattgtgccaggaagaggggataaaccacgtcttgccccgcgcataggaaacattggaacgcatataatcgaactcctgcatatgtttgtagatgttcggatagtgttcctcggaaacccaatcggaaatggagatgatatcctcgtttttgatgagcttgtcgaaaaattcgggcgcattgggaccttccgttaggaagatgtcgggcaagtcgttgtccgattgcagcagcgccagctgattctgccaattggcgcccgaactgttcagcgcctcgatgtcgcagccgatctgttctttcagcttttgatacacgggcgaattcgcctggcgtgcgttgttgaaggccgcccaatcgtttttaaagacggtgatggacttgacttcctcgtcgtcgatttccgaataggcgccgccgcccgaatccgagttgttatttccccagctcgtttcggaatcgcgcggagcgcacgcggcgaccgtcagcgcggctaccccgcacagccccaaagccagcattcttttcaaaaattgcatatgataacctccgttgttttcaatttccaaagccgccgccctttcctgcggcaaactcctctttacaaatttatccgtctgcgccgcgggaaacgtccccgggaggcgaacgcagacggaagtatttttctcgctcgcacggaccgcccttaccgtttccgcccgcaagccgcgctctttcacgcgccgttttttcgctttatcagtcgttctttctctttttgagaaggagcgccgccgctgcgccgagaagcgccaagcccgcggaaattcccaccgtactgccgcagcccgaacttacttgggaagagccgcttgttcccgacgaggagccgtcctgcgtggaggaatctttctcggaagaagaagaggaggaagattcgggaggggtcaccgcgcccgctttaaaggtcgccttcacctccgtgtccccgctgacgacgaagctgtaaacgccgtctttcgcagtgatcgccgtgccgttgactttgacggtatccacttcgtagccgtcctcgggagagagggtgagcgtcaccgtttcgcccgctttcgcggctgttttgtccgcgctgacggagccgtgtccgccttccgtcgaacaggtgatcgcgtgcgtgatctccgtaaatttgacctcgatttccgcatctccgtccacgacgaagctgtaaacgccgtctttcgcctcgattgccgtgccgttgactttgacctccgctttatatccttcctcgggagtcgtcgtcacgacgacggtttcgcccgcctttgcggacgccttatccgcgctcgccgtaccgtgggaacccgtcacgaaacagtccaccgaatacaccgcttccgtaaacgtcgccgtcaccgtcatatttcccgtaattttaaaggtgtattttccctcgttgcgggtgatttcttccccgttgacgaacactttggaaaggacgtaatgagcgttcggagtcgccgtcacctcgatcacggtgtcgtatattcccttgcccgcgctgaacgtcagcgtgccgttttccactccttcgccgacggacacggtgtactccacggctttgaacgtcgcgtttatctccacgtcgccgtccgcaagcgtcaccgaatatttaccgtccgcgcctgcggagattgccgtaccgttgaccgtgacggcgtccgtttcgaaatgggaagaaggggtaagcgtaatttcaatgacgtcgcccgtcacgccgtatcccttagaaactttgactctgccgttttcgattcccgaagccaccgtcaccgagaaggcggggagcatttccacggtctgcgtcacgttcgtcctatccgtaagcacggaaggaatgccgagtcctatatcctgcacgtgtccgtaggcagtccatacatcgccgtccgccgctttttctatctttgtccagacgacgggaacgtccgttttcgattcgtcggacatcgtgccctttaccgacgcgctgcccatacaggcgagcatctgcgcctgcgtcattttatcgtaaaggggagccgtgagaactttatcctctgtaaacgccatggtggaagcgtccacgctttccagccaggtctgattgacaaggctgttcgtcttgattttctgcgtttcacccagcgtcttcacctgcgccgccgtgagggcgaaatcgtagaaggaaacgttctttatatttcccgtgaacgcctgatagagatttccccagacggactcgccgccgatggaaaagcgcatattgccgtctttcagattgaaggtttcgggcacgtcgtaagaatacttgctcgccgcgccgtccagatagacgatcatttttccgccctgctgcaccgtgagcgccactttatgataagccgtgccgacgttgccgatctccacgccccagaacgcgttgtcgtgtccgtcgatatcgctgacgggtcccgcgcctttatccacgaccgaacccgccgaggaaaatctcaacaggtcgcttccgcccgaaaattggaaggtagcccacttggtggcggtccaatcgttccatccgaaactgatgggagatacccagcccgacggcttattttccatctgcacttcgaagaagagagtgaacgaggtgagattttcggaaatgtcggaagcgttattttccgggatcagtcccgccgtgccgttgaaagtagcgacgccgttattcaccgccaccgtaccgtttttcttcccgtccgcgtcgcgaacgaccaggtcgaaattgcccatggagtcctttccgggattcgccgcgtccttgaattcgtacctggcgagcggggtgatctccgtcgccgcggtgacgccgattttcgcatacgcctttacgttatcgggattatagatgcctttgagggtgccttccagatagatgccgtcctctttcgtaacgacgttgtcccaataggcgaacgcgaaacgggaactttcatcgttcatggtcgcagggactatcgtataggcgggagccgtctttaaaatctcgtcgttagaggcgccttccgccacgatgacggaggaggaaagatctttgcccgcggcggtcgctttggtaagctctgtgctcgtcagctgaccgtccgcccagtaagacgcgacttccgccgccgtcatggaaaagtcgtaaatgctgacgtttttaagattgccgctgaacgcctgatagatatttccccaagcgcattcgccgcccaaggaaaagcgcatcgtggcgtctttcaggtcgaaatcggcaggcaaatcgtgagaatatttgacagttgcgtcataatagac

SEQ ID NO: 1732 - DNA, 1666 bp, Unknown
  16S sequences of unknown bacteria
gatatgtcagatcatcgatgctgtacagccacatcttgttcatgtgcagctccttcaggttcttcaaggtgcccaggatgctgatggggaaagggccgttctcgatcccgatatgcagcacgcgcagcttcttggtatgctcgagatagatgatgttgtccaccttgctgcgctccaggttgagctcttccaggtcgatcatgcccgccaccgcggaaatgtccatcgtatacagattattgcgggaaatgtccagcttcttcagctggcggtagccatgcagcgcctgcagatcgcgcaggcggttcttggacacgttcagccgctcgatgttgcgcagatcccggatcggatcgaggatctcgatgctgttgccgcacagatccagatactccaggttctcggcatgctgcaggccctccagcgatgtgatgccggcatagcgggccgaaagccctttcagttcgagcagcttttcttccgtgatctcttcttcgctgatgtgaagcgtacgggcaatgacatcgcgaagcatatcatcctgaattacgatcataacaaaacctcccacgttttttctttttctatcctattatactctattttccctgaatcgaaaatgaaaagcgcaaaaacatctttcttccagcatggaccataggactttctgcactttctctcattatttcattgacaattatgcgcgcatccgatatcatgagggtgaacataagcaactttaagtataatttcatgcgttttacctggaaatcattatttcgagttgagtgtttgatgtccgggaagcagggcgcatgatttttttatttatgattacttatttcaaagtctaaggaggtatgacaaatgacaggaaaagtaaaatggttcaacgcagaaaagggctatggattcatcacttccgatgaaggaaaagacatcttcgtccactacagcgcgattcaggcagatggcttccgctctctggaagaaggacagaaagtgtcttttgagatcgtagaaagcgaccgcggacagcaggccgcaaacgtcgtcgttacggactgatgagacagacgcgccgaaaagcgcgtcctttttttgatgaggagatgatcagatgaatcaggcagaagcactgaaagaagacatcatcagccggctgtgcgccatccgtatccccgccctgcgcgccgaggcgctctctcatacgctgggcgtctgtcagagcatggccctgcttgccgccgcacgtgatctggatcctgtgctgtgcatgagcatggggctcctccatgactgcgccctgtatctgcaaaactgcggccatcccggacatgcgcgcaagagcgccctgctggcagaggcgatcctgcaggaacacggcttcgcttcggccgacatcgagcgcatctgtacggcgatcagccatcattctgacaagggacagcgtcatgacccttacagcgaagcgctcaaggacgccgatgtgctggcgcgatggctcaccgcacgcgatgcgccgctgagcgatgcgcgcaggatgcgcatgatcgccatgtgcaaagagctgcagctgcagccataaaaaagatcccgagaggtgagtgataaagtggtacccgtaaggaggacagcaccttgacagtgctggcgcctttcaggt

SEQ ID NO: 1733 - DNA, 15378 bp, Unknown
  16S sequences of unknown bacteria
tttaacgtttacacaaaacttgaaacggtctcgggcttaaagatgtaacagattttcttgcaaaatttattccgtaattctttggtcgctggtatatatcgtatcttccgaaacaaccagcgaccaaattccatcctcaaatgtcaaatttatttcttttccactttgggatatgtttcttccattcacctcaaaaattcctttatccacatcaatatgtattgaatgaaacttttgtagtatcgccatctctctcctcctactcaattttttctttcatcacgggttcatcttccgaatctctatcaggttcgtatgaaaaaatatcgccaatatcacattcatcaaacacttctcttgaagtgaaataagaagctgtttcctgctctcctttttcattcacgtccaaagaacgtatatcaatcctccatctatctggataatcaaaaaccattggcattacagtcgtgtatgatgttttcccgtctgaatgaacaatcggcacatacattaccgttgtttctctcggaagaaactcttttccataaatttcaccttctgtcagctcgttgccacatccagtcagaagcaatgctgaaacaaataacaacacaatccttttcttcactttcctcaccccctactccttctgttcctctgtggcgaaaagatattccagcgaacagtccaaatttaccgtatttttatccatttgccttttcctttcttccaatgatataattcctatacaggctcccgtcagagccgagtacaagagaaaggagaaaaacgatatgcaatacgaatctcttaaatatccttccatcactttcaatggtgttccgacgtctgataaacatggcaactatattgcatgttctttaaatttcgccaatcctaaatgggtaggtactttttttaaggatgaaaacaataccactttgttatttaaagagctaaattatgaaaaagattctaatggacatgtaatttcatgcaaatactattattaatgtatatcccgtacagaatttttctccgatgtctgtgcgggataattattttgcgggatcagattgcaaacatctacaatcacttctgctatggattctgtgctttctggtgtcagatttttttcaagattcacaagcttcgccttgtctcttccatcacctgttttcaatactactcgaacaggagtctttgttttttcaccatttaccagtaaaatgcctttttcataatcaagaaaaatattttctgtctccatatgctctctcctttctcttattctaatgtcactttatgtgacatcttcagtaaaaaaaattttttgtacagttgtcttataataattggcaagcgcaatcttagtagagtctctcggaatgcgctgttccgtctcatacattcctagtgttgatgtcgcaattccaacagcttttgcaacttccgcctgacttctgtttcctcttaattcaatcaaccgctttccgtatggaaccaatttcatcacctcctatgttttgtcactatctgtgactgcacttagtatagcacctacttgttatgctgtcaatcacattttgtgacatttatatatttacttttatcacgctatgtgataccatcagttcataaggaggaacactatgggagattttcaaaatatatttaaacgactcagaagctcatgcggacttacgcaagccgaaatggcagaaaagctcggaatatcaagaagtacaatcggtatgtatgaaaccggtgcaagagaaccagattttgaaacacttgaaaaaatagctgatttctttaatgtagatattgattatttattgggcagaacagataaaacaaccattcttccagaaacagtcgggcattactatatagacaacgaagctagagaagctgctgaatttctttttacaaatccggagtacaaagttctcttcgatgcatcccggaaggtaaaaaaagaagacatccaatttataaaagaaatgatcgaccgcttaagcggcaataaagattcctgatcggagatctatacacatgaacgattctatttttgtacgcatggctgacatgccatgtaccataaaatcatatgtcgtgtcaaatagtgatctgacttttacgattgtcatcaactcccgacagtgccatgagcagcaggtacgagcctaccagcatgagctggcacatatactgaatggggattatgataaaaagtgttctgcagatattattgaactatcaatgcaccaacgataaatttgtgaaggagaattttatgggattattcgatttcttaaaaccacaggcagcttctaattattctaacgctgaaaatgaaaattttcgtgctatagcatctcggttcagaggttctaaagaagacactgtatttgtaacaacttcaagattctgccccatttgttccacatataatcgcagagtgtattcattatttggccgatataaggcattccctgtactacctgattttttgaaacaagctatctgtcctgaatgtggtgtacatattggatatagccattattttcctggtataaatggaaatttacaaactgacattaaattcagtaatcgaccctttacggatttcagatctacaacagaaaagaaatcttggaatgaacgtattcaaaaacaaaaactagatgagaaaattaacgctgattttaattggatttgttctaacctatcagatatagcacccaaatctattggtgggtataagcgtatgattaatgctaattcttccaattatcagaaattagtatctgcagcgaaagaaaaaggatatataatataaccatcccgcccctgctccctgcaggggcgagcaataaaaacataatatgcttaaccgggcagccggaggacgtgctgcaccccgttccgagcctgtcggaggtggtgccatatgagtacatatgaggaattacaactcatcgtatccattgcgatgttaattgttgcgatactgacttatacccataaaaaatagccgtcctgactttggcgagacagacgactattttttataacttgtaaaattgtttcgccgggacgggtagcctgcacctaccttccggctgtcctgttaagtatattatagcaaatactttaaaaatgtcaaacataaaaccggcccgatgcgccaacaccggaccggctgcatatccgaggatatacacttgtgacctcgacaatcacaaaaaatattgtatcatcctcggacagctatcgcaagcggaactcctgttccccgctggctgttatttttataccctttttgcgattttgcgacgtcgcaaatcatacactgtactggaggatgatattatgtacgaagatctatcttatacttacggatccggcacttatgccatctacttgcggaagtcccggaaggatctggatgcggaagccatgggcgaaggcgagaccctctcccgccatctggacatcctgaaagccctggcaaagcgcatggagctaaatgtggtcaagatctacgcggaagtggtctctggagaatccattgacgcccggcctcagatgcaggagcttctcggggatgtggagaccggcatctatgatggtgtcctggtcgttgaagtagagcgtctagccagaggtgacacttccgatcagggacgtgtggccaagaccttcaagttttccaacacgttgatcatcactcctgccaagacctacgacccgaataacgaatttgatgaggaatactttgagtttggacttttcatgtcccgccgggaatataagaccatccgccgtcgtctggttgccggatccgatgcctcccgccgggaagggaagtacaccggcaatgtcccaccctacggatatgcccggaagaagctgaagaaggaaaagggctggaccctggagatcatccctgaccaggcacaggttgtccgcatgatctttgactggtatcggaatggcatgcagggcatcccggttggctacacagccatctctgatgagctgaaccgtctctccatcccctccccttccagtactcgttggacacccaatgggatccaggggatccttcggaatccggtctatgccggatacataaaatcaggatatcggaaagaagtcaagaagatcgtagacggaaagctcacccgcagccgtccgttgaataacgactacactctgtatcccggccgccatgaatcgattatctctcaggagacctgggatgcggtccacaaccggatgttaaaacgcgtacttccgtcctccagcagcagagtcaagccacagcagaatccactggctggtctggtctgctgctcccaatgcggcaggatcatgcagcgccgtccttatcagtccggcaggacagccactctgatctgtccgaccaaaggctgcagcaccgtggcatctgacctgtccatggttgagcaacggctcctggatgcactggatcagtggctggtctccggaactcttccggatcctgatcaccttccggacaataatgaccggctggatctgctccgtcaggcagtcagttcctgcagcgaagatctgtcagaggcagaccggcagctccagaaacaatatgatcttttagaaaaagggatctatgatgaggtgacttttttcgagagatctgctatcatgaagaaaaggaagtctgagctgacttccagactgaaggatctacagactgaactgcagaccgagacagaacgcaacgaagcagtgaagaacctgctccctacgctgcagacgatccatgacacctatccgaagcttaccagcgcagagctgaagaaccggcttctgaaggaagtcatcgatcacgttgaatattcaaaatctgagaacggtcgctggggtcacccggataacttctcactgaagatctatccacgtgtcacccctacgtgaccaacctctaaaattcattgatttttcaaggaatttcatcatctctaccgtccgtgtgctaattcctccgttccgatatccgtaagtgtcgccatacactctttataaggcatcgtatatctctgcgacagatatcgcatactggcactcaattcgccatcgggaccacccaacggcaggacgatcatatgacatgcctgtgtttcatacaatgtctgtaactcccaccattatgaggtttgattctctatgccaactgcagctgcttatatccgcgtctctactgaagatcagatggaattttccccggacagccagctccggagtattcaggcatatgctctgaatcatcacattgaactactccctgctcacatctatctggacaaagggatcagcggacgaaatacaagcaaacgtccggcttttttacagatgatcgctgatgccaaaagaaagccacatccttttgacctgattctcctgtggaaattttccagatttgcaagaaatcggcaggacagcatcttctataaatccatgcttcggcgggaatgtggtattgatgtgatctccatcacagaaccgctctctcctgatcctacttcaattctgattgaagcactgctggaagctatggatgaatactattccgtcaatcttgctcaggaagtccgccgtggcatgaatgaaaaattccgccggggaggtattgtttccatcccgcctttcggctacactgccagagatggacaattcataatcgtgccggaacaggcatgttgggttcgccggatctttgattcctacctaaacggcatttccattccttctattgccaaagaattacagacagccggtgtacgaacaatccgtggaaatccttttgatggccgcggcgtccgctacattctcggcaaccctgtctacaccgggcaaatgcgccgtcatctggagcaccacactgcttcctcctctttatcatctgaccgatttcatatggctgatcatatgacctgtgttgttggcacacatccacccattatttcccgcaaaatattccttcaaacacagacattgttgatgcgtacgaagaaaaaatcataatttgcaaataatgttcagacaagacaagaccggacctttttaatggtccggtcttcgcagattcttgttatctccagtgtttgcatgaagactttttctttaattattttcaacttagttgtttttttcttaacaaatatatcacaggaacaagcatcggaaagatttccagacgccctgccagcatatcaaaggccagaaccagctttgaaaaattggaatagataccaaaattctgtgttggtccgacttttgcaagtccaggtccaatgttgttaagcgttgcagctactgctgtaaaattggttgcaaaatcaaagttatccagcgagatcagcattacagacagaacgaaaatccccagataagccaccagaaatacattgatggagcgaagcacctcatgctccactgtctttccttcgaaccgcgtcttgcggacatttctcggatgaatgataaatgccaactctttcatgactgtttttgccataatgcagagcctcgacaccttcataccaccgccggtacttcctgcacaggctccgcaaaacatgagcagaaccagaatgcctttggaaaattccggccacaggtcaaagtccacgcttgaaaatcccgtagtcgtgatgatcgacgccacctggaaagctgcctgacgaaccgtcagctccagatttcttaccatataaaagatattcacagagatcaacaggactgcagacgcaataatcccaagatatgcgcgagcttcctcacttttcattccctctttgaaccgcttcacgtaaaacaggaaatagacattaaagtttacgccaaacagaatcataaaaatggtcatgacccactgggttgccgcgccatactctgcggcactgctgtcaagcacgccaaaaccaccggttcctgctgttgcaaatgttaagttgatagaatcaaacagcggacagccggtcaaaatcatgcacacaagcattgcaactgtcagcacaaaataaatctgatacagtattttagccgtacttctgaccttcggaaccagttttcctacagatgggccagggctctctgccttcatcagatgcatactggagggttctgccatgggaagaagtgccagcataaataccagtactcccataccgccaacccagtgagaaaagcttctccacataagaatcgctcttggcgcaccctccacactctgcattacagatgatcctgtggtagtaaatccagatacaatctcaaaaaatgcatcaaatggattctgcagtaccccgctgacgcacaacgggatcgctccgcagatactaagtgccacccaacaaagagcaacactcacataaccttctactgaaaaaatggtcgtattttcaggttttttacctcgcagaagcgcaccagccacaatacagaacaaggctgatcctgcaaatacacgcagcgtattccactctccatatacgatcgctgtcagaatcggaagcagcaaaagtgccgcttccagcatgatgatactacccacaatataacgaatcattttcttattcattgtatacgtaccaccttatctaacgtgttccgaccgggccggatgttttcttcataatatctcgaatgtccttataagctccacagtctgtggtaatgatgaccacagaatctccttcctgaatgcagtcctgacctttggggataatgatctttccctttcggttgatcgcacataccagaatatgcggtttcagctgaagctcctgcaacggaatatcagtcacttcgctctttcccttgatcacgaactccaatgcctctgcatttccatctaccagacggtacagtgtctccacattacttccgatagagttctgcatagcccgtacatactgaaggattgtttctgatgtgatgtgctttggatagatcagacttccaatattcaaggaaccaatgatcgtatcaaacgtatttcgattgactttcgtgatcttcttcgccttgctcatactcttggcatacagcgccagcatgacattttcctcatccatattggtcagtgcggcaaatccttctgcttttgcaagtccttcttctgccagaagttccctgtcagttccatctccattgatgatcatagctttgggcagtatctcacacagtcgctcgcaggcatctctgtccttttctatgatcttaacctgaattcccatctccagcagacgctttgccagatagaatgaaatctttccgcctccaatgatcatggtatttttcacctgattagtctcaattccgatggtcttaaagaaccggctggcattgaccggcgaagctaccactgaaatcatgtctcctgccttcagttccacttctccacttggaatcaggaccttatttccacgctctacaatgcagatcagcacttcacatctggacaacatatgaagatccttgatcttgttgttgcaaagtggattctgctcttccagctggaatctcaataactcgatccgtccatttgcaaaggtatcaatatcaatggcagatggaaatctaagaagacgcgccatctccatggcagctgcccactccggattgatgaccatagaaagtcctaattcatccttaatatgatgaatctcatgatgataaaccggattgcgcacacgggcaatcgtctgacatcctcctgctttttttgcaatcagacaacacagaaggttcacctcatccgcatctgtcactgcaatcatcagatctgccgtatcaatgccagcatccatctgaatttcaaagctggcaccattccccacaactccacgcacatctgcaatatttgtaatctgctgaatagcttccggcttccgatcgatcaccgtaatatcatgtttttccctgctaagctgctctgccagtgcacgccccactttaccgcagccagcaataattatattcatcttaagcctctatcctcctgtaagttattcagatgtctctaatataacactgactgaataaaacttcaacgattatagcattttctaaccagttgcaaacgcccgtccaaccatcgggaccaccaaactgtgagatgatcagctgtgccatcttcggattgggatttttaatatttaccggatattgcaatctcttttcataattccacatttaacaatcctccccttcccatggccatggccgattgacccactcccattttcctcttccacctctggcagtctctatcgtcagcggtccatagagcgccgcataatcatttaacgcctggcatctgagctgattatactcctgaaaatatgccagtgccgcctgatctgacggatgtgtatccagatagagattggcttcctgcaccgcaaagctcaacatatccacccatttaagcatctgctgtctggacggggttccctgtgccatcatcttaagcctcctctcactcccagaaacggtttatttaattccggaaaaattgttccatatgccagacctttctccagatcatacacagcattccagtactgccaaggcacataagccatcgccaccggatactcttcaccctgtagaaacggtctgcatccattttgatacctttgataattctccatgtagcaattcctctctatttgttttccatttatcttatgtaacagacgaaaaaaaggtgatagacgtggaatctatcaccttaccgcttcatatattattaagtttcctattttctgtgttcatgtgtaaacagatgctcctggcagtattcataattgcccttgcatttcgaacaaaaacggaactccagatcctccccatccttctcggtccgtccacagatagcacagcgatgatgcgtactctgcgatgccgctttcacttttttcgcataagttctcctgcgtttaatatccttcggcgaaaatcgattccgcttgctgcccatcacaaaaattgcaaagttaagaagtgagatcaacgctgcaatgctgttggcaggaattgccggaatgcccatggcaagcatggtaaacatcagcgatggattcaccagtgcggataaacctcctatgatcgtcagtccatagaaaataccttcaatgatccccagccattttgccttgatcggaaaaatgaaaaacagcagaaatgttgcatctgggaacagatacgcatacacaaaaaacagagataagttcagataaaacgtacccatggaaaaattaattccaaaaatcaaataaatcaccaggcaggcgagcacatgcagcagtactcctgaaaagaaataaagattaaatcggaatgctccccacatatattccagtgcctgaccgaccatataataaaaatacagtgcaaatgccataaacaaaaaactggcatttggcggctgaataataaaggtcacgattctccagatctgtccatgcaaaattgcctcagcatcaagtcccagccattgtgtataaagagagggatttaccatctggatcaccagtcccagaatatacagtataataatataatacatcaaattgtgaattgcatattttccaaatttacgctccagcttatcaagccaattcatagatcagtcctccattttgtctccggaatcatataaaaaatattttaactgccgcttatgggtttgtcaactaacatatcttaacactatctttatggactttcggaaattctttccatataatgtagcatgtttcagactgaagataattgtgaggaaaaggcagctactcgctgccggagagatatgactatgaacaaatgttacagacttggaatcgatatcggttccaccaccgtaaagattgcggtgcttgatgatgaaaatcactttttattctccgattatgaacggcattttgccaacattcaggagacacttgctgacctgttgaccaaagccgttgataagctgggtcccatcgatatttatccggtgatcaccggttccggcggactgacgctggcacagtatctggatgtgccattcgcacaggaggtcgtcgccgtggcagaagccctgcagacctatgctccgcagacggacgttgccatcgagctgggcggtgaagacgccaagatcatctattttgaaggtggaaatgtagagcaacgtatgaatggtatctgtgccggaggtacaggttcttttattgaccagatggcatccctcttgcagaccgatgcaaccggtcttaacgaatatgcaaaaaattacaaatccatgtactccatcgccgctcgctgcggtgtatttgcaaagacggatatccagcccctgatcaacgagggagccaccaaggaagacctgtctgcttctattttccaggcagtagtcaaccagaccatcagtggtcttgcctgtggtaaaccgatccgtggacatgtggcattcttaggaggcccgcttcatttcctgtccgagcttcgggagtgctttatccgtactctgaaccttgatgaggaacacacgatcattcctacattttctcatctgttcgcagcttccggttccgcacttctctccaagcgtgagaaggccgtatccgcacaggatatgatcgatcggctgcacaacaagatccagattgcatttgagatccagcgactggatccgctgttcaagaaccaggcagagtttgagaccttcagtgagcgtcactctcaggcaaaggttgtgaaaaaagaccttgccacttacgaaggaaactgtttcctcggaatcgatgccggttccactaccaccaagatcgcactggtcggcgaggacggctcccttctgtattccttctatcataataacaacggaagtactttacatattacgctggaagcattgaaggatctgtttgacaagcttccgcccaaagcacatattgtccgctcctgctctaccggttacggcgaggctttagtaaaagcggcactgatgctggatgagggcgaggtggagaccatctcccattattatgctgctcagttctttgacccggatgtggactgtatccttgacatcggcggtcaggatatgaaatgtatccgtattaaaaatcatacagttgacaatgtacagctcaacgaggcatgttcctccggctgtggttcctttatcgaaacctttgcaaaatctctgaacctttcgatccaggatttcgcacaggcagctctcttcgcaaagcatcccattgacctgggaacccgctgtacggtatttatgaactcccgtgtaaagcaggcccagaaggaaggcgccggtgtggatgatatctctgccggacttgcttactctgtcattaaaaatgcgctgttcaaggttatcaaagtatccgatgcttcttcccttggaaaacacatcgtggtacagggcggtactttctataacaatgctgttctccgaagccttgagaagatcgccgactgcgaagtgatccgtcctgatatcgccggtatcatgggcgcattcggtgctgcactgatcgccagagagcgttatgaaggccaggagacttccatgctgagtaaagagcagatggagacactggaatattccacttccatgactaaatgccacggctgtactaacaactgccgtctgaccatcaataaattttccggcggacgccgctacatctccggcaaccgctgcgaacgcggacttggtaaagagaagaagaaaaatccggctccgaacctgttcgcttataaaaatgaacgcctcttctcctatgaaccgctggcagaagctgacgccaagagaggtcttgtgggtatcccccgcgtcctcaatatgtatgaaaactacccgttctggttcacatttttcaccagactgggttaccgggtggtactctccccaagctctacccatgagctttatgagcagggtatcgaatccattcccagtgagtccgagtgctatccggcaaagctggcccatggacatgtgaaatggctgctgacccacaacattccgttcatcttcttcccctgcgttccttatgagcgttcggagttcaaagatgccaacaaccattacaactgcccgatcgttacctcctatgcggagaatattaaaaacaacatggaagagctgaaatctgaccgttttgatttccgcaatccattcttaagctttgaaagtctggaggtcatgaccaaccgcctgattgaagaattcaatggcgagaaaggtatgactgccgctgagatcacagaagctgcaaaagctgcctgggaagaactgcgccaggcacgtcttgacgtatgcaagaagggtgaggaaactctgaaatggatggaggagactcattctcatggcattgtccttgctggccgtccgtatcacgtggacagtgagatcaatcacggtattccagagctgatcaacagctatggcatggcagtgctcacggaagacagtgtctcccatctgacacagcctgaccgtccgctccgtgtcatggaccagtggatgtatcactcccgtctgtatgctgccgctgattttgtaaagaccagagacgatctggatctgatccagctcaactccttcggctgtggcctcgatgctgttaccaccgatcaggtcaatgagatcctgactaactccggcaagatctacacctgcctgaagattgatgagatcagcaacctgggagctgcccgtatccgtatccgttctctgctggctgccatccgcgtccgcgagaaaaaacaggagccgagaaagatcgtctcctccgcttacgagcgtgtgatcttcaccgaggaaatgagaaagaattacaccattctctgcccggatatgtcaccgatccactttaatctgctggaagctgccttccgctcctgcggatatcacattgacgtccttccaagagccggacggaatgcagtcgatcttggacttaaatatgtaaataatgatgcctgctatccatcactgatcgtcatcggtcagatcatggaagcggtcttgtccgggaaatacgaccttaccaagactgcaattctgatctctcagaccggcggcggctgtcgtgcttccaactatatcggatttatccgccgtgcactggcaaaagccggttacccggatattccagtcatctccatcaacttgagcggactggagaaaaacccgggattcaaatatacaccggaaatgctgttcaagggactgtatgcactggtcttcggtgatctattcatgaaggtgctgtatcacacccgtccgtatgaactggttccgggcgaggcaaataaagtttatgagcggctgaatggacgctgcaaggcatttctcatgcagaagcatccgtcctggagcagctataaaaagctctgtcagcagatcgtagatgaatttgaccatattctggtaactgatgagaagaaaccgagagttggtattgtaggcgagatccttgtaaaattctctccgtctgccaacaatggtctggtagacctgttggagcacgaaggtgcagaagcagttgtgcctgacctgatggatttcctgctgtactgctttaagaacacagaatttaaggctaagtatcttggcaagaaaaaaatgaccgcccgcatgggccgcctgggtatcaaggcactggaattcttccgcagcccggccaacaaagcactggagaagagtacgcacttctctccggcctccaatatcgaccatatggcagccatggcttctgatattgtatctcttggaaatcagaccggtgagggttggttcctgactgctgagatgctggagctgattgaaaatgatacgccaaacatcgtgtgtacccagccatttgcctgcctgccgaaccatatcgtaggcaaaggtgttatcaaggagcttcgtcatcgtcatccaagttccaatatcgtggcgatcgattatgacccgggtgcaagtgaggttaatcagttgaatcgtatcaaactgatgctgagcacggcttataagaacctgtaacgattcagagccatgcagatgtccgtaaatatgtgactcatgcttgcatgatgacacatatttcggaacatctatatggcgagcagccatacatgagcaaaagtaaagcctcgaagaggcgattttgcgaatgaggctctgaatcgttatactacatagaaacacttcatagaaaattttcaaggcatgaacgacactgcatataaggctctaagggagactatgaagaaaagtctgtaaataataatcttctatgataatgattgagctgg

SEQ ID NO: 1734 - DNA, 23295 bp, Unknown
  16S sequences of unknown bacteria
ccgtggggcctgtcggacccgcaggtcccgtcgcgcccgttgcgcccgcggttcccgtcggcccggtcggaccggtcgggcctgtgcaacctgtacaacccgtaggacccgtgggagttacgccaaatgcatcgatgttcggaacaggttcgcatgcgcgcctgcagccgcaacgcctttgctgcgggcagaataaatagacgggaaaatgaaaacaagaatcgttcattgttcgtttcctttgttttttaaaattttatcgaaatattgtttgttatgcaagtaacttgcgttattcggtttaaaacgtcccgcaagttcgttatacttttgcgctttttgtaattggccgagcctgtcgtaacaaacgcacaactgaatggcgggaatatatccgtaacagtccgcaaaaacgaacgcgcccgtggtaaggtccggctttaaattcaaggcgagtttgtaccagaaaacggcgcgcccgtacatggcgtgctgcatataaaaagcgcccagatcgcagcacgtttccgcgcgcggcgaatcgagttcgaaactcttgaacagcgccgcgagcgcctgtttcggcatgttttttttgcaaaaacacgccgaaaggtcgcggcaggcgcaaattttgttttccacccatccgtcgccgttcaaaaattcgctgtacgcggtcacggctgcatcgtacaacccgttgtcgaacaactcccgcgcatagtaaaatttttgccgttcgtccggcgtcttaccgtccgcgagcattttttggaaaatctttaaattgcgccccgcttcggcaggtctgatttttttgtgaaagacggaaacatccgaatgcacgacgtttccgcgcggcacgatgacttcgtgcaccgcgcccacccacgaaaagtttgccgtcctccttacgatgcgttcccgctcgtaagataaggtgggctttccttcttcgtcgaatgccgcaacgtagggcatcatcaccatatccacgtccgcagtcaggctgtttttcagcgctttcaaggcttggcggttggtttcgtccagcacgtcatcggcgtccagccacattaaaaaatcgcattcagacagggaaaacgcgtagttccgcgccgcggaaaaatcgtagacccattcgaaggtatacactttatccgtgtacgttttcgcgatttcgaccgttttgtcggtcgaccccgtgtccacgacgataagttcgtcgtacgtttcttgaatgctgtcgaggcagcgcgcgagcacgtcttcctcgtccttcacgatcatacaaataccgagcgtcataaaattcctcattcgtagccgaggcgtatttttcgcctcttatttcataatatgattatttttttgagaatgttatgcgcgaatcctttgatttttccgtttaatttggtataataggatagccgaatcacttttgtgcccgtggtggaattggataccataaaggcctccgacgccttcggtccgggttcgagccccggcggacacaccagccccgcgatatgaaaatatcgcggggtctttcttttgcttgctttttgcccgatagtttgataaaataaataaattcatacgaaagggaagtgtcgaaatggtaaaaaacaaggaagattcggaagcggaagagtccgaaacaagcgtcgaagaggcggccgtagccgccgtgccgcgcaaagagggcttttttcgaaaagtccggaattggctgaaaaacacggtgcctggcgtggcattgtgcgcggctctcgccgtgcccgcgtggtttttgggcaaactcgtgcccgtcatcggcagcgcggtgttcgccatcgtgttcggcatgatcctcgcgtttttcaaaaggcccaaagttctggacggcggcgtgcgcttcacttcgaaaaaggtcttgcaggcgagcatcgtgtttctgggcttcggcatgaacttttacaccgtcatggaagtgggcggaaactccgtactcatcatcctttcgaccattgcgacgtcgctgatcgtatcctttgttttggcgaaactgttgaagatcccctcgaacgtggcgacgcttgtcggcgtgggctcgtcgatctgcggcggctccgccatcgcggcgaccgcacccgtcatccgcgccaaggattccgacgtggcgacttccgtttcggtcatattcctgttcaacgtgatcgccgcgttcacgttccccgcgctggggcaggcgatgggcatgagcgatacgggtttcggtatgtgggcgggcaccgccattaacgatacttccagcgtcgtggcggcgggacagagttgggcgagcatgacgggcagcgacgtcgccctgcaatatgcgaccatcgtcaaactcacgcgcacgcttgcgatcattcccatcacgcttgcgctcgcgattctcgagggtatcaaggcgaaaaggagcgctaccgcagagggcggcatccgtttcagtttcgtaaaagtctttccctggttcgtcgtctttttcctgttggcggcagtcgtaaatacgtggctgtttcctgcgctgcgcgtgcccgaaaccgttcccgcctttttaaataccgcggggaaattcatgatcacgctcgccatggcggcgatcggcctcaataccaatatcgtcaaactcgtacgttcgggatggaaacccattcttttgggccttgtctgctggatcgccatcgcgggcgtcagcatcggcgtgcagtcggcgctcgggctctggtaaattgcatatcgaaaggaaaacccgatgcgcgcatcgggttttgtcgttttttggggcggtatctaccgcaaatgaaaaaaggtttgtattatcgcgggggatgtgttataataagaatacggaaataaaaaggtgggtataactatgtcgccgtgggaaatcattctgatcgtgcttttgagcgtgatcatcgttttgctcgtgttgggcgtgatcgtgtacgacaggttcaaggaactgatgcgcaagcagcgcgttggtttcgtcttgcaggatgagttcgcgggcgaggcgcccatcgtctttctgggggattctctcaccgatttttacccgacgggcgaattttattcgccgtacaatgtcgccaaccgcggcatcgcgtgcgacaccaccgcggacgtgcaggcaaggctcgacgaggtcattgcgttgcgtccaagtcacgtgtttttgcagatcggcatcaacgatctgatcagagaagggaaaaaattgaccgccgaaattttatgcgaacgcgtattcaagatcgtggacgcgctcgttgcggaggggatcgaagtcacgctcttatctctctatcccgtgcggcggaaaaaatattttatcgtcagtcccgcggtcttgaaccatgcggataacgggcgcgtcaacgcggcgaacgaattgctcgcgaaaaaagcggcggcggcaggcatggaattctgcaacgtgcacgcggaactgacggacgggacgggcgaactgaaaaaagaattcacgctggaagggctgcatctgacgctgcctgcctatcggcagatcacccgatatttgctgccctacgtgaagcgggccgaacagacccgaagggataacctatgtcagatttcagaagcagacaactgaaaaaaaatgaaaagcagacgcgccgccgcgaaaggcggtcgggccgtcctttcggcgaggggaaaaaagaggatagtatgcccgaacggctgcgccgcatcgcggcggagcaaaaggctgtcagcgactggctgcccctcgacaacgccgcactgatctttcccgcgagcgaaaacgcggatatgtccagcatgttccgcgtgggcgctctgttaaacgagccgatcgatcccgtggaactgcaatacgccgtaaacgaggtcgtgccgcgttttccggggctttgcgccacgctcaaaggcgggtttttccgctattatctggaaccttccgccacgccgctcgtcgtgcaggaagagagcgaatttcccatgaggcccattccgctcgacacccgccatcacatggtgcgcgtcctgtattacggaaacgcggtcgccgcggaatttttccacgtggcgacggacggcaacggcggcatcgtctttttaaacaccctcatagcctgttatctgcgccgcaagggggtttttgtgggcgagggggcgaattgtctggacacgcgggacaggccccgccccgaagaactttccgacagttataaaaaagtatacgacggcaagacgaaaaaggacaagcgggaaaccaaggcgtatcatatgcacggcaaaaaactgcccgccaccatgctcgccgtcattcagggcgttttgaatgcggacgaattgaacgcggctgccaaaagcaggaaccttacggtgggggaactgctgaccgccgtcctcgcctacgcggtggacgccgagcgtgccttttatatgcgcggaaaaaaccatcccatcgtggtcaatatccccgtcaacttaagaaaagtattcccgagcgaaacgctcaggaattttgtcgccatcatgcccgtgcgcgtagaatgcggcagcgatttcgagaccatcgaaaagacggtcagagaacagttcgcgcacatgcgctcggaacaatatctgcgcggctatgtgaattacaacgtcaacgtggaaaagaacaaattgttcgtcgcgctgcccctgcccttgaaaaacgtcggcatgaaagcggttttaaaattgtattccgaccgcgtgacgacgaccaccttttccaatctcggccgcatcgccgcgccgaaagaattcgaggggcaagtgctgcgttacgatttttatctcggtcccaaccggtgccaactgaccaacctttgcgcggcggcgtataacaacaacgtcgttttgtcgttttcccgctatcggcaggaaacgggcgtcgaaaaatattttttccgcaaactttccgaactgggcgtttccgtcacgctggaaagcaactgcgagttatagaggcatagtatgaaatattgcagacaatgccgcgtctttgcgcacaaagatctgacgcgctgtcccttatgcggcagttatctggtcggtgcggaaaaagcggaatcacctcccgcgcgctacgagcgggaatcggaaccctgcgtgcgtttcgtgccgctcgattaccagggcgactttttccgccatttcctgcgcaaaaaatcgctgcttctgacgatcgccgccattctcatcgccgtgctcgtcaaccgcctcatcacgccacggcagcaatggtggggatacgtcgtcatcggcggcctcgcggtctactggtgcgtgctgcaaaccatttatcgccgcagaaggttttattccctgctcgccgtgtgcgcctatgcgctgtccgccgcgctgtatctgatcgatctgacgatctctttcgacctggcgggaaacgcttcttatttcgggatctctctgcaatacgccgtaccggggctcttattcgcccttttgatcacctgcgacgtgatgtcgttcgtcgaaaagagcggatataaatattatctcgtttcgctcgttctggtttccgtggtcgcgctcgtgcccgagatcgtggtgctgtgcctgcccgtttaccgcaattggctcacgtttccgctgttctgctttacgcttttgaatctgttcgtggtagcggtcctgtattggaagcccctgaaatcggaaatggcgaggaaatttcatacttgaagcaaaggagtcttgatttttgaaacaatttttctcttatgtgaaagggcgcgtcagagcggataagatcctgacggcgatcgtattcgtctttatcgccttttgtgtcggttcgggtatctatttcggcgtgatcgggcaggcgcggaattgcgtcatgtcctttgcctatttattggtcgttcccgtaatctatgcggtggaatacggcgtgcgcctcagattcgcccctttgttcatggcgatcctcctgtttttgatcgcgggcggaattttgggcagtgcgtacgatttgtataactatatcccccgtttcgacgagatcctgcacggcatttccggcgtgatcttcgccgtgctcgggttttcgctgatgaaagcgctgctcggcaaagaggagagcaataaaaattttttcatctgtcttttcgtggggctgttgttcagcctgtccatcgccctcttatgggagatgttcgaatacgccgcttatgcgtttttcggcatcgatatgcaggaagatatgctgatagacggtttttcctcctactttttgatgggcacgcacaacgcgacggaagtgatcgacggcattacccagacggtcatctactatgcggacggcacgaaagtcattctcggcggctatctggacgtcgggcttttcgatacgctcaacgatatgctcgtgtgccttatggggggcgtcgtctatattgcggcacttcttatcgaccataaactggggggaaggctccgcagacttttggttcccgaaacgaacgcgttcgagcgtgccaagcgccaaaagaaggaaaaggcgcccgcaaaggagttgtgatgcagtttgagatcggtcccgtcatcgcggcggtgcgcagcgcggaagaatacgccgcggcgcttgaaagcggcgcggagaccgtattcgtcgtcaagagcgatcttctgtctttgcgggagatgctcgcagaaaagcgtggcaaacaggtattcgtgcatgcggatacgtgcgaggggctcggcaaagacaaagtggggctggaagttctctcgcgtctgggcgcggacggcgtcatcagcacgaaaaattctttgatcgccgcggcgaaaggcctggggctgggaacggtacagcggtttttcctcatcgattcgctgtccgtgcagaccgctttcgagagcgtgtccgcctcccgtcccgactgcgcggaactgatgcccggcgtcctatgcaaagagatcgcgcgctttcgcgcgcggacgcagccgttcaacgtcaagatcatcgcgggtgggcttatcgagagcaaatccgacgtgatcgccgcgctttccgcgggcgccgacgccgtttccgtcggcagacaagaattatggtatatataataatttgatcattatcaaaacaaaaaagacgtcttttttgtttgggcgcgcccaaacaaaaacaaatctattcgcaaataaatgaaaaaatgaaacatactaatacaaaggaaaaaacaaatgaaagagaaaaacgttcagatatcggttatcataccggtttataacgcggaactttatttggaaaagtgcatcgaaagcgtgctcgggcagacctttgacgcgctggaagttatctgtgtggacgacggctcgtcggatgcgtccgtcgaaattttgcgcaaatttcaaaataaagacgagcggctcattgttttgcagcagaaaaaccggggagcgggcgcagcccgcaataacggtctgcgccgcgcgaagggaaaatttatccactttctggacgccgacgactgggtggatactgccgcgtacgaaaaactttacaaagttatgaccgattcccgcgccgacgtcggcgtgttcatgtatacgcgctacgacaaccgcacgggcgcagaacgcaaggtcagattgttcgaactggaagaaggaaaaacggagatcacgaccttttcccgtaaatactggcatttctgcaacacttcggtggttccctggaacaagatctacaatgcggaattccttcgctccgtcggcgcgcggtttgacgagatcgtctgcgcgaacgaccgcgctttctatttccagacgatcacggcggcaaaatccatcgtgctgtatgccgaatcgtttattttttatagggaaaacaacgaactgtccctggtagggcaggggcgttccaaacatttcgactgtcatctcacggcgaacgaccgcatctttcagatcgcaaaatcttttcccgacgaaatttttcagcgcgtattcaacgccaatatggaggatctgttttcttttttctggaaatcgagcaaagaaagcaaaaaagaaaactttcgcgggatctgcgatatgctggtgcgggaaatgtacccgttcgacctcgaatcgtttcggggaaaatcctggtatgcgaacggaaagatcgcgcttttgcatcggaaactggataccaataaaatcgtcgtacccgtcgtctttgccaccaataacggctacgcgccctttttagacgttgcgatcctttccctgatcgcgcacgccacgccgcgttactattacgatatttacgttttcgaaacggaattgagcgatctcaatattcaaaaactggaagaacacaagggcgaaaattaccgcgtcaactgtatcgatctaaagtccaaattcaacgattccacgctgtattcccgcgcgcattattccaaagagatgtattaccgcatctttatccccgaacttttttaccattgcgataaggtcgtgtatctcgattgcgacgtgatcgtcaaccgcgatattgcgcagttgtacgaaaccgacctcggcgaggcgcccttgggggcggtgcataacgccatgaattacagtatgtaccgatacgtcacgagaatgctgaaactgcccgcggaacgctatttcaattcgggcgtgctgctcatcaacgtaaactcgttcgtggaaaataaaattaaaatcaaatgtttcgatcttttgaaaataaagaacaatctcgtctgccccgatcaggatcttttaaatctttcctgccgcgacagcgcgaaaatgctggacagcggctggaatttccaatggcacaacgtactgccgtatgccgaaaaagtggtcaaagaatcgcaggcgtcgctggataacgcgcaggcgaaaaaatacatcacacactttacctcggggaaaaaggcgtggtcgtatcccgaaaatgaattttccatcgatttctggaactatgcggaatcctcccgttacaacggcattatccgtcagatcggaatgagcaagcggatccataccaccgtgtacgaggcgctgcaaaaccacaacgaccgcttgaaaaccgcggacgaggcgctgcgtcggctgtgggcgctggagtcatccttttcctataaactgggaagatttctgacctggatcccccgtaaaaccgcggcatttttccgttgctggcatacgaaaggcttcaaatatacgatggtgcgcgtcttccgcggcaaaaagcgcgcccaagaatatctggcaaggagggaaaatgattaaaataaaggtactcggctgctgcgtttcccgcgaaatgttcaactataccgatcggttagaagtgactaaatgcgtctatacgccgtttatcacgctgaacgagccgccttttcccgtggatcgcgaagcgatagaccgcgtcgcccccaatcgcttttttgcgaatatgctcgatctggaatgccgcaaaaaaatattcggttatctgaaagaggggcaggcggattatctgatcttggattttgcagaaaccgttacggatttttaccggatagaaaatggcgtcaggttgcccgccacggaacattataaagcgcttttaaatgaattgcatcaaccgtacgaacggcagaaatatacaaattgcagcgtagaaagcatagtgaagaaactgtttgaggaactttcttcggtgatttcttcggataaaattattttgaatcgggcgacctacagcaaatattatctgaaagaggaatacggccgtatgaaaatctatccgtttaccgatcattttcggcttttgcccgaggcgcaggcgcgcgttcgcgagttcgagaaccaagcgttgaaatatctcggcggcgcgcccgttttgccgccgttagagacttgtctgtcggacggggcgcataagtacggcgtcagtcccgtgcactacgccgattgctgttaccgctttatggcaaggcggctggaacatacgctcggagcgatttcggaaaaagaattatacgccgagcacgaacggcaatacggcgattttataaacctgttatttcattcgatcgattaaaaggagacaaaaatgttaaacgaaaaaattgcgaagatgctcaacgaacagatcacgagggaattgttttccgcttatctgtatctggattttgccaattattacgaggacgaggcgttggcaggattcgcccattggtacgaagtgcaggcgcaggaagagcgcgaccacgcgcttttgatgcgcagatacctcatcgacagcggcgtgcgcgtcgtgtttgaagcggtggagcggccgaaaggcgaatataaagatttcgcgcagccgttaaacgaggggcttgcgcacgaacggttcgtaaccgcgcacatatgcgccgtttacgaacaggcgctcgcgctcaaagattacaagaccgtgcagtttctcgactggtttgtgaaagaacagggcgaagaggagaaaaccgccgaagatttgatccgcaagatgagccttttcggcggtgacgcgaagggcctgtatcttttgaatcaggaactcgcggcgcgcgtctacgtgcctgcggtcattcccgcgcaataaaaaaagagcggaagaaactttccgctctttttttacatagccgccgttttataaaaataataaaaggtatcgtcctcgccgatgcgccgcatgcctgcggataaaagcgccttttcggaggcgacgttttctttatagcatttcgcctcgatcttttccagccccagtttagaaaacccgtagcgcatataggctgaaagactctcttttgcaagtccccggccgcgatattcgggcaagagccggatcccgatctccgcctcgcttaaaaatccgaaattgaagaggatcacttcgcccgcgagtttgccgtccaggtaaatgccgagcggcatttcttcctttttcttaaaatccttgcgcgcggaatttaaaaaccatgcgtcggaaacgtcctttcccttcgcgtcgtcgcgccagtcgtaaccccaaaaccgattgagttcggtatcccgcgcgagccgcgcgtactgtgcggcgtcgccgttcggaacgggcgccaaaatcacgcgttcgctttcgatctcgggcagtttggaaagggcgtcgatgctccgcctgatggcgagattatatttgtccacgatctccacgggcagataattgagtttggatttccgaagccccagatctcccgaatcgtcctcgcggttgatatagtgcacgttttcgtccgcgaacgtctgggcgaacagttgcgccacggtcgggtacgcccccggatagtcgcgcagcgccttttcgatatggatgatgagcatgtcgccgcaacgctcgccgatggaagccgccacgatcttgccgcccacggtgagatatccgcacaacagccccaagtctttgagataaggcaaaatttctttcgccgccttcatttcctcggtcgcggaaaactcgcctttggcgagttgataactctcgtattcctcgaaaaacgccagaaccccgcacgcgtcgctctgttcgcatacgtgaaactcgtagtcgggaaaactctttttgaatttattgacgtggttgcgctgtccgctgtaattgccgcccgcgtaggtcttgaaatcgctggcgtaatacagatagtcgcgccagcgccgctggttggcgacgtgtacgtcgctgccgtagcggatcacgagggaggcgagccgcgacttgggcacgttcgtgtagtggatgcggatcttattttcgcggcagtatttttccagttcggagatcgcctgccgttcgcagtattcgtcgccgctcaggcataaggggtagtggaagtatacgttgttcacgtaccgctctttgaggatgagcgtatctccgtagattgcgtattcgggggaaatatatttattccacatgaacaggaatcccgccgaaaagttggcaagatgcagattctgcgctttgaaaaagggcagaagatctttgatcctcttgcgcgtcagttttttaaatttcataatcattccgaatttcagttttttccataattatagcacattccgcatgattttcaaacctttcgggctacgtcagagaaaaaatatgcaggatgaagcgcgggatatcgggcatcacccgcacgatcgtctcgtaaatttccccgcgcagggcgataaaatcaggccattcgtccacgtgccagaagtattgccccgcagtgacgtcgccgatggcgaacattccctgcgcgtatccgccgtaggcgatgtattgcgcgatcgcgcacccgccgatggaaaaaagcccgaccgccacgccgcccacggcgaacagccccacggcaacggctccgaccgccaccccgcccgcggcgatcgcgcccagcgcgaagatgccgaaggacaggcacgcgagcgccaagatcccgacggcgagaacgccgaacgacaaaagtcctgcggcgacgaatcccaccgatatgagtcccgtcgccacgttgccgacggcgatgacgcccttggcgcggcacagtccggggccgacgtttacgtgcacgagcggcaatcccagaaaggtacgcttgctcttatattcgtaatgaaagcggcggcggcaaaacggatatccgtgccgcggctctctatcgggttctgcatcctctccgcgcagcaaaaaatcgacgctcacgtgatagaaggcggcgatcgccaccagtttttcgggttcgggataactcgcgtccgtctcccatttggaaaccgactgccgcgaaacgccgaggcggtccgccagttcttcctgcgatagatttttgtccttgcgcaaccgatacaatctctgtccgagcgtcatgtcttacctcttttcgtattattctgcgctcattataccacggaaccgggaaagcatgcaatattctccgctttgcaatctgtcaaccaatggttgcgttttgtcttttgcgcaaaactttcgggaaaaacacggcgaaagcgacagtgctcgcgagcgagcccgccacgtctgcgatgggctgcgcgtagaaagccgcctccacgcccaaaaaggcgggcagcacgagaagagatacgagataaaagaccattttccgcagcatggagagcacgatggcatactgcggctgtcccagacccgtaaagccgtccacgaacgcgtactgaaaggaaagggggataacgccgatcatgtatatgcggatgccccacacgctgttttccacgatttgaggattggatgtgaacaacttcgcgaaaggcgccgcgcccgcaaaggagagcgcgaacatgagcgcggtgaacgcaagacacattcccagtatgcacttttccgcccgcttgataagcggtatgtttttcgcgccgtagttataactgagaacgggctgcgtacccgtggaaattcccatcaggggatttaaaacgagcgaggaaaacgccaccacgacggtagacgcggtgatccacatatcgcccgacgcgccgccgtagcgctgtaagaccgcgttgaatacgatgatgatcgcgctgtccgtcgccatgatgagaaagggcgaaatgcccattttcagcgtctttacgatggttttgatcgaatatccgcccgccgtcaggcgcactttggtattctttttgcgaaggaatacgatgacgaacaggaatgaaagaaactgcgacaaaacggtcgcgagcgccgcgcccgccacgttcatgcggaatgcgaaaataaacaggggatcgagcgccacgtttgccaccgcgccgatgatcgtcgtcatcatgcctacgcccgcatagccctgcgcgataataaactgattcagccctaccgcggtgatggaaaagatcgcgccggccgcgtagatgagaagatattcgcgcgcgtatacgtaggtattttcgctcgcgccgaacgtcatgaggagggggcggataaagaccgtcgtcgccgcggaaacgaaaaccgcgagcgcgacgagcgccagaagggcgttggagaggatctttcgtgattcgtcctcgcgctttcttcccagagccatggcgaacatgggcgcgccgcccaatccgacccagaatgcgaaggaggatataagcgttgcgacgggcgcgcagacgcccactcccgccagcgcggtatctccgatcgtttcgatattgcccacgaacattctgtccacaacggaatataaaacgttgataaactgtgccgccatggcgggcaccgccagttttacgacggtggaaaatacgtttttgttacccagatccaatgctttcatataccctctctgccaacgcctattgtaattcccgtacgtggaaaagtcaaccgaaaacgcggttgacaacagagaaattctgcggtaaaatagtgcaaaagaaaaaggggcgatcatcatggaaaaaaccaacgcgatgcgtattctcgacaaaaacaaaataccctatgccgcgcgcgagtacgacgcgtcgatcaccgacggcgaggcggtcgcggcgattttgaacgagccgcccgaagaagttttcaaaacgctcgtcaccgtttccgacaagggcgaacacctcgtgttcgcagtgcccgtatgcgccgtgctcgatttaaaaaaggcggcgcgggcggcgggcgtcaagtcggtttccatgatccgacaaaaggaactcgaaccgctcacgggctacgtgcacggcggctgttcgcccgtgggcatgaaaaagcgcttccgcacctttgtgcacgaaagcgcccggacgttgccgcaaatgtatgtgagcgcgggcaaggtgggcaggcaaatgcgcctttctcccgccgaccttcttaccgccgtcggcgcagtattcgcggatctgacagccgaataaaactatttgccttgcttttcttttaataaaaattcgagcatggttatcatacaattcatgcgcgcgcacgtatcttttgcaaaaccgagcacccgttccaacttttccccgcaccacgcttgttcgtcgcgcaaatcaaatttctcgcaggcattttttgtatcgctccacaccgctttcgatcttttttgcccgcaatgccctctgccgctctcatgcagccgcacgcccaaaagcgtataatattgaataaaatgtttgcagtttttgcagattgcatttccttccatgatagctcctttcatacgaatattatttacattataacactaaaaaaagcaaaagttcgaaagtacgcgaatcgcgttgagaaaaatatatctgttgtattttatcacataatgtgttaaaaaacttatcaaatcataattatgattaaaaaaatcccgcctttccaaagaaaagcgggatttttttaaaaatcgatttcgtcggggtttttgcccgcgggcgcgcggagagcgtcgatcgcggcgcagtccgcgtcggaaagggtaaaatcgaagaggtcggcgttttcggcgatgcgcgcaggcgtcaccgatttggggaggggaaggatgcccctttgcaacatacggcgcagaatgatctgcgcgggacttttgccgtacttctcggcgagcgttccgatcgcgggaagggcgagcgacgcgccccgtcccaaagggctccacgcctcgacgagaatggaatgagcgcggcagtaatcgagcgtttcttcctgccagaaccccggccgcgcttcgatctgatcgacggcgggcatgaatttcgccgtctttttcagcatttcgaggtgatgcggcaaaaagttgctcacgcccgctgcgcggatttttccttcggcgcataattcctcgaacgcgcgccatgtttccgcgttgatctcttcggcgcgttccccgaactgtttttcgttcgcgggccaatgaatgagatacaggtctatatacgaaagccccagcgtgagaaggcttttttcgcaagccgctttcgcgttttcatagcctcggtcggcgttccagcatttcgtagtcacgaaaatttcctcgcgcgcgatgccgctctttttcaccgcgtttccgacgtcgctctcgtttttgtaaaacgccgccgtgtcgatatgccgatatccgactttcagcgcttccgcgacggcgcgctccgtttcgccgcccgccgcgctcagatacgttccgaatcccacgcacggtatttttatgccgttatgcagtataaacgattcctgtaaagaattcatggttttcctccttttgttatattataccacgccgccgcaaagggcaaaggaatcaccgaaaaaaatgcgattgataattatacaaaaataattgaatatccgcataattattgaataattgacatttatttgaatattatgcaaaaaacgattgcataaagcgcgatagtgtgataagataatgacacgattttgagaggtgctttatggattgggatatgtttatcaaggcgtcgatactcgtcttgtacatcgtgggaatgctgctcgtggcgtttttcacgcgcaagcggagcaaaacggtgggggacacgctgctcggcaaccgcaatatgggcggctggctgaccgcgttcgcctacggcacgacgtatttttccgcggtcatctttatcggctatgcgggcgaacagggatatacgttcggtttttcttcgctgtggatcggcgtcggcaacgccgtgatcggcgcggcggtcgcatggatcgtgctggcgagaagaacgaaaaacatgaccgtgcatctcggcacgaagaccatgcccgaatttttcgaggcgcgttatcagagccgccatttgaaattgttggcggggctgatcgttgtggtgtttctgctgccctattccgccagcgtgtacacggggctcggctacctctttaaaagcgtgttcggcatcgactttatctgggtggtgttggtcatggcgtttctgacggcggtctacctctttttcgggggatatttcgccaccgccgtttcggattttatccagggcatcatcatgttcgtgggcgtcgtggtcatgatcttttacgtgttcaattacgaaaaagtgggcggattcctcgaaggcatcgccgccatcggcgacaagcgcgaagaaatggggctcgccatgacgggaacgggtatctggcaactcgtcatgctcgtccttctgacctcgctcggaagttgggggctgccgcagatcgtacataaattccatacggtgaaaaacgaggcggcgatcaaaaaggcgacctgggtatccaccgtgtttgcgctggttatcggcgtgggcgcgtaccttgtcggctgtaccgtcgttctcgtattcggcgatactgccgcaaccattcccgcagatcagcgcattcccatgcttttggcagaaacgcttcccgcgggtcttttggggctgatcaccattttagtgctctcggcgagcatgtccacgctcagcgggctgacgctctccatttcttccgccgcgtccatcgatatcgtgaaggggtatatcaaaaaggacgcgtccgataaattcatcaattactgtttgaagatcatcggcgtcgtggtcatcgctatttccgcgtttatcgcgatctacaacgaccacgtgcaggaagttacgggcaaggcgacgacgatcgtcaatctgatgtccctttcctggggcgttctggcgggctgtttcatcgggccgtacatttacgggctgtacgataaaaaggcgagcaaaaccgccgtatacgcgtccatgctcggcacgatcgtcatcacgctcgtactgtatatcgtttccaaaaccgtgcctgcgaccgccgcgatcctgtttccgcccgccatcggcgtgatcacaatcgcgtacagcattttggtgacgccgctcgtgagccgctttacgaaaagcccttcgcccgaaatggtggaaaccgcctttgccgccgcgaaaaagcgcgaagaaaagacttctcaatcttaatcataatagaaaaccgccccgcggcacacgccgcggggcggtttttttatttccagccgaaagagccgtcttctttttgatacgaacgataaatttttccgtactccaacaagatcgaaccgccgttgaccgacgcacacgaattctgctcataggtgatcacgagttcgtcgttggggtaaatggcttcctgcgaggaaaacgtgaggtgcgcctgcaaagatttcactttgatctgcgcgtctgccgccgacgcgcagatctcgccgccgaaccgtccttccagaataagcgttccgttcacgatgagcgcgccgccctcttttttgccgttgggctgcgaggggtaccagagttgtttgctgtttacgaacgtcgtacaactgccgtgatcttcaacgaacgtatcttcgtagacgatcaagcctgcaagatattctttttcgcccgctttctcgtttttcacggtcaactgcgcgccctggtccacgatgagtttcgcgccgggcatgattttgaacatattgtatatggcgtaatcgccgtcgtgcaaggtgatggcggagtaggtataggggatcgccatcagcatgccttcggtagagatgatggacatgagcgtgagcgttccgtccgtcgcgccaccgtataagtcgagcgtcgtgcggaattcgaaaggcggctcgtactttttcgtcgcctcggcatagcggggattttcaatgcgcgtcgtctttttctcgacgtagccgccgatcgcggggcggatcatgccttccgcgccgatggcgcatacttccgccacattatatccgcccatagcgaccagcatcgcgtaagcgtattcgttggcgccgtagcggatggtataattcgtctgaatattcggcatttcgtagatgttcaaggggacgaaccccgcgttatatacgttttgcgaattggtaccgcccttgtaatccttgacgataaaggggagtttgctcgcgccgcccgccaaaacgtccgttttgccgccgccgacgatatacccgttcacgtcgagcacgccgcccgactgcacgttgagcgcgccgtccaaccgtaagatcgcgtagtccgccgaagtctgcccctgatagggccgcgccgattgtttatagcccacgatgccgcccacggagagagtgccgtatacgttgagcgtcacgccctctccgaggatcaacgccaccgtaccgcgcgaagcgtcggcgtagaacagcgagggatcgtccgtcgtttcggcaagcgtgcggccgtacgcgcccgccgcgtatggcaggcgcatcgtcacgcccgcaggcaagttgtaagtacctgcctgcaatgcgggcgcgttggttttcgagtacacgagatccagcgtccctttgctgttttcgttcagcgcggcgaacgcgtcgttcaggtcgagataatatacgccctcgaagaccgccgccgcggcagtaaattcggtgaccgcccacagcgttccgtttttctccgccaagagcgtatcttccaggcctccttccgtcgaactccaacccaaaatgcggaagaatccgggcactccgtccttgatgccctcgaattctttggggatctcgtcgatcttagcaaggtcggcgccgtaaggcaactgcagcgtcgtctgcgtttcgccgtacacaaaagtgatgtcgaatatatccgcttccagcccgatataccataaaatatcgcaggggatcggcgaaacggtaaaggtgtagacgttgttcgcgccttcttccctgacgagttcgtattcgtagggcaggaatccgtcggatagggcatcggaatattgaatgtaaagtttcggcaccttgccgtagggaacggtgacggtgaacgtgaacgcgccgtcgttattcgcccaggtcggagcgctaccgctgaaatatacgccgttcgcctcggtcgcttcgctgcgggacaggtcgtgttcggcattcacgcggaagggtacgatttcggattcaacgtaggtaggcttgctcgtatcgaacggagttataaagccaaaactgctgaatacataagtaaataccgtgttttgttcggtcaacgagccgccgtacaccgctttttcggtcgactttccgtccagtaaataataataaatgaaacggccgttcacggcgaactggtaaccttctttgacgatgcggaattcaacggtactgtcgtacgatacgggggcggtcgcaatgctgcctacctctccctttaacaggctcccgtctacatagatctgataatcgtcggaaatggtaaaagccatctccgaagcgggctgcttttcgcagttgatttcgatcacaagatcgcttgtaatattggtaaggtaaaaatcagcgtaataagagccccattttatgtaagaatccactttgtattcagcatttcccgtgattttgatgggagcaaagccgtccttgaaggtaaaaacttcaccgttgacggtaatattttgtaaaatcgtagatttatccttattataggatattttaaaagaataaacgccgttgtgctgcacggtcacgccgtcatagttcgggcggttgcctttgaggttatatacgctgaactgttcgccgaaccgttcgtccacgttgaaggaaacggtgtgcgtgttttcgaacttcgccgcataaaaagcgtccgcgtccctgacctcgatgcgatagcagagcaccgtcccgcctgcgagagcgtactcttgcgctataatctgtccgtccgtcgccgtgtgatacagagcgggcagttctttgcccgcgggcatcgtaaagcgcaaatacaataccgtacccgatgcgaacgaggaggaaatttcataataaggcgcaatgttttgatccccttctttcacataagttaaagtattccatgccgtttcgtcgtctttcagatattgcacttccgttgcatcgtagggaagggtaaagcccgcttgaaaagttttcacgtcttcgtaatatacgatataatagaggttttccgctcccttttgcggcagtaatattgtatttacctgttcaccgatataagcggaataagcgtcttcgtccaagatgcgtgccgacaagtcggcgctcgccgtataggcgaagatactgtaagaccaactcgaatcatatttatagccgcagtaaagatatttgccttcgtagtcgtaatttcccataggatcgaactgttcgttgcttcccacggtgtaattttcgatggtccagtcaacgatatgttcttccccgaaaatatcgacgtaggtgacgggcacgacgtcgagcacgccttcgatttttatgggggcgttcttatcgataaagacgccgtatgtaaaatattgcgcgccatcttttgtttctttgccgtcggaagcgatcgcctcgccgccgtaggtgagaaggggcgcgtcgtcctcataccacgcgttgcccttggcgtaaactttcaacaccgttccgtaattcaagttctgtgtttcgaagggcagatacgtagcgtttttggaggaaacgtccacgtcgaagcgtacccagcgcgcgccctgttcgcgcacgatcagaccgtccgcggtcaaagccgccgaatacacgccgctttcggcggtcagcgcatgttcgccgagcaaaatattcatatccaggatatacgcgcccgctttcttttgtacggtaaagcgcatttcctgcccgtacgtacccgtcagagaagagatgcggtttgcgcccgcctcgtcgtagaaatcaacgtacgcgctgtctgcaaagcgcagggtatattcccgcgcggtttccaggtacttagccgtatagaccgccgttccgccgacgggcacgacagccgtatcccagccgtcgaagacgttgacgagcgttttgctcatgatcacgtcgggaactgcgggcggctcgggcgtctgcccgtattcgagggtgaattcttcgctgtattcgccgtcgattccgtacacgaaggtgatcagataactcgtcatgcgcttttcgtactgcgcggtataaagcgcgtcagccgaaacggcggaaatttctcgatcccagcccgtaaagaccatggtgtgcgagggggcgaagtcttcgtcctccacagtcggcgcggtcggcgttgcgccgtaatcgagcgtcgctctctgcgtatgttcgccttcggacccgtaaacgaaggatatttcgtaggtcgttatgcgcttttcaaacacggcgcgatagaccgtgtcgccgacgatggcgccgacttctttatcccaacccttaaagaccatcgtgtgcgaaggcgcgaaatctttgtcttttacctcgggcggcgtgggcgtttcgcccgatttcagcgtttgttcctttaaaacggcatctccgtccataaatgtagccgtgatctcggctttttcatagagagccgtataggtcgcgtcggctgaaaccgttacgattgcgggcttccagcccgcaattctgttaacagaattgtccggggagatttcatcggggatatcgggcgcggtcggcatggttccctcttttaaggtgaacacctccgatttttcgccgttcaggccgtatataaatgtaatggtgtacatagccgcttcatcttcccatacggcggtaaaggtcatgtcggaagttacttttaccttatctcccgcagcgtacacggccgcatcatttttccaccctgtaaatacgtgtccttcccacggctcgtccatagacggcagcgtgaattccgaattttccgcgacgtattccgtccgcgcctgaaaacccgcgttttcgccgcccgcgagcgtgacgacgaacattcggcttacgcatcctgtcaacagaaacaacgccagaaacgccagcgccgccaacaggggcaaagccaatttttttttgattcgcatgattccctccattttttcaataggttcattataaaacaaatacttaacaaagtcaagacgagttttgcaaaacgtacggcgaaacaggtgcaatttcggcagattatgatataatagaaaaaacaatccattctggaggaagcgatgaaattttattggacgcgcgctgcgcgcgcgaacatcggttgttatgcgggcttccgcgcgaaattttgcgccgagtctgcgggcggatacacgctccgcgtgttcggggcttcctggttttccgtgcggatcgacggcgaattcatcaccgaagg

SEQ ID NO: 1735 - DNA, 9600 bp, Unknown
  16S sequences of unknown bacteria
cgcggcgcaacgccgcggctcttttccgtattgacaaacaaactcttatgttttataatattcacaaagaaacttcgagaggtcaatatgaatcctttaacatctaaaaattggataaaaatttatggcaactcaaatgtcagtcaaggcttacaactcaaaagcaacagcggcgttgacattgaagtgagagccgcctgcaaagagttttgcaaatggctgcgcaatgagttttcgtttcctatccgagtgccgatatatctgaaatccgcagaaagaataaaggcaacggacggagaccttgtctgcggaacgttttttgaaccgaacgaccgatttgttgaaccttatataagaatcgcaactggggattatgaggaactgcgtgaaaaatacggcagagacgacgcgctggcaactattctgcgttcctttgctcacgaaatcgtacactatctgcaatggataaacgggtttgaacagacggacacggaagcggaacgacaggcagaaagatattcaaaagagattttgaatatgtacgcaaaaacaagagaacatccgtaaaaatttttcaaactgtattgcaaactgtttttaatatgatataataccaccataataatactgccaccgggcagcggaatgaaaaacattcgtttacacatcgttaggtctttgaagatgtgtatgcgggtgttttttttgagaaaaacaagggtaaaaatcaaaagattcatcaaaggctttacgcgtagggagatagtgctttggcgcgcatccgtttttctgtcggttgcggcgttctgtctgattatttttcgctgacttcatcgatctaggtgagacttcactcattctgaatacaaaaggcaaattttgtcgagatttgcgattatcaccacacaccgagaaccgttttttcgttgtcaatcggcacaaaacaaacggttctcggagataaaaaaaatgcgttccgacgaaattgtgacataattgcaaaacgtcaaaaaaaactgttgacaaatcagttagcctatgctaatatatgggtgtggttagcgagagctaatcaatttttaagttgtatggttagcgaatgctaatcattattttggaaattggtgttagtctcggctaattaaaagagtgagtatggttccctttcggggaaagaagagcaaacagggaggtatccaaatgccgttgacacttgcggaagaaggagtagaaaacatcatcaaacgtataggcggttcgcctgaggttaaaaaacaccttgaaaacctcggttttgtggcgggcggcacggtcacggtcatcacgaccatggcgggcaacgttattgtgaacgttaaagaagcgcgcgttgcgataagcaaagaaatggcgcaaaaaattctcatctgaatttgctaaactaaatttgaaaacaaaaaaataaaaatagaatcggaggtaaagggacatgagaactctgaaagaggtaaaagtcggagaaaccgtcaaagttgtcaaactccacggtgaaggcgcggttaagcgcagaatcatggatatgggcttgaccaaaggcacagaagttcacgttcgcaaagttgcacccctcggcgaccccgtcgaagtaactgttcgcggctacgaactttctatccgtaaagcggatgccgaaatgatcgagatcgcgtaagcgagaccaaaaggagtttgaaactccgtttttttcagttcaaacggttagcaaagactaatcgtgaaagagaggaattaaaagatggatttgagaattgcccttgcgggtaacccgaacagcggtaaaacaacgttgttcaacgctctgaccggctcgaaccagttcgtaggtaactggccgggagtaacggttgagaaaaaggaaggtaaacttaaaaaacatgacggtgttacgataaccgaccttcccggtatttattccctttccccctacaccttggaggaagttgttgcaagaaattatcttatcggcgaacgtccggacgcgattttgaacatcgttgacggtacgaacctcgaaagaaacctttatcttacgactcagttgaccgaactcggcattcccgttgttgtggctatcaacatgatggacgttgtaagaaagaacggcgacaaaatcaacatcgaagaactttcgagagaactcggagttaagattgttgagatctccgcacttaaaggcgacggcataatgcaggcggctgatgcggctattgatgcggcaaagaacaccaagacgcttccgatgaacattttcacgggcgtggttgaacatactctggcgcatatcgaagaggcggctgtacataatatgccgcaggaacagcagcgttggtacgcaatcaagatttttgagcgcgacgacaaagttcttgcacagctcaacctttccgacgatattaaaaagcacattgaagaagacatcaaagcggcagaaaaagaacttgatgacgactccgagtccatcatcacaaacgagcgttatgtcttcatcgcttcccttataaagaactgctacaagaaaaagcagacgggcaagttctccaaatcggataaaatcgaccgcgttgtaacaaaccgttggctcggtcttccgatattcgcacttatcatgttccttgtttactggatttcaatgggtccgttcggttccatgctcacggactgggcaaacgacggcgtgttcggcgacggttggcaccttttcggcatcggttcgagcaaatatgaagacgcggcgggcgaatataccgacgcaatgaacgctttgaaggctttcggatttgacattgatacggaaacggaagatttcgacgcagaaaaagttcttgcggagatcaaggcgttcaaccccgaatccgacaatgcgacggcgaccgtgcaggtcgaagatgaggaaactctcgcgacttctgatatgacggtttattattccgaaattcccaaagataaagttgacgatgaagaaaccattcagatgtcctatcttgacgcggttaaatacttcaccgaaagcaacgccgaattcgcggagcccgaccctgccgattacggtgtttgggtaacgggtatccccgttcttgtgggcaacgggcttgaagcagccaacgctcccgagtggctgagcggacttatcaacgacggtatcgttgccggtgtcggcgcggttctcggtttcgttccgcagatgctcatcctgttcctgctccttgctttcctcgaagcctgcggatatatggcgcgtatcgcgttcgttcttgacagaatattccgcaagttcgggctttccggcaaatccttcattcccatgcttatcggcacgggctgcggcgttccgggcattatggcgtcgagaacgatcgaaaacgaacgtgaccgccgtatgacaattatgacgaccacatttatcccctgcggcgcaaaagttccgtttatttcgatgatagcgggcgcgattttcggcggctcggcatgggttgcaacaagcgcgtatttcatcggtatggcggcgatagttgtttcgggcatcatgcttaaaaagacgaagatgttcgcaggcgaccccgctccgttcgtaatggaacttcccgcataccaccttccgacagtaggcaacctgttccgcagcatgtgggagcgcggctggtccttcatcaagaaagccggaacaatcattcttctttcgaccatctttgtttggttcacctcccgcttcggttggggcgcagagggcttcggaatgcttcccgaagacgaacttcagaactcaattctcggctacataggcagaggtatctgctggatcttcgcacctctcggctggggtgaatggcaggcaaccgttgcttccgttaccggtcttgttgcaaaagagaacatcgtcggcacgatgggcgttctttacggcgcaagcggaaacgtatatgcaactcttgcagcgaccttctccggtatcgcaggttacagtttccttgtattcaaccttctttgcgcaccctgcttcgcagctatcggcgcaatcaagagagaaatgaacagcccgaagtggacttggttcgcaatcggttatcagtgcctcttcgcttatgcggtttcgcttatgatttaccagttcggttccatcttcaccggcagcatcaatgttatcggtcttatcgcggcggttcttgttcttgcgttcatcgtttacatgctcttcttcaagaagtatcatgaagcaaccacgcttaacaaaaaagttaaggtaagcaaataaaacaaatctgaaaaggagtgacatatcatgttggcttggctttcggaaaatcttgcgacgataattatatgcgttgttttggcggcgatcgttgcggcaatcatcgtgtaccttgtcgaaaacaagaaaaaaggtaagtcctcctgcggcggtaactgcgggcattgcccaatggcgggcaaatgccatgaacacgcagaaaatcacaaataaacacttgggagacgggggtggaaaatcttcgtctcccgctttttaaggcggaggtaagcaatggctaaccgaaaaagcagcctgactgcctcaaatatcagataccttattgcgataagaaaactctgcgaggacggaaacggaacacgctgcgttcgaatcgcggaggtactcggggtttcaaaaccgagcgtgcatacgatgataaattcgctgaaagaacttgaccttgtccgaaaggacagatacggcgaagtttttttcacggaagaaggcagtcgtctcgcaaacatttacacagagtattatgagaccgtcagaagacggatagcggagttcattccgaacaatgaagcggcaaacgccgcaacctgcgcggttttggcggaggtaggacaggatggactcgaaaatatgataagtaaatcggaaatgagcgattaaggagaatttttatggctattgtggaattcaaagatgtcagccgtgtttacacgagcggagaccacgagctgaaagcgcttgacggagtgaatatgtctcttgaagagggcaagttcattgttgttctcggaccgagcggcgcgggcaaaagcacgctgctgaatcttctcggcggacttgacagcccgacaagcggaaaaatatatgtcgagggacaggatatatccaccctgtccgaagacgaacttgcggattacagagcggcaaaagtcggatttgtttttcagttttacaaccaagttccgacactgaccgttcacgaaaacgttgcgttggtaaaagagatcgcgccgaacgcgctctccgcaacaaaaatgattgaagaagtcggactttccgaccatttgaaaaacttccctgccgaactctcgggcggcgaacagcagagggtctctattgcgcgtgcacttgcaaaaaacccaaaaattctgctttgcgacgagccgacgggtgcgcttgactccgaaacaggtgttcttgtgctgaaactgcttctcaaaatggcaagggattacggaaaaacaatagtgatagttacacacaaccaaaacatcgcaaaaatggcggatgtcgttttgcgagtaaagaacggaaaaatcgtttcctgtgaagagcaggcttcccccgcatcggcggacgaaatagactggtaaggggtggagatgatgttattccgtaaattgtggagaacgatgggactttacaaagcccagttcatttccatgataatcatgatagccctcggtatcggaatctttgtgggattcaatatggaatgggtcagcattgatgtcaacacctcttcttttttcgaaaaaacgaactttgcggatttcagaataatttccgacagcggtttttcggaggacgacctgaacaaagtcaaagatattgacggcgtaagcgacgtttcccgttttttgagcgtcaacgcggatgttgaaggtcaaaacggagataccgtggcgctgaccgttaccgaaaacgaaaacgtttcgaagccctatctcatttcgggcaaagaatacgatgcaaaaagcgaaaacggcgtttggctttcggacaaatacgccgcagcaaacggttttgaactcggcgacgacataacgttcaaatacaaaacgatagaaatttcgggcaaggtggagggccttataaaagcaagcgaatatctcgtttgcgtgcgtgactcatcacagcttatgcccgattacaatactcacgggtttgcatatatctcccccgtcatgtacgaaaaagcggcaaagatggcgttttatccgcagataaacattctttcttccctttcgaaaaaagaaatggcggaaaagatagacgctgcgcttgacaagacgcttcttgtgctgtccaaagacgagaactcctcttatgcggcgcagcagggcgaagcggaagagggcaaaaccatgggttccgttatgcccgttctgtttttgctgattgccgtgctgacgatggttaccacgatgcaccgtctgacggcgaaagaaaagacgcagataggcacactcaaagcgctcggattcaaggataagaagattttgagacattatacctcgtatgcgtttatgataggtataatcggttctgcgctcggtataggtctcggatatttcgtggcatggtttttgatgaatccgaacggctcgatgggaacatatctcgatatgcccgaatggaaactcggtattccgtggttctgttatataattcttgccgcaataatcgtgctgctgacgcttatcggattcctttcggtcaagcagatgcttcacggtacacccgcagacgcattgagaccgtatacgccgaaaaaggtcaagaatctgctggtagagaaaacaaaatggttccaccgcctttctttcggaacacgttggaatctgcgcgacaccatgcgccacaagtcgagaacggcgatgagccttatcggtataatcggctgtacactgctcatagtaggctcgctcggaatgagagacaccatgacggcatttctcgatatgtattacaacgatgcgacaaactattcgtcaagaatttacgtttcggaagacgcaacggacgaacagatacaggaactcatcaaaaagtatgacggcgactggtcagcgtccgtcagcgtacaactcgacgaaaaggcaatttcgcttgacgtatacgaactgacgacaaacaaagttcgcttcccgtccgcagagacaaaggactttgaaaacataggcgacgacggcgcttatatctgcaagcgtctttcggacgaatttaatctgaaaaaaggcgataccgttacgataagcccctacggttcggacgacgaatacacgctcaaaatcagcggaataatccgttcggtatcggaaaatatcattatcagcccgaagtatgcggaaaagttaggacttgacgtcaaagccgactcgatttatacgtcaacggaaaaagccgatataaaagcggaaagcgcgataaagagcgtgcagtcaaaacagatgataatagactcttttgacactttcaacgaaattatgaatatgatggtagcggttctcatcgttgccgcaacggtgctcggcatcgtggtactttacaacctcggcgttatgagttacacggaacgttaccgcgaaatggcaacgctgaaagttgtcggcttccgcaacagaaagataggaaaactgcttataagccaaaatatgtgggtaaccgttatcggcgttatcgtcggtattccggcaggcataggaacattgagtttccttgtaacacagttggcgtccgagtatgagatgagaataagcgtaagcgtgctttcgattgcggtaagcgccgtgctgacattcgcggtttccctgctcgtcaacctgatggttgcaagaaagaacaaaaagatagatatggtcgaagcgctcaaaggcgcagaataataaggaggctgttttatgatgatcaaaacaacggttaacattaacggaatggcttgcggaatgtgtgaagcacacgtcaacgactgtataagaagagagttttccgttaaaaaggtcaattcttcgcacaaaaaaggcgtttgcgaaatcatctcggaaatgccgctcgatgaacagaagctcagaagagcgataacggacacgggatacgaagttgtctcggtcgcttctgaaccctacgtaaaaaagggactgttttcgagataatcggtaatatccgatattaaacctgttcgaacggcggaacgggaaacgcaagatcttcgacggaagctgccgatgcttgccgaactgcaatatcctgcgtttccgttccgtctgtcgatatattttcggggagaaaaacatggacgaaatttataattccggcgaagtctgtccttcgaaagaaaggagttcgggacatcgggcaacggagcgcgaaagagttatctacggcgaaagtgtcgagatagtttcacgcgacagcgacaaaactgtttacagaataaaagaaagcgacggggacgttgttatgacgtcttatcgcgtatttgacggaattgacctgatatacaacgacgtacacacgcagaactgcgtggtggaaagaaacgacgtcggaaacatattgcagataaaccattgccgtgaaggcagaatagaatgttcgttcaacaaaaacgaattcctttatctcggtccgggcgatatgtccataagttgcaaggaagatgcgggacacgattcgttctttcccacgggacattatcacggaatcaccgttatgatagacgttgaaaaagcacccgaatgtctttcatgttttcttgacgacgtaaacgtcagtcctgcggctcttgtccgcaaattctgcggagacaacggcttttttgttgcaaggtccgcagaatgttttgaacatattttttcggagctgtattcggttcgtgacgacataaaaaaaggatatttcaaagtcaaagttcttgaattgctgctgtttttgagcgcgatggacgaaaccgaaacggaagaaagcagcagaagatgtactgcctcgcaggtattgcttgcgaaaaaagtgtgcgcttacatagcaacaaaactcggcgaaagactgacgatagaagaacttgcggaaaaattccacgtctcccccacccaactcaaaacctgttataaacgcgtctacggagtttccgtttactcttatatcagaacgcaaaaaatgcttgcggcggaaaggctgctcaaaaccaccgatgaaaccgtgcttgccattgcaaacagattcggttatgacaacggctcgaaatttgcaaaagcgttcagagatattataggtgtaagtcccagtgagtacaggctgaaagaaaactattagtgggatgtaaaaaaagtccagaccgcaaaaaggcaaaaaaccgaaaaattagatttcacaattgatatgcatttatatacagaataccaatttatttcttttattctttaaaaacggagaatgagcctttttgctataagcaaatctcacctctcgacgtactatttgtacgccaaggctgatgatgtccggactcttatcgcccgacacaggctattttc

SEQ ID NO: 1736 - DNA, 32759 bp, Unknown
  16S sequences of unknown bacteria
tgaatacgccgcgcgaaattgttgctgcgcaacacgcgcatggctgttcgcaaaaaatctgtacggtttttttgcgaggggcatagggctaatattttgacagagtcctataccgcaatggcggtggcggtatgcgagcattcgaacggctggtactacacgtcgaacttctttgtgggcgattggcagtattaaatataagaaaaatataagcggacagcggggaaagaaccttgccgtccgttttgcgtttgtgatacaaagacagggacaaaatcagcaacgacgaatttattgaatactcaaccacacatgtttttatcgcattgttgacaaaacccgcgttcggtggtatcattatgtcatagaacaaattacaggggagttttgtatgaaaaaagcggttgcggcgctgttggcgctgacggtatttctttcgctcttttccgcattttcggttttctccgccgcggcgtgggacgagtcggagatattcacgtcgggggacggctgctggcagtattatttaagagaagaggacgacaaagccgttataatgggaacggtcgaagaacccggcgagacggtcacgattcccgctgaaatcgacggacacaatgttgctgccgtcggcgaaagggcgtttctgttctgctcgagtatcaaaaaagttgttgttgccgagggaataacggagataggaaacgatgcgtttgcggagtgttcttccgttacggaggtgtctctgccgaacggtattgtcgctctcggagagggagcgtttttccggtgttcgtcgctgatgtcgctgacgcttcccgaaagtcttgtctccgtcggagatgaagccttttcgttttgctcggcgttgaaaaacatcaattttccgtcggggcttgaaaatattgggcgcagcgcattttcaaactgctcctctttgacctcggtaacgcttccgcaagggtttaaaacgctcgggcgatatgtgttcggcaactgcacaaaccttgaacgcgccgatctgtccgcaacaaaactcacggaactttcggacagtatgttttcgcggtgcaaatcgctcaaaaacgttgcgctgccgtcgggcttgacaaagataggcggaaacgctttttatctgtgcgacgggctgacggatgtgaacattccgaacggcgttgcggagataggcaaagaagcgttttacaactgttcgcttaaatcgcttacgcttccgagcgggcttaaaacgataggcgatggggcattttatcaatgctgggcgataccttttgtgaatctgccgcagggagttgtttccgtaggtgcggaggcttttgcgaactgtcagcatatcagcgaagtgaccgttccgaacagcgtgaccgatatcggcaaaaatgcttttggcggggatttcagtctgaaagcgatgttcggcgtgcgcggctcttctgcggaaaattatgcaaaggcgaacggcattccgtttgtcgcttattcggagtattacgacaccgcaacaggcgtgcgagtctttgcggaggtcggcgcgggcgcgaagttgaaagtaagcgtgttgaaacaaaacgaagcgtccgttttttatgagatctcatttgtcaaaaacggcgttgaagtaaagccgcagggcacggtacgggtgttcctgcccgtccctgaatcgataaacgctgacggcgcaagattccgcagagttgacgaaaaccgcgatgtcatcgacctttattcgaccctctgcaacggcggttttgaagtgggttgcgatgccctcggcgagttcagaataaccgacaaaaatgccgaatatgtgggtgacgttgacggcaacggcagggtggatataacggacgcgatgctgctgttttatcatgttgccaaaaaagaatttcttgcggaagaccgcctgccttatgcggaagtgacggacgaccttgacgttgatatttcggacgctatggcggtattttattacgtcgccaaaaagtccgatacgcttgttatcgggggcagggacaaggcgcttgaaatattcgaaaacgtgaattacgaacgtgtcagatacggcagcaagcccctgcaatgggacgaaaaactgtataaaccgagcgttatccgctccgaagaatatgttcgctggtggatagacggttacggcgcgggaccgcacaaaagacctgacggaagagattgctttaccgcaatatatgaaaataccgattacaaacagggcgattttcgcgcagagggtgaaaactgcgcgggcgcgggcacggaaaacagcggcgaatttatggttctgcacctgtggatgcagtcaaaaaaaggtcaccgcgaaaatcttcttgacagcatttatacccgcatggcggtaggctttaacgattacaacggctttgcgggatcgtcgaatctgtttgccgcaaaatggggtgaatgattgcaccgcataacaatataaatatcggcatttttgcttttataaaaaatcgggcagtaaagaacgcaaattctttactgcccgtatttttagtcaaattatattagtgggtcaagaagaacattgcaaggaaaagcaatgtgatgacccaagtgccggcctttatctctttgactttgccggagaaaagtttgataacaacgtatgaaatcaaaccgaacgagataccgtaagatatgttgtatgagaaaggtatcattgctattgtgagaaacgcggggacagagacggaaacatctttccaatcaatgtccttaacgctgcccatcatcagcacgccgacatatatcagagccgcgccgtaagcgtaggcgggaatgagttttgcgataggcgcaaagaacagagcgaccgcgaaagcgcccgaagttacaagcgaggtgatacccgtttttccgcctgtcgcaacaccagcggaggattcaacgaacgtcgtaacggtggacgttccgagaacggaaccgatgcaggtcgcaagcgcgtccgccatcatcgccttgttcatgttcggaacatcaagttcgcccctgtcgtttttaacaagcaggttgccgccgcggcaagcgccgtacagcgttccgagcgtgtcgaacatgtccaccatacagaaagcaagagaggtggtgatgaagagtatcacaagaccgccgacggtgtgaccttccgtattaaggtatgcggagaagtcaaatccttccgtgaatactttgccgaaagactcggttgcgaatgaagcgaacggtttgagcgggttgaacgagaagttttccgcgaaaccggtgtagaaaccgttgaccgtaaagccgagaacgtaataaagagctgttccgccgaggattccgtaaaggatagcgcccctgatctttttgtaagaaagaaccgcaatgagcagcagcgagaaaaccgcgacgagaagcggcataacggacgcccagcttgcgtcgccgagaagattgaacgatgcgagcgtaacgcctgttgacgcgctgggaataactatcttcgcgtcttgaagtcccaaaaacgcgataaacaagccgatacccgcgggaatagccgccttaacaacgggcgggacggcgtcaaaaattatctttctcagtcccgtggcggtcaacagaacgaacacaagaccgtcgatgagaacgaatacaagcgcatttgcgtaagagaaaccgagcgtcaggcaaaccgtgtatacgaagaatgcgttgattcccataccgggcgcctgcgcaagcggcagattggacagaagtcccatcagcaccgttccgatgattgcggaaagtgcggttgtaacatacatggcatcgaacgataccacgccgagtgttgcaaacattcccgcgttgacaataagaatgtatgccattgcaagaaatgtggtcagacccgcgatgatttcggttttgggcgacgaacccattttggtgtattggaattttctgtcccaaaatgaaacgtttttgccagtgtctttgtttttcataaaacaaattcctttctcggtatgagtttttgtttgcctgtgaaataaggcgttaagacgcaaaaaaagtacaggcacacctgctttttgacaagtgtacccgaacgattgatattacttttaagttgcgccgcctcaatccgccggttcaaacagaataattatatcataataaaaacacggtgtcaagcggttaaaaacaaatgtcgtattttgtcgtattttgcggtgcggaaaggatacaatattgcgtgaatacgggatttttgcggtaacgccttttcaattcagtcctgtttttcgctatcgggaagaatgtctgcaataaaagtttttacggcaccgtaaaccgtttcaaacgacggttttgttactttgccctcaaagcggaatttgtcataagaatgtttgagttcgtctgcgcggtttaggaaagcgtgaaaatcccccaattttctgtcgctgttttttaatgtgttcaatatatccgttttatcaaggtttgtaatttttgagatataatacaagtccgttacatctttgattcttcgaaaaatgctgtctgacgatatagaacagattttatctgccgtcatttgagacagcgttacaccgcaaaaacggaaagattctatttcatatatcttcgtcggcggcacaggtcggtttacgtcaatatccatagtgaaaagaatttcgtccgtctccctgttttttatttcaaagcctgcggaacgccgttctccgtaaggtcttgaaattccgactgtcaaaaattcgttgtatctgcttattgctttttgcagcgaatcagccatctgttcggttgtcggcggagtgtccgagttccagtttgcgtcaatgtcaaccgtgtgtctggtctcttcggtatatccgccgtttatcaggcaggctcttaataccattgaacccttgaaacttacgggaatattgctttcatatatcgctttcattatactgtacatcagtttttcttctgccgtaatatccatttttcgaactccttttattcgtaataagcaactgcttcttttgcaagttcttcaaatctgtcctgatattcgggcggaacggaaattccgttgaaactgtcgccgttggcataatagtatttgcttattgcttccgttattccctgcatatcgaggatctgttcatttgcaagtgcgtcggatagggttctgttgaaatccgtatagcacaatccgtttttgtgttcgacgcaataaggacttattttgttgccgagaacgacgatcccgttaaagcgtgtcaaggaatcgttaccgtaaacccatacgagaaattcgtcgctgtgtccgccgaaattcccctgacacataagcgcctcgtccaacgcaaaaacaacatcttcgatcatttgttcgcgtaccgctttaagccatgaaacagccccgatatagtctcttcttttcggcaggtcttcttttttcgggtcatattcgggcagtttgacggttctcctgtttacggcatcttctttgattcgcttttccaacaaatcaagtatatattcgggcggtttgcgctgctctgtctcccaattttgtatcgttcggaacggaatattatatcgtaccgcaaattcggactgcgtaattcccaatgcttttctcatttcgcggacattcacacttatcacctcatatatattatacacccaatgggtgtatttgtcaacatcattgttataaatatattatcccgcaaagcgaacaaaaaaacggcagagccgccgaaatgcggttctgccgtatatgtttttattaaatgcgcaacttaatattgctgattgcaaaaacgtttgctacgcgttgtacttttgcgatgggataaccccgattttttgcgttgtgtggggttaagacttattcctcgtcctttttcggcacctcgtggtagaggttcagacggaacataagagcctcgtcgtcggggttcgggcagcgaatgtatgcgccctcgacaatgccgcctttgagaatatttgctatacccatgatttggcagaatatcgcaaaaaagccgctgtattttttgcgattagccatgcgcggttcgttttaacgaactttcgcgcggcgtataaaaatcggttttaagagtttgctcggcttttcaatgaggagaattgaaaaacgacgcaaacttcgcgaagcgaaaagaaaaaggctatgcgattatgaaaaaccgcacggtcggagattatttatcttcgtcctttttcggcacctcgtggtagaggttcagacggaatataagagcctcgtcgtcggggttcgggcagcgaatgtatgcgccctcgacaatgccgcctttgaggatattggctatacccattatctggcagaattttgatttaagattcagcacgtcgccctcgtccgtttcgaggaaaacatcgcccttgcaggcgtcaacggtcttcatcagatccgcgatgtcaatgttgtgtacaagattaagtctgttcatatttcctacctcctttatctgctttcattatatacttaaaaatgcaaaaaagtcaagcggtttgcggaaaattttacataaaacatgcgttgattttattccggcggacggagtatgccgactgtgcccgaaaaaagagcctttcacggaacggttttcgctccgcgaaaggctgcaatttttatacctgttttttatcaggcgtatcctttggcttttgcgcgaacagggtacagcccatattgcggaaatgctctatcttttcgcgaacaaggtcttcgcttattttgaaatattccgcaaggcattttatgcacaaaaactccgttgcgccgcgattgaccatacgtttgtatatgcctatctcgtcgttttcgagttccttgccgcagtttttgcaggtcgccatggtttacagttttataagctttactctgtaaaccttgcagctcgttgcgggcaggtcgaggtagaagttgtctttaacggttatcttttcgtcgtcgagcatgccggtgagttcaagaccgtagccgcagtttgcggtaagaccgagttcgaaaagattgatgtacttgcgtgcggaaccctcggcaaagttgaatacgccgagtgcatattcgccgccggaaaggtgtctgaacaggagaagaacttcttcgatctttctgttcggcgtgtacggcggtcttgcttcctcgtcctggtcaagggcgataagagccttgtttttgaggagttcgagcgtgtgctcgtcgcagtttctgatgtcgcagcctatcataagcggggacgccatcatgcaccaaagagcaaagtgcatatcatactgttcctgattgcagccgccgaagccgacgttgcccttgttgtacataccgcagataagcatatccgtgtcgttgtagcagccgggcgcggactgactgagcatggggatctggctgaacgcgatgtcgcggaacgagttcggacggtcaacgatgtcgcctgtagatctgtacatatgcgcgcctgtggaacgaatccactgccatacgttgtcgctgccccagttgcaggcggagaaaagaatctctctgccggtggctttgagtgccatgcccattctgtaataaagcagaggtccgtcggacgtctcgggcttgtagcagaagtcgtatttaaggaagtcgatgccgaaatccgcaaaggtctgcgcatcgagatattcgtggtcaaagcttgacggataacccgcgcaggtcagagttccggcgcaggaatacattccgaatttcatgcctttggagtgaatgtagtccgcaaggtatttcataccgtggggaaattttttcgggtctgcgacaagtctgccgtcttcgcctctttcgcgaagcgaccagcagtcgtcgataacgatgtattcgtatcctgcgtcgcgcagtcccttttcaaccatcgcgtctgcgatgcccataatgagttcttcggaaatgttttctccgaaagtgttccacgagttccagcccatcggcggtctttgtgcgagcatagtgtcctcttttctctgccttgaaaaataataattttttcagcgtccctccgacataaggcagagcgtcggagaacctgttttttgacatttttcgagtcgtttttaatacgaccgttcactgtattatatcatactttttcttatatcgcaaggcaaaaaatgcgaaaaaaaataaacggcgtttttaccaaaaaagctcactccgtttatgcaatgattaccaaaagaaattcgaatcggcggcgaaaaaaaatacttcaagacacaaaaatcgtcacaaaacgacgttgtgcgtctatattttacgtttttttcacacattcctcttgccttgtcggtaaaaaaatgttatacttacaagaagataatatacaatatattatataatcggatagtattgttccggcggcattcctcttcggcggacggactttgcagaatagcaaacacggccgaaccccgaaagatccgaccgtgcggttttatttgcttactttttgaaggtcttgcactcggtgtctttgcagttgcacgctccgacgccctcgacgtttattctgtccgattcgcaaacgccctcgacgttgaatatacatctgtcggcggcgcagtcaacgtgactgtccgagcaggcgcatgaagcgcaggcggcgttggcaaagccctcggtcttttcgcggaaactgtcacaacaggtttggcacgccttttttgcatcggaacctccgacgcgaacgtcctgcaaacagcatttgctttccgcgttatgcacacaggtgtgtgcgctgcaagaaatctgcggcattgtttttgttacctctctttttataaaatgagacgggcggctcggtcgttttttgcaaaaccctgaaacggttttgacgcaagtcgcctcaatccgtatttttgacagttattccgtttcgatacgcttcgggaggaggatatttttggcaaaaaagaaaaaaatcaaggcgaacgatacgcgcctttcggctaagcgccatgtttttcccatatttatgcttttcgtcggtatgctctgccttatcggcggcgtctgtcttgtaaattattttatgtccggtaagacgagttccgactccggtatcggaaaagtttatatcaacgaggtgatgacctcgaacaaaggcacgctgcttgcgcccgacggttcttccgcggactgggtggaactgtataacaactccgcaaaaaaagtcaacgtttcgggctacgcgctcgttttgcagaaatcgtccaaatcaaacgattcgcttgtttttcccgacggcacggagatagaagcgggcgggtatttgcttgtctactgcaacaattcgtatctttccgaatatatgtgtgcaccgttcaacctttccaaggcgggcggcgaaacgcttgtgctcaaaaacgcggacggcacttcgctcgattccgtcaccaccgaaaaaatgacgtccaattccgttatggagagaacgtcttacgacgcgggcgcgtggactgtaagcggcagacccacgccgggacagccgaacacagacgagggctatgcggtgcttgaggcgtcccgcaaaaacacggacggaacaaaaacgatagtcataaacgaagttcaatgcaaaaacaccgtcggaataacggacgaagacggagacagaaacgattggatagaactgaaaaacatctcttcttcctccgttgacctgaactattattcgctcggttcgagcctttccgcaccttatgaatggcagcttcccgccgtcactctcggcgcgggcgaaacgcttctcgtttattgctcgggcaaggatatttccgaaacaacgggagaacttcacacgaattttacgctgaaaacaagcaatatctgcgtcacggtctccgatatacagggcagaataattgattcggtagagataaaaacgctgtcccccgatgcgtcgtattccagagacggcagcggcgcttatgccgaaacgttttctccgactcccggctttgaaaacgacgaaagcggctttgcgagcgtcggcaaattgcttgacaagggcaaggacgggcttgtgatatacgaagcgatgtccaaaaatccgaaaaacggaggatatattccgcagaacggcggcagatattacgattgggtcgaactgaaaaacacatcgtcctccgaaatcgaacttttcgattactgcctttcgaacgacgcggcaacgacggatatgtggcggctgccagagaaaaaactcggcgcgggcgaatcgttcgttattatctgttcgggcagcgaacgcctttcgaacagcgaatattatcacgcgaatttcaagataaacggcgacgaacaggtatatctgttcaaaaacggcgaactctgtgacggcgtgtgtctcaaaggcacgaagataggtcagagcctgacccgcgcttccgacagagcgggcttttggacgaataccgcaccgtctccgagatatacggacggcgacagcctttgttacgcggttgcttccgagcccgtgatagaaacgaaatcgggcgtttacgatgcggctgtgacggtcacgatatctggcgagggcgatatttattacacgcttgacggctccgacccgaccgtttattccaaaaaatatacagccccttttgaacttgcggagacgaagtccgttcgcgcagtctcgtactccgcgggaaaaataaggtcaacggcggcggctgcgacttacatcgtgggtgaggacaacacgctgcccgttatgactctttgcgtggacagggacgacctttacagcaacgaaagcggaatttatgcgacgggctacaacgcttcgtccgaatttccgtatctgggcgcgaacttctggaaaccgtgggaaaaagaatgcacggcggagttttttgagaacggcgacggcttttcgatagactgcggcatacgcattttcggcgcatattcgcgcgcggacgataaaaagtcgttccaactcaaattcagggatatgtacgggcaaagcgaacttgtgtatcccgtttttgacgaacttgacacggtaaaaagttttaaggcgctggtgcttcgtgcgggttcgcaggattatgctcacgcaatgctgcgcgacgagtttttcacaagcctgctcaaaagtcattcggaaaatctttacgttcaggcttataagccctgcaaattctatgtcaacggcgagtatttcggcatctactatttccgcgaaaaggtcaattcggattacgttgccaaacatctgaacgccgccgaggagaacaccgacctgcttgtgggcagcgaggctgtgatttacggttcgcgggaggaatttcaggaactgcgcgaatttgtggaaacgcacgatatgcgcaacgctgaaaactacaaatatgcggaagaacggatagattttgtcagccttatagattttacgataggcgaatactattcgggcaaccaggacaacggcaacgcaaagtggttccgaaacaccgcaagcgacgacacgcgctggcattggatatactacgacctcgactggggcttttattacgacacaccgcttgatttttacctgcgcaaacgcgggcaggcggaatacggctttgcaaagataaacgcgcttatcggcaacctgcttgacaatcccgacttccgaacgctgtttttggagcgaatgtcctaccatattaaaaatacgttcagcgaagaagtcgctctggcgcacctgcaaagcatagtggataagatagaacccgacatgaagcgcgaatgcgaacgctgggacaaatcgtatgcgggctgggaaaaagaagtcgaaaaggtcagaacgtatataaaggacagaaaagcgttcatgctgcccgagataaaagcatggttcgggctttcacaggaagaatttgacaagtatttcggataaagcgtttcgcgtttttccgaaaccgaaatataaggagcagaaaatatgatctccgaaagaataatcacaacgtcttattctgcgtcgcaggtgactccatgcggctggcaggcggcaaacctgcgcttgcaggcggacgggcttttgggcaatcttgaccgcattttgcctgaggtgaaagaatcccgctggctcggcggcaacagcggcgattatgacagtcttccgctttggctttcgggctttgtgcccacggcgtggctcatctccgacatcgaaatgcaggagcgcgcgggactttatatcaaaaaactgcttgaaaacaacaaaaacgggttcattccgaaaggtaagaacgaaaaattcgacatcgcgtctctttttgttttgctgaacgcactctgcgactatgcggaggcgagcggcaacggcgaggttgacggatatatacttgccgcgctcaaagaactcgatgtttatacggacacgcacgttctttccgagaaagcgtcgctttgctgggcggacgcgctccgtccgatagcgagggagacagaaaaaacggaagaccgctccctgcgtcggcttgcaaaaaaacttgcgtgcatgggctttgactggctcggatttttcgatggctgggactatgcccacgtcgccgcttccgacctgcctgcgtcgtttttaactgacatacacaacaatattcaggcggtcaagaccgccgccgcgcttgccgatttttacggcgatgaaagttacgttgaccgcgcgtttgagatgatatacacacttgagcgtttccacggctcggcgataggcatgataacgggcgacagccgtctcggcggcaaaagcgcatcgagaggacttgacacggacgcgctctgcgaatatatgtcggcgcttgccgcgctgctcaaaacgtcgggttcggtggacatcgcggacaggctcgaacgcttggcgtacaacgcttatcccgccgcgttttccgcggatatgtgggcaaaacagcgtgtgcagctcgtcaatcagatacagtgcgtcgcggacggcgaacacccgttttcgaccgcggacaaaagagcgggactgttcgggctcggaaacggcaaaaaatgctccgtcgcagcattctgcaaaggctatgccgcattttgcggcgtttggtttctcaaacacgaaaacggcatatatatttcttcgcttgcgcccgcaacgcttgaaacaacgatagacggcgcgaacgtaaaagttgaggtcggcggcgaatatccgttccgcaacacttcaaaaataaccgttacggtttcttctcccgtcacgtttacgctgggcgtccgcattcccggttggacggaaaatatgaaaataggctcgggctcggagatgcttatgccgcgcaagagcgagttttacacgttcaaaggcacatggacggactcgaccgttttcagccttgacacgaacgacaaattcagattgaacagactgcccgacgacctttatatcgtcagccgcggcgcgctttactatgccgtgcccgtagcggcggacaaggcttataccgagggcaacacttatccttacagcgaatacgaactttccgcaagcggcggctggaactttgccgtgcttgccgaggacaaggacagattttcgaaatccgtcacgtttgaggataagccgctgacatcgttcccgttctcgtcggctacgcccgcagtcgaaatgttctgctgcggcaaacgcatacagtggggcataaaagacggcgcggctgtcagaaaaccgcttgccgtcgcggcttccgacaaaaaggagatgctccgttttataccttacggcgcaacggaactccgcatggcggctctgcccgtcataacgcagaacgtctgataaggctttcggcacagaaaaggatcaaacgaaagttgccgcaacgcggcgaacgcaacatatttttactctgaggacatcgcattggaaaacgaaaacaagaaccccgacacacaagataacaaacccaaattttcattccgtcccgcggaagcccccatagaagactttcctcttgcggaggaggaggacgaaacgccgacttccgacggttacggctattccgatttcgaagctgacgacggagacgacgactatcccgaggaaaagctgtcttttcgcgaacgcctcgcaaaaagaagagcggagacggaagcctcaaacgctgcggagcaggcggcatttgacgaagacgatgaatatgaagagcacgaggagaaagaccgcgcgccgcgtccgtctttccgtgaacgtttcgccaaaagcagagccgcgcaaaaagccgcagaagaggaaacagatgaagacaaagagaacgaaactttctctctgtctctgcgtgaacgccttgcgaaaagacgtgccgagcgcgaagcggcggaagccgcggaggacgacgaatacgacgaggatgaagaggacgaaacttcctctctgtctctgcgtgaacgccttgcgaaaagacgtgccgagcgcgaagcggcggaagtcgcggaggacgacgaatacgacgacgaggacgatgaagaatcacgtccgacccgccgccgcatagccgtgcggcagtccgaaacggctgcaagacccttgcagagagcggaaaaacacgctgaaagacctgctgcggacaagcccgcgcagataactgaaagccgcgttgaaagacatgctgcggacaaacctgtgcagagaggggaaaagcccgtcgcaaaacctgttgcggataagcctgcgcagagagcggaaaaacccgtcgaaagaccctcgggggacagacccacggcaaagaaaacggacagccccgtaaagaataggcgaaaccatgctccgaccgcagtcgaaaaaacggctcaaaacagaaagccctctaatcaagaaagcggttcgggagataagaataaatcaaaaacgttccccgcgttttcgggcagcgaactcaacgcgggcggtgcggacgaaaacgtcaaaaagcgttttgtcccgataatcggcgcgtttgccgcgtttattgcggtgtgtgtgatttttacgctgtgcgcatctgttctgacgagaaagaccgttaccggcagccgcgtttacatcagcgaaataatgacttcgaattcttcgagcgtgcccgcgccagacggtgaattttacgattggatagaactttgcaacccgaccgacgaagctgttgacgtttcgggcttcggtttcgggcttgattccgccgctgcggtgtggacgataccgagcggaactgtgatccccgcaaaagggtacgcgcttgtgttctgcgcgggcagagcgggagactcgggcagagtgggcgaagtttacgccacgttccgtctttccaaaaagggtggcgaggaactgacgcttttggcgtcttcgggcaaaacgatagatgctcttaaaaccgagacgttggacagaggcaagacgatgtaccgcgtcaaagagggttcttcctttgagatcggcggcgacccgactccgcttttcccgaacacggaagagggcagggcgaattaccttgcgtcgctttatgtggacggcgacccgataaagataagcgaaatagctccgaaaaaccatatcgggcttaccgattctttcggtgagacgtccgactggatagaacttcacaacacgtcggatacggaagtcaatctgaaaggctacaaactttccgacagttcggaagagccttatgcatggtcgtttcccgatgtgacggtcgaatcgggaggttacatatatgttttctgctcgggcagagacgttgaaaagggcgacgagatacacgccgattttgtgctgtcttcaaagagcggaaccgtggtgcttgcgcgtcccgacggcgggatagttgaccatgtggaatattcgggcgttgagacgaatgagtcctacgccgacgacgaaaacggcaactttaccgcaacgccgtggcagactcccggctttgcaaatacggttgacggctatgaaaaatatgccgaaacgctgaaaatgccgagcgggcttattatcaacgaggtcatggtcggcaacgagaaatactgcgcgcataacggcggcagatattacgactggatagaactttacaacgcttccgacgcggatatagacctttccgaatatactctttcaaaagaactctccgatctcggcgcgttcacgctgccgcagcggacgcttcgccccggcgaatacgctcttgttatgtgttcgggcgacgaaacgctttcgacgtcgaattatatccatgcgaatttcaagatagacaacgacggcgaagaactgttcctttcaaagaatgacacggtcgttgacagcgtatacttctcaaatatcagggcaggttattcgttcggccgttcaagtctcggcaacggcttctacaatttgagtcagcccacgcccggctatgtcaacggtatgggtataagacaggtttcgtcagcaccctttaccgacacggcggagggcgtttacaacaatgtagcgaacgtcaaagtcgcgttgtccgctttcggcgacgcgacggtttactatacgaccgactgcaccgagccgacatatacaagcacgcagtacctcggcgaactgacgctggacaagactaccgttgtcaaggcggtggcttacgaaaaaggaaaactgccgtccgcggtggtgacgctgagttacatcgtcaacgaaaatcacacgctgcccgttatcagtctttcggcagaccccgacgacctttttgattattacacgggcatttacgccgacggtccgggttacacatacgagtttccgcataaaggcgcaaacttctggcaggactgggagcgcgacgcgcatgtagcgttttttgcggacggggaagacgggttttcgcttgactgcggcataaaaatgttcggcaactacggcagagcatacgaccagaagccgtttcagataaaatttaagaagaaatacggaacgtccgaactgcattacaaaatgtttgagcagtattcggatatgtcggtttttgacgcgcttgttttgcgctgcggttcgcaggacagttaccgttcacgctttcgcgacgaactgtttacctcgcttgtcacggacagctcaagttccgttctttcacaggcataccgcgcctgcgtgctttatctgaacggacagtattggggcgtttactatatccgtgaaaaggttgacgagaacttccttgcgcagcatgagaattacggtcccgattctttcaccatgctttaccgcaacggtgaagtcattatgggcgatactgacgaaggctatgcgtcgctgatatattttgtcgagacgcacgacatgacgctcaaagaaaattatgattacgtctgctctcggatagatattcagaattacatagatttcaagatttttcaggcttacagcggcaactacgacctgcacaatatcaagtattacaagagcgatgccgagggctcggacggcaagtggcggtggatattctacgaccaggattacgcgttccgtgaactcggagattccgttgcgcgcaccgtcgaaagcggatatcactttatcagcaacactcttatccgaaatctgctgaaaaatcccgactgccgcgctttgtatctttcgcgtatgtccgaactgttttcttcggcgctttccgcggatacggtgcttgcaaaaataaactccctttatgaagaatctcttcccgaaatgcagcgccattgcgaacggtggtccctttcgttcgacaactggaaatacgaagtcgatgtgcttcgccgcaccgtaagcgacagcggttcaatcgaggggctgggaggtctcagttacggcggcagccgcattgcgcaggtgcttgcaaacctgaaaagcacgctgtatctgaccgatgaagaatacaacaagtatttcggcggtctcagcataggttaacggcgcagcgcttattgcacgcccaaacagataggttttttgcagcctatgcacaaatgtgcttcacagataatgaaaggggatatattatgtccaaaacagacaacattctccgatatctttcatggtgggcgatagtcgcttccgtcggctcgctcgttatgctttcttttgtcagcacaacattctttattccgggtgcgaactttgtagccaccatgtttttactgctcggtatgacaggcagttttcctctgctgctcgcttccgcggttttgctgctgctgtatttcttcggcgcaaagggcgtcaaaatgcgctccgcgtggctgcctgccgttatcgccgtgcccgtgcttgcggactttgttatgttcttttactacctgttccgggttatccttttcggcgttgattttacgtggcagaccgtgccctcgtttatttacgccgccgccgtcgcggtctttctcgtcctttattatgtcggacttgtcaaagagcgtaagggtaaacaaaaggatatataaatatgaagataaagaatcaggttgatgatgtttgacctgaacaaggtatattctgccgaaaacggcaccgacattttttttaaatacataaaacccccgagcagacggaaaatgtctgcccgggggacttttatttgcgttctcgccgcgcatttctaaaacatagacatcaagggcgcgcgtcggctgatgccgaaaactcgggctgtgtttcagccgtctgttttctgttcaagccgcatattttcgtcggagaagaagttgaattttcgtgcgattcgggtcgcagtttattttgtatcgcaaatgtcttcgccgaaatgcctcaaaatccttcgccgaaataccccaaaatccttcgtcgaaatgccccaaatgtcttcgccgcctattgactttttcaaaaaaaaaggttataatacttttgaaaggtgttgattttgaatgtcgaacggctatattaagcgtacttgcgacgaaaatctcaaactgaaacttgaaactttcggtgcggtgcacattatcggaccgaaatggtgcggaaaaaccacaacggcaaaacagtttgcgaaaagttatatagaaatgcaagatcccgataaaagggaaatgtatctggaaacggcaaagataaaaccgtccaatcttttgataggcgaaaatccgagacttatcgacgaatggcagatagcgccgaatctttgggatgccgtcagagtttccgtagacagaagaaacgaatcgggactttatattcttacgggttcaaattcgatagacaagacttcgataatgcataccggaacggggcgaatcgacactctgaatatgtatccgatgagcctttttgaaacaggcgaatcaaacggcagtatttctttgtctgcgctgtttcgcgatgaaaaagcgttggatgacggctgccaaacggaactttccattgacgaacttatattcgccgcttgccgcggcggttggccgtccgcacttttcaaaaacagtgataaatcgaaattgcttgtcgctcaaagttattttgatggactgtgcagggaagatatttcaaacatagacggaaaaacgcgcgatgaaacggtgacgacgcttcttttgcgctcttatgcaagaaatatttcgacaaccgccgccaatacctcgattttgcgggatataagggcgaataccgatataggagaaactacgttttacgaatatgtcgcggcgctgaaaaaactgtttgtaatacaagacattgaggcttggtgtcccgccataaggtcaaaaagttccatacagtctggcaataaacgcgaatttgttgacccgtcgcttgtggtttcggctctcggtgtggaacccgactattttaatcttgatctgaaaacgttcggatttatttttgagacgctctgcatacgcgatttgaaaatctactcaaatgcgttgggtgggcgcgtttcgtattacagagaccgctatgggcttgaagcggattgcgttcttcatttgagggacggcaaatatgcgcttatagagttcaaactcggcagttccgaaatagatgaaggtgcaaaacatcttaacgagatagaaaaacttgttgaagagtacaacaaaacggaaaaacaatgtttgctccgtgcgcctgatttgaagattgtgataactggcactcaatacggatataaacgtcccgatggcgtttatgttgttccgataggttgtttgcgcgattaggttaggctgtgtcagacgatatgcttgaagattaaggctatcttatacaaaaaatcccgctcctgctgtgcaggggcgggatttggtttgtaatattctgtttattgctcgtcgctttcctgtacggtttcctcaacggtctcaaccgtttcggtctccgtttccgcagcaacgtcggcagtaactgtgtctgccgtttctgcgtcgctctgcgcgtccgcttccgccgcaccgtcagccgttacaagcacgggctgtttgcttctgttgcagaagtagagaaccgcaatggcaacaagcagtaccgccgcgccgatggcaagaccgatatatccgttgtccagcacgccgccgagaacgtagcccacaaggcacgaacccgcaacgaccatggcatacgggatctgcgtcgaaacgtgttcgaggtggttgcaacgcgcacctgtggaggaaagtatcgtcgtgtccgaaatgggcgagatgtggtcgccgcatacagcacccgcaagaactgcggagataacgaacgcgagctgctcaaagccgtggtcggttgagaagtctatcgtgccgttaagaacggtgaagattatcgggataagtattccgaacgtaccccacgaagttcccgttgcgaacgcaagacctacggagataaggaagaatatcgcgggaagaatggatatgggaatgctgtaagtttcaacaacggtctttacaaactgacccgcgttgaggtagccgttgttgcagattccgccgagcgtccacgcaagcgcaaggatggcaatggcgggaaccatggctttgaagccgtcaactatgctgtccgcaaactgcttgtaggtgagaatgcggcgggacatataaagaacgaagatgaaaagtatggttatgatagaaccgagaacgagcgaaagggaagagttgcagtcgccgaaagaggacgtgagcagttcccatgtcgaaatgtccgctttgcccacggttacagccgtgccttttgctatcgtggcttccgcgtcagccgtcagtttgacggagatcaccgtgccgtcaacaacgccgagcttctcttttgtcagatccgtgtagccctgcgtttcgtagtaagctatcatcgcgtcgatgtatgcgtcggtgtccgctatctcgaaatctgcgggaagcgttacggttgcaccgtcttcgcccgttattttaccgtcttccagcatatcggaagaaagcgtaccgagatccattgcgtctttcgcggtaagaccgtttgcgaacagacccttgatgtccgcataagtgctttcggacgtgttttcgccctgttcgggaatgcttacgtatacggaaatgggtgcgtcgtcggaaatcgtgtaagaagttcccgcttccgccgtgtaagattttgtcttgtcaaaaatgccgcctgtgtaaagcattgccgcaatgcaggtaacaatgagcaccgcgatgggaaggataaggtcgataaccttgccctttgtctttttctctgcggtctcggtctcgtcaagcactttgagcgggggattctgcgcaatttccgcttttttcatcggcccgaaatcgaagttcagcgctatcatcagaattatcatcagaatggtaagcagcgcatagaagttgaacggaatggtgtgtaaaaacaggctgaaaccgtcaacgtccgtgccatcgggaagagaagaacttaccgccgccgcccagcttgaaatgggtgcgattatacatacgggagccgccgttgcgtcgatgatgtacgcaagttttgcgcgggagatcttgtgtctgtccgtaacgggggacataaccgtgccgacggtaaggcagttgaaatagtcgtcaacaaagataagcactccgagccccgacgttgcataaagcgcgccgcgcttggattttatcgcccgcgccgcccaattgccgtatgcctttgacgcaccggacttggtgacaagcgcaacgattatgcctaaaaatacaaggaagatacatatattgacgttgccgcctatgctgtctcccataatgccgaagatagtctcaaatatcttggcgggattgtaaagaagcgcgcctaccgcaacgccgacgaaaagggagatgtaaacttcctttgttatcagcgcaagcgctatcgcgacaatgggaggaactattgcccagaacgtacctatcgctccggtcgctccccacgggttgatgtcctggaaaaactgtgctattgtttccatgggaaagatcctttcttttaatgcttttacataatatatctataatgacgtcgcaccggcagatgcggcgattgttcttgtagtgctttttgattcgagttgcgtagtgcggaaagtgtttgctgggcaaacagggtacttcccgaaacgtgcatagcctttttctttccgctgcgcggagtttgcgtcgtttttcgcggggcgaaaagccgagcaaacctttttttctgattttaatacgccgcgcgaaattgccgctatgcggcacgcgcatggctaatcgcaaaaaatacagcggcttttttgcgatgtatgcttttacataatataactaaaatgttatctataatgacgtcgcaccggcagatgcggcgattgttcttgaaaaacaaaaaactaattataagtgttgcattgcagattagagaaaatgctctttggttatatcggagagttttagaaagtgtttgcggtgcaaacaggggacttcccgaaacgtgcatagcctttttctttccgcttcgcggagtttgcgtcgtttttttgcgttacggtttaagcggctttatcgcccgttccaatattccgtgcatttttgcgatagccgtgccgtagttcgtcatcggcacgccctgcgcctttgcgcgctttgcgcgtgacgatatttccgcatcgttcagcatacagccgccgcaatgaatgacaagcgaatattccgaaacgtcttcgggaaaatccctgcccgacgtgaagtcgaaaacaaggtttttgcccgtatatttgctgacccaattcggcagtttgaccgtgccgatgtcgttgcattgcctgtggtgcgtgcagccctcgctgataagcacacggtcgtcgtcgcggagcttgtcgagcgtgtccgcaccgtccgccaacgcaaaaaggtcgcccttatagcgtgcaaacagcatcgaaaacgatgtcagcggaatgtctttcggcacgaccttgttcacaaagccgaacgcctgcgaatccgtcacgaccagccgcggttttttcggcagggaagaaagcagcgtttcaagctgtgtttcctttgtgacaaggcataccgcgtcgctgtccaacacgtcgcgtatcgtctgctgctgcggcaatatcattctgcctttcggcgcggattcgtcgataggcgtgacaagcacgacaatatcgtccttttgaagcaggtcgcctatcagccgcttttcctttttgccgtcggcggcaattctgccgagcatttctttcaattcgaaaatgttcgttccgcttgccgcgctgacataaagcgtgttctcgcccgccgtcggaacggcggggagcaagtcagccttgttatataccgttatgagcgggatcttccgctccgttatcagttttttcagttcttcatccgcctgcgtttcgcccttttcggcatctatcacaagcacggcgatgtcggtctcgtcaagcgttttcatcgcccgtttgaccctttgttctccgagcgcgccctcgtcgtccgtccccggggtgtcgatgatgaccacaggtcctatcggcagcagctccatcgccttgcgaacggggtcggtcgtcgttccctttacgtcggaaacaagcgaaagttcctgcgccgtaacggcattgacaacgctcgatttgcccgcgttccgaagcccgaaaaagccgatgtggactctttcggcggacggggttgaattgaaactcattgtttttccccctatcagaagcggaaatcgcggcggttagagttctttatctgctctatgttctctttcgcgatattgcgcactttttctttcggaatttttttaagttcgcgttcgatgacttcaaaaccgacttttttcgtctcctcggacgcataatccacaagatattcggcaagcgtcatcagcgcattcgggtggcagcagttcagtatctgcccgttcttgcaaaggctcataaagcggtcgcccgttctgccctcgcgatagcacgcggtgcagaaagacggaatgtggtcgctctgcataagccaacgcaccacctcgtcaagcgttctctggtcggaaacgtcaaactgctccgaatcgtgcggacgctcgtcctcgcaatatcctcccacggacgtgcgcgacgcgccgcttatctgtgaaatgccgtaatcaagcactttgccgcgaaccgcttcgctctcgcgcgtggaaattatcatgccggtgtacggcacggcaatgcgtatgcaggcgatgagttttgcgaacaggtcgtcgggcacggagttgtcaaacgccgtcgggtcgatgtcgtccgcgtgctttattctcggcacgcttatcgtgtgcggtcccacgccgtgaacggcttcaagatgttccgcgtgcataagcagccccgcaaattcgtaatcataaccctcaagcccgtaaagcacgcccagacctacgtcgtcaatgccgccctgcatggctctgtccatcgcttcggtgtgatagttgtagttgtgcttgggccccgtcgggtgcaattgctcgtaactctttttgttgtaggtctcctggaacaggatatacgttccgatgcccgcttctttgagttttctgtaattttcaacggtcgtcgccgcaatgttgacgtttacgcggcgtatgtcgccgtttttgtggtgcacggaatatatcgttttgatacattcaagaatgtattcgattgggttgttcacggggtcttcgcccgcttctatcgcaaggcgtttgtgccccatgtcttgaagtgcgatgacctctttttttatctgctcctgcgtcagtttgacgcgggggatagtcttgttttttgcgtgatacgggcagtaaacgcacccgttgacgcagtaattcgaaagataaagcggcgcgaacataacgatacggttgccgtaaaacgcaagttttatctcgtttgccagcgcgtacatcttttcgattttgtcgggcaggtcgcacgcaagcaaaacggacgcttctctgtgcgtcagtcccgaacatacaacgccgttttcggtcttcttcggtcttgccttttcgagcagcgcgtctacaagttccgcatcgttcttgtgagcctgcgcgtacgcaagcgtttgccttatctcctcgtcgttgataaactcttcggctttcattgatttcggatcgtaaattgccatggtgatacttcctttcttgcggtcagggtcaaagccctttccgtcagacagatataatatatgtatatttaattttttacaataatttgttttgtatatccctgccgtaatacatgctgtgcaaagatatcatatcgcggagcgatatttcatgtgaaatcagaggtttacgattttatatcccctcttgccgtaacgacttcaaagcctatcgacctcatgcgtcccgcaaggcacgcacggcattgcgccgattcgtcgcccgtgcatatcttgtcgtcgtaaagtgcgtactttttgcgcaccgaaacgggggaaaggttgggcatgaccacatttgcgcccgcctgtattcctttttcgcgccctttcgggtcaaccgtgccgagcgccgtggtggacggcagcaaaatgttcggttttatcagacgtatcagcgacagaagatataccgtttgcgccgccgttcctgcggtaaacgtgccgaaaggcgtgtccttttgcggaatgaacggtcctatgccgcacatatcgggactgaacgtctcaacgaatttcaggtcttttgcaagcgttttcgtcgtctgataaggcgaaccgaccataaacccgcacccgacctgaaaaccgagcgttttcaagtctttcagacaccgcatacggttgtcgaacgacatattcgcggggtgcagtttttcgtaatgttccttgtccgcagtctcgtgccgcaaaagatacctgtccgcgcccgccgctttcatcgccgcataagcctcggtcggatattcgccgagagaaagcgttatcgcgcagtcgggaaatcccgctcttatctcgcgaacggtttgcagtatctcttcaagtccgaaaacgccctcgccgccctgcaaaacaaatgtgcggaatccgagttcgtaacccgtcttgcagcagtccaaaatctcttcttttgtcagtcggtagcggtcgcacgccttgttcgagcggcgtataccgcaataaaagcagtcgtttttgcacagattgcctatctcgataagccctctgacaaagacctcgtttttatatatttcgcgtcgccgtttatccgcaagcgatgccgcatattcggcaagttcgtcagtctgcgccgttataaggtattcgtattcatcgacggtgagcgtatgttcgcggtcaagtctgtcgatgagttgttttgcgtcagtcattgcccgttacgttggaataagccgttttgacgcttaatcctttgacgttgccgagtttgcacgcaagcgcggatattgcgtcctgcggcgcgtcgagcgctatcgaaacgatgttgatgtcttttgccttgtagggaagacccattcttccgattatatatttaccgtattcgtggagttccgcattgagtttttctaccgcggaggtatcttccactataatcgccataacggctactcttgtttccataatttctatattccttttaatatgaacggcttgcggctcgttcttttgacttatataattgtgtgaatataaaatatatatattgccaaatgcagaaagtgtttgcctcgcaaacagggtacttcccgaaacgtgcatagcctttttctttccgcttcgcggagtttgcgtcgtttttcgcagggcgaaaagccgagcaaacgttttgtaccgacttttatacgccgtgcgatagttcgttcattcgaacgaaccgcacatggctaatcgcaaaaactgctcgctgcgctcggtctttttgcgatgactataatcgccataacggctactcttgtttccatggttttagtaccttgcttttttttgtttgttttgttgcaataaaatatgagtttgtcacttcgatgatttcagaaccgctttcagctttaattcttccccgtttcgctcaaccgtcagttcgaccgtgtcgccgacgcgctttgttttaagatatgcggaaaggtcgtccgtgtcgttcactttaacgtcgtcgatggctctgataatgtcgttttcaagcacgcccgcctgttcagccgcgccgcccttgaccaccgcgccgacccaaagcccgccgtcggcatttgctttaacggtcacgccgagcatcggtttttctattttgccgttttctattatctgttttgcgtaattcagcacgccatttatgcggagcgcaaagccgagatttttgaactcgcccgcgatttgcaggctgttcagccctatgacctgaccgctcaaatttataagcggtccgccgctgttgcccgaatttatcgtggcgtcgtgctggataacgtccgccgttatgccgagatttttgaactcgaccgaattgcgtatcgcgctgaccatgccctttgtggcagtctggaaaagcgcggaatcgtaaggcgtgcctatcgcgatgacagtatctccgacctcgaccgtttccgagttggcgaactcggcgggggtgaacgttccctctatcttgataactccgacgtcgctttccgagtcgtaaccgaccacggtcgcgtggtagtagttatcctcgttgtctctcacctcgaccgcccgtgcgctgtctatgacgtgcgcgtttgtcagaatatatccgtcggaagtcattataactccgcttccgccgccgctgccgcttgctttcttcgtcattatctcaacaacgctcggcaatatcttctgtatcgccgcctttgacgacccgtcgctttcggtcggttcttcgtgcttcggctcatcgctggactgttttatctcaacgctcgccttcggctggttctccgcttttcggagcgctaccatcgccacgcaggtgctgaaaatcgctatcgccgcgcttatcgccgtcaatgttatcagaactgcggaaacaccgtttctgcgtctgttttcattcttcggcgatgtgaacttctgcggtctttgcggtgcggggacttcgctgtcggtcccgtcgcttcctttttcgccgcttgccgcgtccgcatctctcaccattggttccgcattttcgctttcgccgtcgggtacggggatttccgctgcgtccgtctctgacgccgcattttcggcttgttcgggcgttttttcggcatctgcggggaaagtctgcgcttttgccgtattcagttcgttctgaattttccgaagccgctgctccggcgtttcaaaattatccatgagttatcctcttatttataactctttgcaaaatatcggcaaagagcctgtttccggctgtgtccctgcgtttgggctgcgcagaccgcgcttaccaatcttctttcagcattgcgaatatctttatgtccgcatagcggtttttgagccatatctcctcgcggtggcagccctcgtacaccatgccgagttttttcatcagcgccgccgacggttcgttgtccgccgcacatttgcccacgatgcggttcagaccgactttgttgaatccgaaatccataacggcaaacgccgcttcaaaagcgtaacctctgcgcctgcaatcgcttgctatccaatagcccatttcggcgcggcggctcagcgacgcaatgtcgtgcaggtttatcatgcctattgcccgcccgtcgcttttgcgctcgattatccatgaagtgcaggagcctttttcgtatttcagaataagcccgttcaaaaactctgcggtctccgcgttcgaacggtgcgtttcccacgtttcaaaacgggatatactcgggtcggacatacaaaagaatatatcgtccgtgtcgtaaagatacggacggcggagtacgagccgctccgttttcagtttggggagcggacggaatgcgcgcattatatcatgtaacataacaaaaactctccgacgtctttgcggtgaaaccgctttttttgactgtcggctcgcaacacaggtcagacaggcaagctccgttcgatacaaaaactttttactcgccgagataccccgaaagcgccttttcgagcggattgagctgctccgtcgaatagtcggcaacggtatatatttttccgtttgcaaaacgcaaagtcgttgtcctgtaagacgcaacgccgcgttctcttgtatgcaattttaccgaggcgtaaaaagagccgtcctttttataaactttcaggtcggaaaaatcctcgatataatttgcgtattcgccgtttttctgtgccgcgacacgctttttccaaacgttttgagcctcttcctccgaaagttcggtgccgttttccaagttttcctcgttgtcgaaaaaccaaatgttttcgactgcggaatcgaggtcttccgctattatgtctttgagaaatccgcgaacctcgaaatatgtctttgtctgctcaaagccgaacccgccgtttttcttcggcacaaaatatacgaccgccgtcacggcaacggcaagcagaaccgccgcgcccaaaacgcgcaaaacgtttttctttatcttctttttcgtctgcgcggcggcgatgtcctctttatttatttttttgaatttgctcacaggtctttatcctcaaacggcacaaaaaatgccatggatctgtttgtgtaactcttgtcttccgtaacttcgcgtatgacctctataaaatctggcagggtataatattcgtcttcggtctccgtttcgacctcgcatatcgcctgctttttccaaaacggataaatgtctatctccgcaaaaagtccgtttttcatcggaattttccagcgccgcttttttatcggcgtcagatttttgtcggcttgcttcagcatggagaggtatttcttttcgtccaacgcctcttcctgttcgtgcctcatactgcgggaatgtccgaatttgagcgtatatgtgtataccgtcctgccgtttctttcggcttttctgaccctttccgtaaaagtcgggataaccggcacaagatatgtctgcgttatatccgtgaccgttgcgccctctatcgttgcaagaaactcttcgtcgggcatctttatcagatacttccgttcgatttcaattcccgggggcatatcacattttctcctcgtcgtaaaccgctctgcaaccgccgatgaacttcgggcgcgtgcgggcgtaaacaacgtttgcttcgcctatctttttgacgtcgagacgcacgggcaccgcaacgcgcttcaagtgcatacctatcagcgtgtccccgatgtccatacccgcgtcggctttgacctcttcgaccacgacggggtgttcaaacgatttgtaacccgcggtcgcccatgagccgcccgctttcggctgcggcacgacgttgacctcttcaagaccgtggctctgcgcgtactcgccctctaccaccacggctctgttcaggtgttcgcagcattgacagcccagatatatgccgttctttttcagcacgccgtatatctcttcaaagaccgcctgtcccacttcaaagaccgaacctttgcctatgcgctgacccactatctcgctggacgaacagcccaccacgcaaaggtcgccttttttgagttttgcggctgcgacgagcagttcagccgcccgccgcgcctcgtttctgatttcttcgtacatttccgtcactcttttcgggcttatatcagtcctgcaaagcccatttgtatttgagataatcttggtattttgcgtcccaagcagcgctgtcttcgggctcgtagattttcaggtcgtcagagcagaactcatgtcttgcctgcgcaacgtcctttatcgtgccctgcgcgataagctgaaccgcgatgttgcctatcgccgtggcttcaacgggacccgccgttatctttttgcccgtaacgtttgcggtgaagcggcaaaggttgacgtcctttacgccgccgccgatgaggtgaacgacctcggtcttttcgccgagcagtttttcaagcgattcgatatagtatctgtaagtcatcgcaaggctttccagaatgcagagtgcatactgacccttggactgcggcagcgcctgaccggtctttttgaggaactcgtctatctttgagggcatatttcccggtttgccgaacggcgcgtaatcggggtctatgtaaacgttcgcgctcttttcggtgagcagcattttgtcgatgtccttgaacgaaatgttgtcgccctctcttatccattgacggcgcgtttcctgtaatatccaaagtcccgaaatgtttttaaggaagcggattgtattctcaacgccgccctcgtttgtgaagttctcttcaaacgttttttcgtttatcagcggctcttttgtctccgcaccgagcagcgaccatgtgccgcacgaaacgtagcagcccttttcgcccttttctatgggagcggaaacaacggcagacgccgtgtcgtgcgagcctaccgcgataacgtctacctgcgctatgccgagttcgtcggcaatgtctttcgaaagtttgccgataacgttgcccggaggagttatctttccgaacagactgcgtttgagaccgagacggtcgatcatgtcaaagtcccagtttctctctttcgctttcagcaactggctggtggaagcaatggtatattcaacgttcttttcgcccgtcagcagatatgcgaaaaggtcgggcatgaacagaagcgtctccgctctttcgagcacgtcgggacggttcagtttgagcgaatagagatgataaagcgtgttgatgtccaggaactgtatgcccgttttgtcgtaaagctcgtcctgcggaatgacttcgaaaactttctgcataatgccctttgttctctcgtctctgtaatgaacggggttttcaagcagtttgccgtccttgtcaagcagtccgaaatcgacgccccacgtgtctatgcctatcgaggttatgtccccgttgcccgaatttacgcatttgagaataccctgttttatctcatggaacagtcttaatacgtcccaataaaacgtgccgtgaaccataacggggtcgtttgaaaatctgtgcatttcttcaagcgtcagtttgccgtcctcg

SEQ ID NO: 1737 - DNA, 2390 bp, Unknown
  16S sequences of unknown bacteria
cagagctggccgcgcatgtgacccgcatggtgaaggaagcggcggacaagccggtctatgtcaagctgagcccgaatgtgaccgatatcgtggagatcgccaaagcggtggaagaggccggcgcggacgggctggtgctcatcaatacgctgatgggcatgcggatcgatctgaagagcggcaagccggtcctcgccaatgtgaccggcggcccggccatcaagccggtggcgatccgcatggtctaccagtgcgcacaggcggtgaacatcccgatcatcggcgtaggcggcatcaccagcgcagtggatgtgctggaattcctctatgccggcgcaagcgccgtggaagtcggcgcccagaatttcgtagatccttactgctgcgtgaagatcatcgaggatctgccggaagtcatgaagaaatatggaatcagctcagtcagtgaagctgtcggaaggagcgttaacggatgaacaaaaagaccattgcagcacttgatttttccaccagggaagaagtgctgaactttctcaaacagttcgatgaaccgatctctgtcaagatcggcatggagctgacctactcattaggctttgacatcatccgggaagtgcgtgcgctggggcacagcatcttcctggatctcaagctgcatgacattcccaatacggtgaaaaaggcgatgaagaatctggcggcgctcgatgtcgacatcgtcaacctgcattgcgccggcggcatcgcgatgatgaaggcggcgatcgagggactgcaggaaggggcagtcaatggcaagcgtccgctgtgcatcggcgtgacccagctgaccagcacgtcgaaggaagccatgaatgatgagctcggcatccccggcgaagtgctggactgcgtcatccattatgcgaaaaacgcgaaggaagccggattggacggcgtcgtctgctctgtgcatgaggcgcgtgccatccatgcggcctgcggtgatgacttcttgaccgtgacgccgggcatccgtctggcggatgattccaaggacgaccagaagcgtgtggccactcctgcctttgcgaaagcagaaggctgcgactatatcgtggtcggccgttccatcaccaagagcgctgattcggccaagacataccgcgagatcgaagcgatgatgcgctgaaggaggaaggacatggaacagtataagcaggaatttattgaattcatggtagagagccaggtgctcaaatttggcgacttcacgctgaaaagcggcagaaagtctccgttcttcatgaatgcaggcgcctatgtgaacggttcgcagctgcgccggctcggtgagtattacgcccgggcgatccacgatcattacggcctggacttcgatgtgctgttcgggccggcctataagggcatcccgctgagcgtggcgacgaccatggccatcagcgagctgtatggcaaggagatccgctattgctcgaaccgcaaggaagtgaaggatcacggcgataccggcatcctgctgggctcgccgctgaaggacggcgaccgggtcgtgatcatcgaggatgtgacgacttccggcaagtcgatcgaggagacatatccgatcctgaaggcacaggccgatgtggacatccgcgggctgatcgtttcgctgaaccgcaatgagcgcggcagatccgctgatcagaccgcgctggatgagatccgcgaagtctatggctttgagaccgcggccatcgtcagcatgcctgaggtcgtggaatacttgtacgggcgcgagcatcagggcaaggtcatcatcgatgatgagctgaagcagcgcatcgatgcctactatgcgcagtatggcgtaaacagatcataaacgggaaagggaccgaatgcacatgtcattcgatcccttttttcagccattgcctgatccagcggatcacgccgtcttcttcattggtatatgcggtttcttcgcggcagacggccttgatctgcggcagggcgttcttcatggcgacgctgtatccggcctcctgaagcatctcgaggtcgttcatgaagtcgccgaaggccatcgtctcttccctggtgatgcccagatgcttttgcagcatgcgcacgccgacgcctttgttcacgcccttgggcatgatgtccatccattcaaaggcggagacggcgatgctgaagtccgcgcggtaaggcgcaaaccgcggatagatatgctcggccgttccgccgtgatgcaggatggcgatcttcaggatctcatcgtccacgccatgcaggtcgctcactcgctgatggttgtgataatatggcgtgatgttgcgaagatcggcaggatcctccgtggtgtacccggcgctctttacgccgcacaggaccggcac

SEQ ID NO: 1738 - DNA, 2641 bp, Unknown
  16S sequences of unknown bacteria
cgcgtggctctcgaactgtatcgacgccgggatgaacgcctcgcctatcgcgggtttcagatcgtcaagggtgctgtagatgtcgtttgtcagtctgtgagcgaatttattgacctcgctgtcgcaggtgccgaaacagagcggttccttccggcactcggcgagaaattccttgtcgttattccggagctttgagatcatctcctccggtgtgatgaccttccggtcgaaaatcatgtcctttatcgtcagcatagagtcgacaacgtttatgttgccggcgaaatttattatgctccacttatacctcgcgccgccgcggtagtattctacgccgttgtctatgcagtcgtctatgagcagcgtcctgagcggaaccggcagaacctcggcgcgccgcagctgtgacgcggaaacgtctctcgtgacaataagcgcggtttcgcgcacaaggtctatgaacgcccggtagaactcctcaaaatctttcgcgccgggcagtgaagaacagattgtcttctcaagcaggagcggcaggttcagtccggcgtcaatcgagccgacattcgacattcccgcgatcatgctctcggtgcatccgccgccgcagaagcgcttcatgtcctctttcgttatcgacgggagtctgtccataagtatccgcggcaggtcgatcttattgtagaacgcgggctgaccgccgccgctgcggatcgtctcaaacgctagctcccagatgtcgtccggcgtgtccttgccgacgaacagctcggtcatcgggcggcgcttaccggcgagcgccttcaggcactgatataccatcggatgataaccgttcagcccgagcgacatcgagtatccctcgtttatgtcgaggttgtcgtacagctcacctataagcgggacaatgtcctctcctttgtaatacggcaggagaccgtcggcgagacacccgagattatcgcagcagtcgaggtacatgatgaagttccagccctcaatcgcgtcgaagatgttctccgccgggcgcatcggtattttttcaagagccgagacaagctcttccggcgcgccctcgtccctcagatacctcacgcaccgctcggagtagacgcgaagcccctcaacaaggtgaagcagtccttcccgcatatccgtgtccgcgattttctctatccgcggtatgtatgagagaaagccttcgcgcagtatccgctcatagtacggcatcgaatgcacccacataagccccgccacacggtgctcgacaggtatgccgattacatagccctgaagaaaatcctcgcggtattttttcgccgtatccttgtcctttatccggttttcctgcccccagagcaggtttgtgtaggagtacgggaacgcgccctgctttccggacgggtagagccttttcgtcttgtcgtattccgggagcgggctgttctcaagaaatctccttattccgagcgatttgcggtagaacagggagcgctccggttcctcgaacagaccggcgcagagatactcgccgtcagccatcagttgttctgtgttcattttcttcttcctttctcagatagttccgccgggctgaacccgagacgctcggatatctccgcggcggtttttcttaccattttctcgaattgtttcttcttttcctcgtcgacccgatacatgaggtacattatgtcgattccggcgatacatttcccgtccgcgccgaagacaggcgcgccgacgcaggagacgccagggatacattcctcgctgtcatacgcgattccgctctcacggacagtctcaagctccgcgaggagctcttcgcgcgtgcgtatcgtgttcggcgtcatgccggtcagcgtttctggcagtccgtccgcgagctccggtgagttcgcgagtatcaccttggaacccgccgaacaatgcgccgggagcagtgttccgatctccgcgacgagctttatcgggttttccgtctcgaactgcatctgtatcaccgcgaaattctcacgcagggtcacgagctgcgtcgactctccggactccttcgcgagacgcccgagaagtggaccggcggcggtgttgagcttcatccgcctctccgccgcctttccgagaaaatagaagccgctgccgggaacgaaatgtccgctctccgggtcggatatcaggtatccgcgctcattcagcaccatacatattctgtagaccgtgttgaccgggctgccggtgagccgcgctatctcatttatcgagtaccccgagtcgctccgggacaggagctccgcaatatcgagcatcttctccaccgcgggagccgagtatttcttttccatgcttatggcaatacctttcatacaaacttccagttctgatgcggttttgaaagcatcaaaactgtttggtcagaaatttattttaggacttgttattctgaatatagtatagcatattatatataaaatgtcaagaggaaacgacgaaaaagagaaaatttctccgcgcctgttgcaatccgttttgttatgtgctataatgttgtcatcacagagcggaggatacatatatgaacggaactatattcaatatacagaaattctgcacgagcgacggaccggggatacggacgaac
